United States Patent Application Publication US 2025/0380706 A1 - sequence listing, part 2

SEQ ID NO: 5 - DNA, 323066 bp, Rhizobium matallidurans
  source 1..323066: mol_type = genomic DNA
gctaaaacgcggcgtagctgcgccagagcacgtagaggctgacggcgaagatgacgccgcggaaaatcgtcgccagcgtgttgcgccggtcggcgagccgcgttgcggcgatcgttccgacgatgccgccgccgatgcctcccgcgatgaaatagcccgccgtcagccagtcgaccaggcccgacgtcgcatagttggccgcggtggtcaggccgaaggtgccgacggccatcagcgaggtgccgacggcgttgatgaggggcatcccggtggccagcagcagcgccggcacgatcagaaagccaccgccgatgccgaagaagccggaaaacaggcccgtcagcaaggcgatcgcggtcgtcttgccgtgcgtcgccatggtcagcgaccgggccgtgacgtcggaagcggtgctggtcttgcgcatggcgaagctgacgaacatcatcagcaggccgaacatgaagagcagcctctggccgtcgacgagcttgccgaggctcgatcccagataggcgccaagcgcgccggcgaccgcgaagatcagcgcgcagcgccaccagacgtggcccttggccgcgtgtcccgcgagattgaggtaggcattggcggagaccgcgagcgcgccggttccgatcgccgtgtgcgggtcgcgcatgccgaccgcgtacatcaggagtggcgtcgcgaggatcgatccgccgccaccgatcaggcccagcgtgcatccgaccagcgagccggagccgagcgcgaaaaggacattctggagcgatccatccacggcgtcaccttccccagaccgatccgggcagggcgtcgagcgggatcttcaggtagcgccggccatcggcctcgggctccggcaaggcgccgccgcggatattgacctgcagcgcatgcaggatgagcttcggcatcggcagggtcctgtcgcgggcctccctgatttcgatgaaatcggcgcgggagcgaccggcgacatgcgggttcttccgcttctgctcggcgaccgagctttcccagagagcctcgcgtccaccgggcatgtagtcatggccggtgaagagccgggtctggtcggggagactgagaatccgctcgatcgatgtccagaggctgttggcactgccgccggggaaatccgcccgcgccgaaccgctgtcgggcatgaagagcgtgtcgtggatgaaggccgcgtcgccgacgatatagctgatcgatgccagcgtgtggccgggcgagtgcatcacacgggcttcgagatcgccgatcttgaacgtgtcgccatccgaaaacagccggtcccattgcgatccgtcgcaggcgaggtcgggccagttgtagatctgtttccagatccgctggacctgcacgatatgttcgccgatcgccgtcggcgcgccggtgcgggccttgaggtaggaggcggccgagaaatggtcggcatgcggatgcgtgtcgaggatccattcgagcgtcagatcatggcgcgcgacatgatcgagcaggcgatctgcattcgtcgtcgccgtcgaacccgacttttcgtcgaaatcgagcacggggtcgatgatggcgcatctgcgggtcttcgggcaggaaaccacatactggatgctgccggtgcgcgcgtcatggaggcccttgacctcaggccgcatgggctttgccttccgaagccgccatgcgcgggaagaagatcgcccggcccggatcgaagtcgtaatccgcctcgaacgcggtcgcgtcggcggcgatctgcgcgacgcaatcgagaatgaaccggaccttgtcgtcatcaagcaggacgctgaaattcagtctcacgaaaccgggcttcatgatctcgtcgccggacaggatggcctgccggatcgcctcggactgctgttcgtcgatcgacagcagacggtggacataaggcccggcgcaggcgcaaccgccgcgcgcctggatgccgaagcggtcgctcagcatccgggtaatcagctgctggtggacatagccgcccttgccgttcttcacgcggaacgagaagatcggcagccggtccgggccgggcaggccgaggatttccagccgctcgtgatcttgccaggcgttgaaggcccgctcggcgagcgcatgattgcgcttggccatcgcctgcgcgccgatcgcgtccttgacgatgaaggcaagcgccgccctgatgtcgccgacgacattcggcgtgccggcttcttcgcgggcttcgaggctgtcgctgtagtcatgcgtcttgggcgacacgaacttcaccgtgccgccgcccggccaggatggcttggtcgccgagaccgcgtcgcgccgcacgatcaggatgccggatgcgccggggccgccgatgaacttgtgcggcgaaacgacgatggcgtcgatctcagcgtcgtgcgccggcgacatggcgatcggcacataggggccggcgccggcgtagtcccagatcatcctggcgccggcggccttgacgatccgggtgatcgccgcgacgtcggtggtgatgccggtgatgttggaggcggcggagagcgtgcagatcgtcagatcggcctcgccggcgcgcagcgcggcttgaagaatggcgatatctgggccgccggacgcctgctcggcgatctcgacgatctcggcgccgctttcgcgccagggcaggatattggagtgatgctcgtaggggccgataacgacgcgaacgcgcttgccggcggcgattgcttcggtcacgccaaacagcgagaccagcctgttgatgcccgatgtcgcgccggagccggtaaagatgaccgcatggtcgccgctcgcgccgcagagcgcgccgatcagtccgcgcgcttcccggcgcatgcgcgtcatgaagcctccgcaataggaggcctccgtgtggctgttggcgtaataggggagaacctcctcgagcacgaaacgttcgacctggtgcagggcccggcccgacgcgacatagtcggcgtagacgaggctcttttcaccatagggaccggaaatcttcgcgcttgcgccgaccagcccatcgcgaagagcggcgatgacgtcggcggttccgagattgtcgcggaacgtcgacaatactgtcgctttatgcgctggggcgaggcgaggggtttccacggtcgttctccttgctggtgatgacctggattgtaatctggatcgggccgagcaaactcacctgattttaggcgaaatcggccgaagtcggatcatgtgatcgaatatcgcggattgtgcgatgactttgatatggtgcgacagggggagcgcgatttgatcgcgcgaaaacggcgggcgagtcacgacgatagattgccagcgatgtggcaaatcgcagtgctgacgataagccgcacgccagcggtgacgccttgaacatggcaaggcgcccccctgacggatttgagtgtttggcctggactagccttcgtagtgtccggatgcggcgtccttggcggacttcacgacgacggcaaaatccacgtccttggtgatcgaggtgccggtcttcctgagatcggcgacctccttgagcttgctgcctgctggtggatcgagcgggatcacggttcccgcgtcgagatcggcaacccaaagaccgtcttcgccggtgatgctgatgacaacgactgcgctcatgttctcttccctctaagatgaacggttaaaagcctgccttcttgaggccctcgcgatagaggtccttatgccattgctccttgctggggactgccgccagccaggtatcgacgtcgaagttcgggtttgcctcgcgcacgcggcgcacgaggatgcgcgccttgtcggcgtgccccatcattgcccagctggcggccgcgaggcgatccgctaggctggggtccgtcatctggccgatataatcgatcgatgacgcgaattcgccgagcgcgtaattggcgccggcggccgtccagagatacatgtcgggtgtcagcgggttgagctcgatcgcccgctcgatcttctgcaatgccatgccggggcgtgagcaatgcaccagcgtgtcggcatgatcggcgatgacgtcggcgtaatgcggcgccagcgcttccgccacttccatcgcctcggcgctctcgtcgaaatcgccctgcagcagcttggcgaccccgaattcgcggtaaccgtcggcgaagtccgaacgcttttcgatcgcctgtctggagaggttttccgcctgcttcaagagctcgatatcgccgcgcgcggtcaagagccactccttggaataggtgcgtcccatggcgctcagggccggcgcgaaatcggggctggcgctaagtgccgccttcatctccttgcgcgcgcgccggaggttgggcagcgtcatcctggccatgtcgcgcttgcccgcgaggtagcggtgataggccaccggattgagctcgatatcggcgcgctgctcctcgtggcgggcgatctctctcgagacggacagggcgatctgccgagagatcgcgcgcttgtcgcgcagcagatcgaggcggcgcaggccgaagcgttcggcccagagaacctgggcgtcatcgacgaagatcagctgggcgaacagcgacacgtcgtcgccgctgccgctgatgcgcgtctccagtacataattgacggcctgacgctcgaagaaggcggcctgcgtttccacgttgtgaccgacctgaaccgcggagtagggggcgatcacccgcaggctgttgaaggcacagaagccgatggtgatgtcctcgatcagcgacgaggcgatgaggcccgcatccgggctggccgactggttgctcggcggcagcaacacgagacgcgggatcgcatgggcgatgctgctggtctcgaccggcaggccggcgcccgcgccattgcgggagggcgctcttgcttgcgccggaagcttggcgtcgccgctgctctttgcggccgacgagaccttgacgccgcgctcgatcgagccacgtcgcttggcgaaataattctgaagagattcaacatcttgctcggcattgaagatcttcagcaataactgcagcgtctccgggtcctgcggctccgagcggaagaggatgaccgccgccttgcgcagcacttccgcgtcgtcgcgcgtccgtgcatcgccatgcgcctctcgtagcgtccgttcgagaagctcgacatgtcgatttccctcgtcgacgacccagctcttgaactcccggctctggcacttgaccgggccgaggaacggctgatccagcagcttgaccagccgccgcagccgcgcgaaggccgtgccggctgccctgtcttctctaacgagttggatgtccgacgtcagctgcgcgcgatcgatcgcgatggtgctgccctcgaaggatatgaagctggagccgagatcgctctgataggctttcagccgggacagcagctttcgcaaggtggtatcggaagcgccgttatccgtttcgccccaaaggaagcgggcgatcgtggtgcggtatgccgccccgtcgtcaagggtcagcaggtaggcgagcagcagcaaacccttctcgggcaaggcgatgacgccgccatccttgccggccaaccgcagctttccaaaggtctctagaacgaacgtcatttcacccctgatcagcccggttttgctgggcgccggctcgtcccggcaggcactttgtcacgatgcgcgccgacattcaacagctgcattcgcacttgcgagacgcaaaggttgtattatcctcgcggctgtatgagcgcgttcgcacttgtcacaacgcccgcgtttgcgcgctaatgcgggagacaacgtatggtctttcgaaaacacgaaaagcagcgggatcaggatgcgggtgatttttgcagggccgacgcttttcggtgctgacgtgcggcccggcacggattacgagctgcgtccgcccgcgaggcagggcgatgtgcacagggccatcatgcaaggcgccaatgtgatcgggctgatcgacgggatctacgaacatgtgcctgccatatggcacaaggagatcctcttcggcttgtcgcatggcgtgcacatctttggcgcggccagcatgggcgccttgcgggcggcggagtgcgcggcgttcggcatggtcgggatcggcgagatctatgaagcctatgcctccggcgccctcgaggacgattcggatgtcgcgcaggcgcacgcgccggccgagatgggctttcgtccgctaagcgagccgctcgtcaatgtccgcgcgacgctggctctctgcctggatcgttcgctgatcaccagccaggagcatgatctgttgcaggcgacggcgcgcgacatgttcttcaagaagcgtacctaccggtctctcgtccgaacggcgcttggcgagagcctgcgcgcggaggcggtcctggcgcagctacgagaacacgccgtcaacgccaagctgcgcgatgccgagcggttgatcgcggcggtcgaacggacgccggacagccggttcgcgccggcattcgactggacgttccaggcgaccgatttctggaatgcggagtttcccggcagcggctgagcaaggcggctcctgccggtgaacggatgctctcatccaccggctttggctttcccgtcagtccttgacgggctcgccaagcgtatgcatcagccggttcgcccagccgaagattgccgtggacaggacgaggtccagggattcgagttcggaaaggccgacatcggccagatcccgcgcatcggcttgcgtcgcctgcggcggcgtcgccgacagatgcgccgagaaatcgaagatcgcctgcaggtgctcgtcgagttcggcgtcgagttcgtcggtgaagaccgcgttgatcacgtcggtgcgcttggtgtagttgatgaagcgcgatgcatggacggcggcgcagtagacgcagcggttgacgacggacgcggccgttgcgcccagttcgcgctcgccaagcgaaagcccgtccttgccgtacatgatcaggttgaacaggggcgagcggaccgcaagcgattccggatcgtgcgcgagcgtcaggacataggtcgatatacccttgttcgatggcgtgacctgcatggcctcgcgctgttcgtcggtggcggtcgccagatccacgggaacgacgtaaggctgccagcggggaaccgtggtggtgaagctgtggaccgtctcgctcattgtcttgctccgatcagtgccaggccggcgatgacgcgcacttgataattcacgaaggcggcaagctccgacaagcggacgatgtcggcatcggtcagtcccgcgcttcgcaatgcttcgatatggccgcgcgtcgcctcgcgtggcgccaccgtcaggcggtcggcgtggcggatgatctcggcggtgcgcgggtcgtccacattggtgcccggccgcgccagtgatgccgtcgcgctttcggcggcgcgtttcaccagcgcgtcgtaatgttcggcgagtgcttggttgccgttctgccttgccatgcgcgccgccagcgccgcgcgcaatccatgcgacaggccgccggggtcgcggggcagaagcacggcatcatgcgcggcctcgctgaggcgcaggatctcggcgcgcttctgcattgcctcggcaagcgccgagccaggttttacggcggcaagcgtttcgatgagtgtcaaaagaagctccttttgaattccgatggcgagaatcagacaagtctcgcgacgggtcatgtcaaactagcatgaggctgccgatgtcatgcgaaataattatctattctctagtgaaattatagaaaaatcatgcttcaaatgcatggtgggcaatggttgatatgtcgcatgcatagcaactcaattgacattcgccagctcgaagccttcgcggccgtggtgtccgccggttcggtcaccggcgcggcccggctgctcggtcggtcgcagccagcggtcagtcgcctgatccaggatctggaggccgagttgggctacgcattgcttcatagaagcagtggccgtatccagccaacggcacgcggcctgcgctttcatgccgaggtcgagcgtcaccttgccagtctcatccatatccgtgagcgtgccgaggcgatcggccgcgacgagccggcaacgctgacggtcgccgcgacgccgtcgcttgcggcaggggtgctgccgcaggcattggccgcgctccccggcgagctcataccccgtcacctgcacgtccagtcgcttgccgccgagaacgtggttcaggccgtgatcgcccgctcggcggatctcggcatatcgagcctgccgctcgaacatcccggcctcgagatccactggatcgcggaagcgccctgcgtggtcgccatcggcgccgacgatccgcttgccaatgacgacgtcgttcgcctgtcggatgtcgccgcccgccgcgtcatcacgctcgccaatccataccgtctgcgtcatcgcgtcgacgaggcgttcgagcatgccggtgtggctcccgagcgcatcatcgacgtcaatgcgtcgctgacggcactgtcgctcgtgcgcgcgggattgggtgtcgccatcgtcgagccggccacgatccgcggcgtgccgctcgagggcgtcgtcatgcgcaagctcgaccagaacattccgtttctgttcggcgtgatctcggccgccgcgctgccgctgacgccgaccgtctccgccgtcatcgatgcggcgcgcgtgcagtctctcgccatgccgggctgccgtctgttggaagccaacggcacggatgcgctggccgacagtgtctacggacaggcaaccatttcggaaggaacgcccagatgagcgatcgttccgcgcaccccgacaatctcgccgctctcgaggagcgcctgcgtcaggatctctcatggctggaattgccggccaaatcctgggtgccggcgcgggccgtcgacggacagccggtcgtcgatgtggtcgtcatcgggggagggatggctggtcttgtcgcctccggcatgctgaagcgtctcggcgtcgccaatcacctcgtcctcgacaaggcggcggcggggcaggaggggccgtgggtcaccttcgcccgcatgcgaaccctgcgctcgccgaagcagctgaccggcccggcgatggggctgcccgcgctgacatttcgggcttattacgaggcccgcttcggccgcgaggcgtgggttgctctcgaccgcgcgccgcgccgcatctggatggactatctgatctggtaccggaaggtgctcgatctgcccgtgcgcaacggcgtgtccgtcgacaacatcctcccgcgcgccgacggcatgctcgacattgcctgcagtgaaggtggtgcgaagaagacgatcgtcgcccgccatgtggtgctggcaacagggcgcgatggtctcggcggcccgttcgttcccgcgatcgccgggagcatggaccgcaaatactgggctcacacggccgacgagatcgacttcgccgcgctgcgcggcaagcgggtgggcgtgatcggggcgggcgcctcggccatggacaacgccgcaagcgcgctggaagcgggggcggcccgtctcgacctgttcgtgcgccgcaagacgcttcccgcgatcaacaagtttaccggcatcggcagccagggtgtcgtccatggcttcgccggtctgccggacgaatggaagtggcgcttcctgagctacgccatgagccagcagacaccgccgccgcgcccgagcgtgttgcgcgtcagcgcgttcgaacaggcgcatcttcatctcgaaagcccgatcgacgccctgcgccaggaaggcgaccatatcgtcgtgaccacgccgcgcggcagctatccggtcgacttcctgatcttcggaacaggtttcaagatcgacctcgaaaaccggccggaactcgcgagcttcgaaccgcacatccgcctgtggcgcgatcggtttccgacgccggcggggatggaaaacggggaactcgagggatcgccggatctcggcgatgcgttcgagtttctcgaaagggtgccggggtcgtgcccggctctgtcgaaaatccactgcttcaatttcccggcgacgctgagccacggcaagctcacgggcgacattccggcgatcagcgaaggtgccgaccgcctcgcgcgcggcatcgtcaggtcgctcttcgtcgaggaccgcgagacgcacttcgccaacctacaggccttcgacacgccggaactcctcggcgacgagtgggccgacgacgatgccgaagcgctttccgaactatcttcccagaggaactgagacccgaaatgctcgagatcaagaacctgaagctgtcctacgggagcacccagatcctgaacggcgtcgatctctccgtgaaaagaggcgacgtggtgtccatcatcggcccgagcgggaccggcaagacgacgcttctgaagtgcatcaatcatctcgcgaagccggcgtccggaaccatcgaattcgatggcatcaggatggatttcgcgcggcccgacaaggccgccgtccaggcgatccgcctgcgcaccgcgatggtgttccagcagttcaacgtcttcaagaacatgaccgtcatccagaacgtcatggatccgctggtcgtcgtccagggcaagtcgaagaacgaagcccgcgcgatcgcgctgcaggaattggagcgggtcgggctgtccggcaagctcgacaactatccctcccagctttccggcggccagcttcagagaacgggcatcgccagagcgctcgcggtcaagcccgatgtcatgctgttcgacgagccgacgtcgtcgctcgatccggaactcgtcaacgaggtgctgaaggtgatcaaggacgtgacgtcctcgggcatcacctcgctcctcgtcacccacgaaatgcagttcgccaagaacatctcgaaccgcatcgtcttcatggacgggggtgtcgtcgccgccgatggcagcccgtccgaaatcttcgatacgccttccaacccgcgcctcgcacagtttctcaattccgaacgcgcgatccagtaaagaaaggatgcctgaaatgacttccatgagttcaatctcgcgccgtggtctcggtctcgccgtcgcaggcgtcgcgatcgcgttcgcaacgacctcgcttgccgaggacgtccgcaccatcaagatcgccaccgccgccgaatccaagccgctgtcatggggcgcgatcggcgtcgagccgcagggctacgagccggatgtcctgaaggccatcaacgccaagctgccgcaatacaagttcgtcatggaaggggccgccgacattgcccaggagacgggcctggcgaccggcaaatacgacgtcgccaccggcggctactatcgcgctccggcgcgcgaaaagcagttcctcattcccgaagcgccgatcggcgccagcctgatcaagatctacagccgcaaggacagcggcatcaaggagatgaaggatctggtcggcaagaatatcgtgccggtgacagctggcggcggcatctacaagttcgcgaacgcatggcaggaaaagaaccccgactacaagatcgaggtcaccgcctcgagtgccggcattccctatcccaatcgcctgaaggaagtcgaaaccggcaagtacgacgcgctggttctgccgtccaacctaggcgagcagacggtgatcgacgagcagaagctcaatgtgcaggcgagcgagcccgtcgcgatcaaccagaccttcgtcctggtccatcgctcggaggaaaacaaggcgctggctgacggcatcgacaaggccctgaaggaactcaaggccgacggcacgctcgccaagctctcgcagaagtggttcggtgaggacatcaccacctacatgaagtgacgccaggctttcgaagccggcgaccgggcccagactgaaagaaggagtgttccaacgtggacctttccataatgatccccgagctgctcttggcattgccgctgacgcttgcgatcacgttcacggccatggtcgccggcttcgtgctggcattgatcgcgacgacgttgcgggtgcgcagaatacccgtgatcagccacatggccgatctctacgtatcctacgcccgcagcgtgcccgttgtccttcagctgttcgtcgccttctatggtcttcccgtgcttgtcggcgccttcggcatcgacgacttcgtctcgccgacgatcgccgccattctgggcctcagcctctaccatggcggctacctctccgaggtcatgcgccccgcctatctggcggtggagcgcgggcagcacgatgcggccgacagcctgggctacacgttccggcggaagctgctgcgcgtcgtcgctccgcaggccgtccacatcgcgcttcccggctatgggaacgccatcatctacctgatccataacgtggcgctggtcatgtatatcggcgcggcggacgtgatggcgacggctcatctggtgatgcagcgcgactacaaccagtaccagttcgagacctacctcgtgctcgcggtgctttattcggtgctgtgcctcgttgcctgggcaagcgtccgcttcttcgaacgccgcgctggaagatacgcatcgaacgacagggccgccagcgcgccgctgatggcaagcatctgatcagggaaagaattcaaaatgttcgacagcgaagttcttcttcccgatctctacgagatcctgggcgccgtgccgctcacgcttgccatggcgcttctcatcttcgtgttgtctacgatcacaggcagcctgttcgccatggctgagtaccggaagaccccggtgcttcgccagttcgtcgtcgcctacaaggtcgccttcaagggcgtgccgatggtgatcgtcatctttctggcctattacggcctgccatcgatcctgcagtttctcgcctcgctggttggcatcgactataacggccattcgatgcccaactgggtgacgctgatcgttgccctgacggcctgtgtcgcggccttccaggcggaagtcgtcaagggcgccttgaactcgttcgataccggccaggcggacgccgcctattcgctcggctacaagaaaagccagctttttcgccgtgtcatgctgccacaggtcgtcgtcgcggccatccccgatctcgccaattcgttcatggtgatcatgaaggcgctgtcgctgggctttgccatcgaggtcatcgatatcttcgcgcaatcgcagctgaccgcggccctgaacttctactatctcgaagccttcctggtcgccgtggtgatctacatggcgatagcctatgccgtcacccagatcgccgacaggaccgaacgggcattgagggtgcggacgtagggtgcgcgaaaacaccgggcgtcgatcgggtcggtggatacggccacgcagaacggccggcgggggcgggtgcccggcagccggcggccctggcgctcgctcaggtcaagcacatgcgccgccgacaccacggtcatccgaccggcgatcaccttcgataaaatctcgatccgctgcagatcgcgctcgctcatcgctatcaatcccatccgcaatctcccacgcatccttcagacccggggagagtgacattccaactttgcagaaacaggacattctaactttgcggctacacgcagaagttcgataacatatgttatggaacatagacgtgagcgtacgacgcgtgcggatgctggcgtcccgtccgccgaacgactggccgccgatgctactgaaaccgttgctcctttcccgccactggcgatgcgaacaggtgttcgccgatttcgaccttgcggtcgccatcggtgcggacaacgagtgatggcaggccggggacgtcgaggtagatgatcgcgtcggcgccgagccgttcgacatagcgcacggcacccttccatttgccgtcggtggcagacagcgtcagatgctcgggacggatgccgtagatccggcatccctcttccgccgcgatccggccttcgaagagattggtcttgggagagccgatgaagccggcgacgaagggcgtggcgggatggttgtagagcgtcatcggcgagccgacctgttcgatcgtgccgccgttcaggacgacgatcttgtcggccatggtcatcgcctccacctggtcgtgggtgacgtagatcatcgtcgcgccgagcttggcgtggagttcggtgagttcgatgcgcatctgtgagcgcagtgaggcgtcgaggttggagagcggttcgtcgaacaggaagaccttcggattgcggatgatcgcccgaccgatggcgacgcgctggcgctggccgccggaaagcgccttcggcttgcgatcgagcagatgcgagagctgcagggtttcggcggtctgcctgaccttttccgcgatctcggccttggggcgccgggcgagcgacaggccgaagccgatgttctcggcaacggtcaggtgcggataaagggcataggactgaaacaccatcgcgatgccacgctccgagggctccgccgccgtcacgtccttgccgtcgatgaacatctgtcccgaggtcgaggtttcaagcccggagatcatccgcagcagcgtcgattttccgcagcccgaaggccccacgaagacgcagaactcgcccgcctcgatcgaaagatcgatgcccttgatgacctcaaggctgccgaagctcttgcggacgtcctgcagcatgacgcttgtcatgatttaccctttcacggcgccggcggtcatgcccgccacgatctgccggttgaagaagatgaagacgatgagtggcgggatggtcaccagcaggatgttcatgaacagcagattgaactgcgtctgaaactgcccctgaaaattatagagcgtgagctgcacggtgacgttttcccgtccgggaagataatagagcggattggtgaaatcgttgaagatcgcgatcgactgcacgacgatcacggtgaccgtcaccggcttcagcagcggcaggatgacgcggaagaagatctgcagcggcctggcgccatcgacgatcgccgcctcgtcgagatcgcgcgggatggcggcgatgaagcttcgaaacaacaggaccgtgaacgacagtccgtaggcgacctgaatgaggatcatgccggatatggtcttgaacagaccgagcgactgcagcacccagatcgtcggaacgacggcgggcgggatcatcaggccggccagcacgaaagcgtagatgacggtgttccagcgcgacgggcgccgttgcacgacatagccgaccatggcgccgaacaaaacgagcagcgtcaccgcgaccacggtgatgaccgtcgagttgaagtaggccaggaagagcatgtagttgcgggcttcgatcacatccatgaagtttcgccagagctgccattcgccgggccatgtgaaggtcagcgcctgggcctcctgccgcgtcttggcggcggtgaggaagacgaagaggaagggcaggacgaagatcacgccgcaggcgagcatcgcggccatcccgctatagagttggcgacgcgtcaaaggtcgatctccttgcggttgaaccaggcggtgagcggcagcacgatcaggccgatcagcaggaagagaatgacgttgcccgccgtggagaggccgtaaaagccggcctggtactgcttgtagatgacgcttgccagcacatccgaggagaagcccgggccgcccttggtcatcgcccagatgaggtcgaagctgcgcaggccgccgatcagcgacagcgtgaccacggtgaccgttgccggcttggacagcggcacggtcacgcggaagaacatctgccggcgcgtcgcgccgtcgatccgcgcggcttcgtagtagtcagggctgatcgatgcgaggccggcgatgtagatgacggtcgcgagcccgatccccttccagacatcgacgaagacgatggaatagagcgcaagcgccggatcggtgagccagccggggccgtgaatgccgagcgtcgcgagcgcgacgttgatcaggcctcgggtcggatgcatcagaacggaaaaggtgatgccgacgccgatggtggagacgagaacgggaaagaagatgatggtgcgcaacgcaccttgcgcccagatgcctgatgtcagcaagacggcgagcagcaggccgagcacggtcttggccgcggatgtcgccaccgcatagatgacggtattgatcagtcccttgatcaggaagggctcgcggaagaactgcttgtagttttccagcccgatgaactcggtggtgaagagatcccagcgggtgaggctgaaccagaaggatgcgatggtgggcgccagaaacagcgtggtgaagaccaccgccgcgggaagaacgaaccagtagggataaggggacttgcgggcgaccatggcggctccttgagcatctggcccacatcccatggcatggccaccgggatgtgggccaaggtgtttaccagttcggcaggccgagctgctttgcctgcttttccacatcctggtcatagagcgcggcggcgtccttggccgagcggattcccgtcccgacctcgacggcgatctgctccagcgccgggcccttcaccggcgacagaaactcgagcgccggtccggtgcgcccttcggtctcgaaatagggcagcatgtcgctgaccgcctgcgggacatccttgggcagttcgcagcccttgatcagataggggcccgatggcacggccttcgccatcagctcgcagccttccttcgaggcgacgaaatcgagaaatttcttggcctcctcgaggttgtcgccctttgccgagagatagagcgccgagggcatccagatcgtcaacccgttcttggtcgcgtcgctgcccggaacggcgaagaagccgacgtcctgcagattgtcggggaagttctgctggatgtttccgatcccgaaggtgaggctcggatagtgcgcggcttcgccagtcgataccatgcgcatgccgtcatcgaaggtcgcggcgccgaagtcctcgttgaggaaaccggccttggccacctcctccacatgctcgaagccgcgcagcgcggccggcgtggtggcgtatttcaccttgttggccgtataatccgtagcgaaaccaggcacttcggattgaacgttgaagaaatcggcgagcacgaagatctgcgatgtccaggtcgtgccgtaggtctgcgccagcgccaccttgccggcggcctttatcttctcgttattggcgatgaagtcggcccaggtcttcggcggctggaggccgagttcggcgtagatctttctgttgtagaagatgccgccgcccatggccggaccgaacggaatgccgcgaacacggccatcggaagcgctgacgaccttcttgaaggtgtccaaaatgcctgcggccgaaggaagatccgaaagatcggcgatggtctgctccggtttcagcgcctggaacagcgagccgctattatactgaaagatgtccggcatctcgccggttgccagccgcgtcttgacgatgttgtcgccttccgacccgccggcgcgctgctcgacgtcgaaggtgacgccgggatttttctcgctataggccttggagacggcatcgaacgaagcgatcgtctccggattggtgtcgatcaggacgccgagcgtgacgtcggcccatgcggcgctggcggataaagccagcatgcttgcggcgacaatgctgtatctcgtcattctcatggtcagttcctcctcttgaagaccagaatgatttcagcttttggttgtggcaaggccaaaacccgatatcagatcgaaaactcgatcacatgtcggccggcggcgatcgccgccgaggcgccgggcgcgacggcttgcccgtcgatgcgcagcgcgcggcgctccggtgtcgcgttcatgcgcgcggtcatgcccccggggatgacgaggtcgcaggtcacctgccctgcttccagcctccaccgcacttccacccggccgaagcctgtgtcgtgccaggccgagaccggcgacagtgccggaagtatggccgggtcgaacagcacatccttgaacgccgggttcttctcccgcggcttgatgccggcgacatcctcgaacagccactggcatacggcgccatacgcgtagtggttatagctgttcatgtcggggtcgtagatcgtgccgtcctcggccagcgcatcccagcgctcccagatcgtcgtcgcgccgcgctcgacctgatagagccagccggggaccttgcggttgagaaacatcttttcggcgagatcgcggatgccaaggcgcgtaagagcgggcagaagcgccggcgtgccgatgaagccggtgccgatgacgccatcggtttcctcggcgaccttgcggaagtatgcccgcccggcttcctcgtattcggcaggcaccagcccatggagaaacgccagtgcccaggacgtctggtcgttgtgcgctatgcggcccgatggcgagaagaactcgtgcttgaaggcctgcctgatctcggccgcccgcgcctccagccgttctgcttcgcggtcctcgccgatgacgcgggcgatcctggccgaaagttctgtcgagatgaaatgatagagcgtggcggcgcaatcgtccgcgacggtcggccgcggcttgcgattgtcgccgacgggctgcagccagtcgccgaaggtaaagccgtgctcgccccacaccgccggcggacggatcaccggtccttccgagatgttccagagatagtcgagccagcgcaacatcgccgggaagcactcctcgagagcggccttgtcgccataatgcagatagagctgccaggggatgatgacgatcgcgtcgccccagccggtggagcctgcccagtcgccgcggtccgtgatcgggtgaaggcgcgtcggatcgggggagaagtgcgggacggcgccgttcgggcgctgatcgtgcatgacgtcgcgcagatatttgcgcaggaaggactggctgtcggcaagccagcatgcggttcctgcgaacacctgcgcatcgccggtccagccaaggcgttcgtcgcgttgcgggcaatcggtcgggatctcgatgaaattggagcgctgcgaccagatcgtgttctcgaccagccgattgaccgcctcgaccccgcaggtgaaaccgccggcaacgaccggcaccgaggaaatcgggaccatctcgatcgccagcaactcgacgcgcccggccaggccgacgcgggcataacggaagcccatgaaggtgaaaagcggcgcgtaaagctcctcgccctcgccgctcagcgtgtagacaagttccgcgcgggcgctgcgatagttgcgattgtcgaaatgacggtccggaccgagtacctccgaatgctcgatgcgaacttcggcgccggcctcgccgcgcacgcggatgcggacataggcgccggcattctggccgaagtcgtagaccgcgcggccatcgccctcccgccatgtgtcgagcggctggcgggccgccagttcgcggacggcagccgtttcatgcggcacgagcttcgtcttgtcgaaggacaggatgtccacgccgctattgtcgcggggctgaatacgcgcgtcatagtcttcgccgaaatagatgccattgcgcaccacgggagtgaagccgccgcgccagctgccgtcggtctggagaaggacggtatcgccgcttctgaggtccgccagggcccctaccctgtctccccagcaattgacgatcgggttggaagcccacatcagctggctgcggtaccagccgtcgccgagccagatctcgatccggttctctccagcgaccaggagatcggagacttcgtaggtctggtaggcgatcctgtcgtcgtagcaggtccagccgggtgtgaggaggtcgaggccgacccggttgccgttgacgaaggcccggtaaaggccgagcgccgatatgcgcagcgtggccgtttgcggacgctccgcaagggtgaagtctcgcgaaacgaaggtgccggcggttccttggccggcatcgcaggaaggcgcgatcatggatgcgccggaccaggcatggctgtcggcggacacggttgtgccttgtgtcgcgatattcattggtgttcctcctccagccgtggtcccgcacggtgtatatcgttctatgtatatcattctacaaatcgaattgcgtggcaagcgctttttgcctataatcgtcgacgacaccggcgagagaacatttctgcatggattttcaggacgttaacaaacccaaggaccgcatcaccattcgcgatgtggctgttgatgccggggtttccgtggccgccgtctccaaggtcttgcgcaacgcctacggcgtcagcgaaagtttgcggcagaaggtcgagacctcgatcgagaagctcaactatcggccgtctgtcgccgcgcgtgcgatgcgcgggcggaccagcaccgtcggcgttctggtgatcgagctcgccaacccgtttctcgccggcgtcgtcgaaagcgccaatgccgcgctgcttggcagcggctacaagtcgctgatcgggatcggccattccgccagttccatcgagacctcgatgatcgagtcgatgatcgacaaccgcatggatggggtcctgatcatcgcgccgcgcatatcgggcaaggtgctggatcgctatgcgaggcaaatcccgatcgttgtcattgcgcatcatgaaagcgacgcgcaggcctatgattccgtcaattcggacgatcgcaacggcgcgttcatggctgtgcaggcggctgtcgacaagggatacagcgatgtcgccatgctcggctacgagtttctggattcaccaccgaccgtggtcgcgatgcagcgtgaaagcggctatctggaagcgacgaagcgtttcgggttgcaaggccgcatcatccgcctgccgcccgtcgcctcggaccggaatgcggaaatagaggcgttcctggccatgccggatcggccgcgcgccgttttcgtatggtcggatctcgacgccgtgccactcgtcaacatggcccggatgcgtggcatcagggttccggaagatctcgctatcatcggttacgacaactcgcccgttgccgccattcccctcgtcggtctcgacagcatcgatcagaaccccgccgagcttggtcgcatggcggccgaaatgctgctcagccgcatcaatggccggggcgtggccgagcattgcctgatcgagccgcgcgtcgcggcccgcggcagtctctaattccgctagccgtggctcgcatcgttgggcaccagcggctcgacatccttgaccttggcgcgatggaagatgaacagcccggcgagcacgatgacggcggcgccgatcagcgtctgtctgtcggggaagtcgccaaagaacacccagccgaagatgatcgcccaaagcagcagcgtatattgcagcggcgccagcagcgatgccggtgcaagcttcagcgagcgcgtgatcatcagatgcgccgagcaggaaaccacgccgagcagcaagagcgcgagcagctggttcgcgctgaagccgctccagctgccgatgctgagcagcgcgccggttaagaggcatcccacggtttgccaggtcaccagtgtcgcatcgggcgtcgagcgcaacacgcggccaagtaccaacgtcagcgcgaatgacatgctgccgacaaggccgaacatggacggccacgagagcatggccgaggaaggccggagcgcgatgacgacaccgacaaagccgatcaagaccgccagccagcgccgccagccgatacgctctcccagcaggaaatgcgacagcgccgcgacgtagatcggcccggccatgtagaaggtcatgacatcggcgagcggaagataggcgacggccgcatagaagagcccggtatcggcggtggcgagaaccacgcgcgcgagctgccatcgcggcttttcgaccttgtagagcgcggcgacgggctggcgcgcgagcatcggaccgagcacgaaaaaagcgccaaacgagcggatcagaaggacctggctgacggaaaagctcgccaccagccatttgcccattgcgtcgttgagggcgaacatgaagtcgcccacgagcatcaggaggatgcctgccaggatggcgttgccgcccacggcgaaagccgcttgtctgctcatgatgtcaaggcgctccgaaacgccgttttgcggcgaggatcggaaggcaaaacgatttgaaagcctccgcatcacgccgatgcctgtttgtatggcggatgcttactctagcggcaggatgtgttgcaaggggccaagcacgtcatccatcggaacggcttcaaatccatccgccactcgcgactttcatacccgaaagctcttgacgcggccgctgcgaggaatagtaagggcactactaaataacagccggcgccgcatgcttcatcgtccacgccgacgtttgccccgaaagcctcacatgacacaaagaacttcgcatcgcggactggtcgttgtcgcgatcatggcaagcatggcgatgatcgccatcgaagcaaccatcgtctcgacggcaatgccgcagatcgccgcccagctcggccagatcaatctctattcgtgggtcttttcgtcgttcctgctgacgcagaccgcgacgacggtggtgttcggcaagctcgccgacatctatggccgcaagccgatgctgatggtcggcatcgcgttgtttctggtcgcttcggtgctcgccggcttcgcatggtcgatgccctcgatgatcgcgtttcgcctgctgcaggggatcggcgccggcgcgatacagcccgtcgccatgaccgtcgtcgccgatctctttcccggaaaccagcgcggcaaggtgcagggatatctggcaagcgtctgggcgctgtcggccgtcgtcggcccgcttctcggcagcctgatcattcacaatctcccatgggcctggatcttctggatcaacgtgccggtgggtcttttggcggcgctcgggttcctgtttttcctgcacgaggaaaagcggccgcgcgtcgtttcgatcgatgtgctcggcgccgcgctgttcgccgtctcgatctccgcgctgatgatcgcgctcaccgagatcgagagcgccgtctccggctatgcgatcgcggccttcgtcgtctttcttggcgccctcgccgccttcatctggcaggagcgcagagccgaagcgccaatggtcgcgcccgacctgtggctgcggcggccgatcgccttcgccaacctggcggtcttcttcgcaagcatgtcgatcatggggctgacgaccttcctgccgatgtatgtgcagaccgtgcttgaccgctcgccgctcgttgccggcttcgctctgaccatgctgttgctcggctggccctgcggcgcgacgatcgcctcgcgccagttttcccgcttcggcctgcgcccgatcatgatcgtcgggagcctgttcataccggtcgggacctgcctgctcgtgctcctggcgccgtccagttccccggtgcttgcggcggccggctcgctgatcatgggcttcggaatgggcctgctgaacatcggcgcgctcatcctcacccaggaaagcgtgagcgcctccgaccgaggcagcgccaccgcctccaacgtattctcgcgcaatctcggcagcacgctcggcgcggccgtgctgggcgccgtcctgacctatggtctggcgaacgccaataacggtcaggcgatcacgcccgagcaattgcgcgccttgctgaacggcacgggcgcggcgctcggcggcggcgaggagatccgccaggcgttgcagcaggcgctgcatgcgaccttcatggtgatgatgctgatcgcggtactgatcgtcccggcatgtctcctggtgcggcaaccgcaaacgccgcaggcggaaccgaagagcgcgtgactgaatgagacgacaagagaccgggcgatcatctcgcccggcctcttgtctcaatgcgcgaagacgctgtcgaagtccttgaaacccttgacttcgatcgggttgccgctcggatcgaagaagaacatggtccgctgttcgcccggctcaccctcgaagcggacaaccggcggaatgtcgaaggcgataccgcccttctgaaggcgttcggcaagcgcgaaccagtcctcgagcggcagcacgacgccgagatgcggcatcatcaccatgtggtcgccaaccttgccggtgcgggtgacttcgaacggcttgccgagatgcagcgatatctggtggccgaagaagtcgaaatcgacccagctatcggtcgagcggccttcggcgcagccgagaacgtcaccatagaagcgtcttgccgcatcgagatcggtgacgtggtaggcgagatggaagagtgagcgcacggtggtctcctttgtgatgcgagatggtgttcatcaacggatggaaaggttctgggttcgatagccgcttggtgccgcgtttccgttcagcgcatcggcccgtccatccgctatggcttttcttccagcgaagcgagaatatccgcgagcgcctcgttgcgcgcgatcagcaggtcttccgcttcttcctgggagacggatttgaagcgaatggcgcttccggtcgtggtctgcgccagccgcgcaaggtcgaccgaggcaacagtggcgatcttgggatagccgccagtcgtctgtcgctccgccatcagcacgatcggccggccggacgacggcacctggatcgaacccgcgaccgtaccgtccgagacgatgtcgtgaccggcgaaagcgtggatcgccggaccgtcgagcacctgcgccatgcggtctcggctcggcgtgacgtgaaagggttcgcgcaggaaattcttccaggcggcggcgtcgaaatgatccgcctgcggccccggaacgacccgaaccggaccgcccgaacgggaaaagggtttgcgcaatgccaggagcggtgcctgcgtcgtctcgccaagcggcagacggtcgccgatcgccagacgccggccatccacgccgccgagacccgagcgaagatgcgtcgagcgcgcctccaggaccttcggcgtctcaagcccgcctgaaatggcgaggtagccccagaccgcctgtcgcagcgcgccgatcttcaagacctcgcccggcatcagccagtggctttcccagccatgcctcgcctcaccatcgacggtaatatcgacggcgccgccggtcaccgcgaagcgcacgggcgtctcgacctcgaaagcaccgccgacatgcgcgaattccaaagtcgcggcgcgatcggcattgccgacgaggcggttgccgatcagcatcgacatcaggtccatcgcgcccgcgccggaaacgccgagatgcatcagcccggtgcgcccgagatcctggaccgtcaacatcggcccggcctgtttgatatggagcacggtcatggcgcctcccactcctctatcgattcgcctcgcctgacggcggcgtcgaggcattcggcctcgtcggcatcgacaggacggaagcgcacgcgatcaccggcgcgcaacaggaatggctcggcgcgcgacggatcgaatatcctgagtggcgtgcggcctatgtatcgccagccgctcgggcaaggaacggaattgatgctggcctgcttgccgccgatgccgatcgcgctcgcctcgatccgctggcgcggaacggcaaggcgtggcgtgtgcagctgctgcggcaggccgccgagataagaaaagcccggcgcgaaaccgatcatgtagacgcgatattccgccgaagcatgcaaggcgatcaatgcctcgcgcgacatctgcttcatctccgcgaggtcgtcgagatcgatcccgacctcatggccgtaaagaaccggcacggtgatccggcgcgcggtcacgccgcccaccgacaagtgcccgagtcgtgcttctagcgcagcggagaggttctttccacggatgacggtgggatcgtaggcgacgagaagcgaacgataggtcggaacggtctcgacgacgcctgtgatcggccgcgtcgccagcatgtccgccagggcaatgacgcgctcattcgtctcttcatcgatctggtcggagaactcgaccacgagggcgctgtcgccacaggggatgatgcgcggataggtgtgtcgtaacgactgcgtcatggccatgtgcgccacctaatctgctggaaggattcgggcgcggtggaatgcccctcgggaggtctggatgccgagcgccaacgcaacgcgagagatatttccaccatcaccatcaaacatgtctcgacaagcgagattctcaatcgacaatgctcttgtcatttcagataccaattttatgtcaagccatcccgcaccgaccggcaatggcgatatgccgggtgccgtcgtgacggcgcgcgcgttgcgtgacaaactcatcggcggtggaatcgatatagccccctttttccacgccgaaatctgaacgaggaatgatcttgacccgtaccgtatatctgaacggcagctggctcgccgaagccgacgcaaaagtctccatcttcgaccgaggcttcctgtttgccgacgcgatctacgaagtcaccggcgttgtcggtggcaagctgctcgaatatgccggccacgcggcccggcttcagcgctccttggccgaactcggcatcgcctgcccgctgacacaggaggcgctgctcgccgttcatcgcgagatcgtccgcaggaacgatcttcgggaggggctgatctatctgcagatttcccgtggcgcggccgatcgcgacttcgccttcccgacaaacgccaccccgacgctggtcctgttcacccaggccaaggcagtgctcgacaatccgaaggtgaggaccggtatttccgtggcgctggttcccgatcagcgctgggcccggcgcgacatcaagacggttcagctgctctatccctcgatggcgaagatgcaggcggcgtccgtcggcgccgatgacgcctggctcgtcgaggacggcttcgtcacggaggcgagttcagcgagcgcgcacatcatcggcaaggacgggacactgatcacccgtggcctgtcgagcgcgatcctgcacggcatcacgcgtctcagcgtcctcgacatcgcccgcgaagccggccttgccgtcgaggaacgcgcgttcacgcccgaagaagccagggatgccgccgaggccttcatcacctctgccaccagcttcgttctgccggtcaccaagatcgacgggcagccggtcggcgacggcaagcccgggcctcggacgctgaaacttcgccagctctatatcgaaaacaagctggcgaacgccatctgatggctcgccgttgccggcgcttcggtcgcaagcccggtcgcctgcgtcaggctggcaagcggcggccggaaatcggccccgcgacatgagcctcttctctgccggggagcaacggcaacatgctttaaaatcaaggcgaagccggaagataggcgcggctctcacttcggttcgcgcggtggctgttcatcctgttgcggtccgcccgttcgcagcgcgtcgacgatccgccgcgcgtgcctcagatgcggggcgtcgatcatccggccgtcgagttgaaaagcgcccctccccggctccgcttcgaacgcggcgatcgtggcccgggcgttcgcgatctccgcttccgtcggcgtgaaggcatcgttgatgatcgggacctgcgaggggtgaatggccatcatgccggtaaacccgtcgcggcgcccgcgcctggcgtagctgcgcaagccctcaaggtcgcggaattcaggatagaccgtttcgatcaccgcgacaccggcggcatggcccgcgaacagcgtcagcgagcgcgccagttcataaggctgggtatagctgccgtcttcattgcgggcgcttgtcgctccgatcgcagccggtagatcctcggccccccaggtcagccccagcaaggattgacgaacggcggcgtagctgtccagctgaaaaatggccgccggcgtctcggtcgcgatgggcaatatcggtctatccggcgccattgccgccagcgctgccacgcttatgccgccctccgctttcggcaagacgagaccgtccagcccagcgtcgaggacggcgcgaagatcctcctccaccaagccgctgtccaacgcattgatgcgaacgaacagccgcgcctttctttccgctgatcgcaggaacgaggcgaccgccgttctcgccgccggctttgcctgcagggtgacggaatcctcaaggtcgaggatcagcgcgtccgcggacgatccgagcgccttttccatccggtccggtcggtcgcccggcacaaaaagcagcgagcgcaacctcatgccggcctcctctgcaccagcgccgtgcgcaggcaccggcagaccacttcgcctcgctggttgatcagttcgtgctggaaggtgacaatgcccgcagtgggcctcgaacggctctccttgagatcgctgacttccgtttcggcacgcatcgtatcgccgatgaagaccggcttcggcatgacaagcctgtcgtagcctaaattcgcgaccagcgttcccatggtcgtatcgccgaccgaaagcccgaccatcagcgcgaaggtaaaggtgccgttgacgatgatctggccaaattcgctggctcgtgccgcttccgcatcgatgtgcagcggttgtggattgtgggtcatggcggagaagaggagattgtccgtctcggtgaccgtgcggcggatctcgtgcgagatccggtcgccgatggtccactcctcgaaatgacggcctgccatcatggctctccttccagctgcatgagaacactgccttcgacgacctgcgcgtcggcaagcactttcatctccgagacgacgccgtcgaacggcgcgctcagcgtctgctccatcttcatcgcctcgatgacgacaagaggctgtcctctggtgacccgatctccgctggcgaccatgagcgcgatcaccctgcccggcatcggcgcgacgatcgcgccgtcgaaatggcccgaatttccgccggcatggccagcgcgaaccggcccataggcccaagcttcgccatccagaaaaagcacgccggcatcggtcgcgaccggttcgccgccatcccgaagttccacgcgataggggtcgccgcctacctcgacaccgatctcccgggaaggcggcgcgttcattcggaatcccgttgccgtcgcccatacatcgctgcccggtttcggcaggatcgctcgcgcggccgcctgcagcacgcgtgcgccgggctcgatcgagggaatgagatgcgtcgagtgccgctcgatgaagccggtgtcgaccgcacccgcctgaaattcagggtggtcgatcgtgcgcgccaggaacgccgcgttggttcgcaccggccagacctcgacgcttgccgccgcgagagccagtcgccgtgccgcctcttgtcgcgtcgcgccgtggctgatcagcttggcgatcatcgggtcgtaataggcgctgatctcattgccctcctcgacgccgctatcgaccctgaccccgtcgggaaaccgcagacggtgcagccgcccggtcgaaggcaggaagccggtggaggggttttcggcgtaaagcctcgcctccatcgcccatcccttgatcgataactgctcctgccgcaggggcagcggctcgccggatgccaccaggatttgccattcgaccagatcctggccggagatggcctcggtaacaggatgttcgacctgcagccgtgtgttcatctccatgaaccagatgcgatcggcgcgaagtccgtcggaggcatcggcgatgaattcgatcgttccggcgccgacataatcgaccgcgcgcgcggcctgaaccgccgcctggcagacaacctctcgggtcggtgcgtccatgcccggcgccggcgcctcttcgatcaccttctggtgacggcgctgcagcgaacagtcgcgctcgaacagatggaccacgtttccgtgagtgtcgccgaagacctgaacctcgatgtggcggggcgagaggatgtatttctcgagaagcacccggtcatcgccgaaggaagccgcggcttcgcgccggcaactggcgagtgctgctgcaaattccacagcgccatcgacccgccgcatgcccttgccgccgccgccggccacggccttgatgaggacaggatagccgatcgcatccgcttcccgccgcaaccggttatccgcctggtcctcgccgagatagcctggcgtgacagggacacccgcagcgatcatccgcttcttcgccgcatccttgaggcccatggcccggatggcggcggccggcgcgccgatccagatcaggccggcggccgcgaccctctcggcgaacccggcattttccgagagaaagccgtagcccggatggatcgccctggcaccggtccggatcgcggcctctataatgctgtcggcattgagatagctctccctggccgatgccggaccgataggaaccgcctcgtccgcctcgcgaacgaagggcatgtcgccatcgatctcggagtgcacggcgatcgtgcggatcccgagccttttcgccgttcttatgatcctcctcgcgatctcgccgcgatttgcgatcagcaggctgtctatcacagtctctcctctcttctcctcgccgttgaggctacatgcgaaacaggccgaaccgggcgcgctccggtatcggtgcattgagcgtggccgcgaaggccagcccgagcacatcgcgcgtctgagccgggtcgatgatgccgtcgtcccatagtctcgcggtggcgtagtaaggattgccctcgtcctcgtatttctggcggatgggcgccttgaatgcttccgcctgctcggcgctccagctctcggcatcgcgatgcacggtcgccagaacggaggcggcctgctcgccgcccatgacggagatgcgggcattcggccagctgaacaggaagcgcggctgataggcgcggccgcacatgccgtaattgcccgcaccgaagctgccgccgatcagcaccgttatcttcggtaccgatgccgtcgccaccgccgtcacgagctttgcgccgttcttggcgatcccctcggcttcatatttcccgccgaccatgaaaccggagatattctgcaggaaaagcagcggtatgcgccgctggcaggcaagctcgatgaagtgggcgcccttcagcgcgctttcggagaaaagcacgccattattggcgagaatggcgacggggatgccccagattcgcgcgaagccgcagaccagcgtggtgccatagagcgccttgaactcctgtaactccgagccgtcgacaatacgggcgatgacctcacggacgtcgtaaggcgtgcggacgtctcgcggcacgatgctgtagagctcctgcggatcgaacttcggcggccgcggctcagccatgtcgatatcgatccgtttcgggcggttgagcgtggcgacgatgtcgcgaacgatcagaagcgcatgctcgtcattctcggcgacatggtcgacgacgccggattttcgaccgtgcgtatcggcgccgccgagttcctcggcggatatgatctcaccggtcgccgctttcacgagcggcggcccggcgaggaagatcgttccctggttgcgcacgatgacggtttcatccgacattgcaggcacataggccccgcccgcggtgcagctgcccatgacgcaggcgatctgggcgatgcccgccgccgacatttgcgcctgattgtagaagatgcggccgaaatgttcgcgatccggaaagacctccgcctgatgcggcagattggcgccgcccgaatccacgagatagatgcaggccagccggttttcccaggcgatttcctgcgcccgcagatgcttcttcaccgtcatcgggaaataggcgccgcccttcaccgtcggatcgtgcgccacgatcatgcactcgacgcccgagacgcggccgatgccggcgatcatgcccgccccgggcgcctcgtcgtcgtacatgccgttggcggccaactgtccgatctcgagaaacggcgagccgggatcaagcaggcgctgaacgcggtcacgcggaagcagcttgccgcgttcgacatgccgctcgcgatgtttttcggagccgccccgggccgcctgcgccaccttggagcggagcgcctccaccagagccagattgtgcgccttgttggcggccaacgtctgcgagccgagatcgagcatcgtctgcagctccggcatcagcctctcccttcgtcgccgatgacttcacgtccgatcagcatgcggcgcacttcgttggtgccggcgccgatgtcgagcagcttcgaatcccgccaatagcgctccaccggccagtccttggtatatccggcgccgcctagcgcctggaccgcctgctcagccaccctgacggcgctttccgacgcatagagaatggcacctgccgcatcatgccgcgtcgtcttgccggcgtcgcaggccctcgccactgcgtagacgtaggcgcgagccgaattcagcgccacgaccatgtccgccaccttcgcctgaatcagctggaagctgccgatcggcgttccgaactgcttgcgctctctcacatagggaaggacgacatccaggcaggcctgcatgatgccgagctgaatcccggacagcacgacgcgctcatagtcgaggccggacatcagcaccttgacgcccccgttcagcgggcccatgacgttttcgtcgggcacgaagcagtcatcgaagaccaattccgccgtcggcgatccacgcatgccgaccttgtcgatcttctgcccgatggaaaaacccttgaagcctttttcgaccaggaaggcggtgatgcccttcgagccgccatcgggcacggtcttggcatagacgaccaaggtctccgcgtagggcgcgtttgtgatccagaatttggtcccgttcagccgataaccgccggcgactttttcggcgcagaggcgcatcgatacgacgtccgagcccgctcccgcctccgacatcgcaagactgcccacgtgttcaccggatatcagcgccggaaggtatcgctgtttctgctcggccgatccccagcgcgaaatctggttgatgcacagattggagtgagcgccgtaggacaggccgaccgatgccgatgctctgctgatctcctcgcaggcgacgacatgttcgaggtagccgagcccaaggccgccgtcatcctcatgcacggtcacgccatgaagaccgagcgcgcccatctctggccagatctcgaccgggaaccagtcttccgcgtctatcctcgccgcaagcggggcaatgcgattggtcgcaaaccgatgcgtcgtctcacggattgcctccgccatttcggaaagcccgaaatccaactccagcatgtcgccagtcctcccagactgcggtcatgctaacgcgggcaatgcgattagtaaaatcggccgtccatcgcgcgacaacgcggccgcggcaccgccgggcgggcgctaggacctggcgcgctgcagggccgccagaacggagcgttcggaccgcaggagatagtcgtcgagttggttcgaggcggcttcgatgtcgccacgctcgagggacgcaaacagcgcggcatttagcgcgatatagggttcgtggaggtgcgccgtatcctcgaaccgcgcgaagaccagacgcaactccgccagaacgagttcgaagcctgcactcaagcggggactgtcgcagaggtcgaccatcgagcggtgaaattccatgttgatggttccgacctgccgccagtcggcatccgcccgggccgcgcccgttcgcgccagctggtccttcatacgagccagcgccggatgcctggaggtcgcggcctgcacggcgcccttttgtatgacgcgccggacgcggtagatatccacgacgctggcttcgcccggggtcgcgacgaagaccccccggtttgggatgtaggtcagcaggttctggctcgtcagcaggcgaaagacctcgcgcaacgtgttgcgcgatatgccaaaatacgtcgctatgtgctgttcggaaagcttcgcgcccggctgtaattcgcccgagatcagcattcccctgatcttgccggcgacatgtgcggtcagcggctgatcttcggtaaggccttgcgacgcgtaaatcatcaggagcttatcctctcatgcatccggatttggaaacgcgccatgatctgttatccatcgcagccgcgcatcgcattctcgaaccaaatcgcacgaattcatattgttgaacaatatccattgcgttattgaacaataatccggggcgctcgaactttcaacggagatggaacatggcggcaatcgacctgaacagcgatctcggcgagggcttcggcccatggccgatgggggatgacgccgccatgctggcgacggtgaccagcgccaacatcgcctgcggcttccatgccggcgatccctcgggaattctgacggtgctcagggaagcggcccggcgcggcgtggccgtcggcgcccatatcggttaccgcgatctcgtcggcttcggccgtcgcaacatggacccatcaagcgccgaactcgtcggcgacacgatctaccagatcggcgcgctgcagggcctcgcgaaggcggcgggaaccagggttcgctacgtgaagccgcatggcgcgctctataacaccatcgcccatgacgcccgacaggccgccgatgtgatcgaaggcatcaaggccatcgacccgagcctcgtgctgatggctctggccggcgcgccgatcgtcgcgcaggcgcgcgaagccgggctgaccgtcgtttgcgaggccttcgccgaccgcgcctataacgtcgacggcagcctcgtcagccgtcggctgcccggctccgtcatccatgacccgcaagccgtcgccgagcgcgtgctgcgcatggtcaacgaacagcgcgtggtggcgatcgacggagccgagatcgcgctcgatgcccaatcgatctgcatccacggcgacacaccggccgcggtggcgatcgcgagcacgctgcggcagaccctggaaacccgcggcgtcgagctcaagtccttcgtcgacatgtcgtcatgaaaaagcgctcggcttccggcttcgcctgtatggtctatggcgagccgtgttccgaagtgccgattgtcaggaaacaaacggcggaacgcgtggtgccgagtgccgcccgcgcgcggagccggccgtgcaccagcaaaacattggccgcgccggcagactgacgcggccccccccggcataccaggagaaaatcagggatgaagccacaaccgattaccagtgcaccggaagacgcggcgcgccgcaaggcgatcaagccggtcatctgctatcccgtcgagacgctgccccgcccggatcttgcggcataccgcgcgctgcgcgacgatctggagttcgtcgagcgcgtggttgtgccgccgcgcgacgctgcatgctggaccgtgccggcgggtcatttctgccgcatcctttcaagtgaaggatcgcaggtgggtgatctgaacctcttcaatgccaacaatctcgaggaacggctgttcaccggcaagacccgggcgctcaatggcacgcatgtgggcctcggcgaccagctcttctccaacatgccgtatctgcgcccgatcgcgacgatcacccacgatacgctcgactggtatggcttcgacgaattcggcggctcggtgcacgacgtgatcggcacgcgctgcgatccctatacccacaatctgctcagcaatggcggccagtaccaccattgctgccattccaatctgacgcgcgccttcgccgcccggaccggcaagtccttgcgggaggcaggcacctatatccacgatgtgctcaatgtcttcatgtgcaccggcttcacgcgcgacaccggtcagtatttcatgaaggcaagtccggttcgccccggcgactatctcgaattcttcgccgagatcgacctcctcggctgcatgtccgcctgccccggcggcgattgctccaccgagcactcctccgacgccgtcgcctgctatccgctggtggtcgaaatctacaagccggcacgtgctccggcaggctggagcgcgcccgcgatcaacggctacgacggcacgcacgggctttaggccgcgaagctactgctagaaaaaaaaggctcccgcgcgcatgtcgcgggagccttttttagcactgatcggccatatccgccgaccgaccggagagccttggacatggccccgttcgccggggccatgtcgaggtgatcaaaagtcttcccaggcgggcgcggtcgccactgcggcattgccacccctgaagctggacgccaagcgctgcgtcagcgcccgcgccttcgaaggcaccggacgcgatgcttcgttggcgacggcgatcggcgcctggttgcggccctgctcgagcgtgaactggccgataagcgcatcgagcgcactggcttccttcgccaggctgtggctggccgcgttggtctcctcgaccatggccgcgttctgctgcgtgccctggtccatgctgttgaccgcggtgttgatctcctgaatgccggtcgactgctcgcgggccgccttgacgatggcgttgacatgcgcggtgatctcggtcacctcggcctcgatctggaccagtgcagctccggtttcgccaacgagagcaacgccggtgttgacctggttttcggacgtggtgatcaacagcttgatctccttggcggcctgcgcggaacgctgcgccagttcgcgcacctcctgggcgacaaccgcgaagcccttgccggcttcgcctgcgcgggcggcctcgacgccggcgttcaatgccaagaggttggtctggaaggcgatgtcatcgatgacgccgatgatgttgctgatctcaccggacgatttggcaatctcgttcatggccgagacggcgttgcgcacgacgctgcccgatttctcggcgccggaccgtgtgcgttcgaccagcacgcttgcttcctcggcccgcttggtcgaatcgcgaacggtcgtggtgatctgctccagggctgccgcggtctcttcgagcgacgcagcctgctgctcggtccggcgcgccaaatcgtcggcggcggagcgaatttcggcggcgccggaattgatgacgctggcattcttgccaaccgcgacgagcgcggcctgcagcttgtcgagcgacatgttgtagctgttgcgcagggcatccagatgctcgacgaacggcttggaaatgcgatacgagacgtcgccgtcggccaggcggccgagaccgagcgcaagtgcctcgacggcctcccgggtattggcggcgtcctcttccttcgcgagttcgcgcgcgtggcgttcgcgttcggacagcgaacggccctcgtcggcttcgcgctccagacgtgcacgctccagcgcgttgtcgcggaagatggcgacggccgcggccatctgcccgacctcgtccttgcgctccaggccaggcgtctcgcttgcggtatctccggccgccagtgcgcccatgcgctgacgcagacggtcgatcggtgcggtgatgccacgcgaaaccacgaaaagtccaagcagggtaatggcgacgagggcaagaccgagcgccgacaatccggtgatgatcgtcttgttggtcgtggcctgtagctcggctgtgccttccgacatcatcttgatcagctgatcgttgccgcctgcgaacatcggcaggatcgccgtcagttcggtgccggcacggcgcatcacgacgacggcctcgtctcgcctgccctctttgacgagcgcgatcatctgctgggcaagtgcatcgaagccattgaccgcggtcagcatggctttcgccggctcggctctcgactccacaagctgcccgacggtcgcgatgcgctccttcatcagggcgaagttgtcgttgtagatcttgatcgatgccgcgaactcgggagacgagggatcgttgatcatcatcaagccgagctggaagccgagctgcagaaggccgcccgttgctctggcgttgagcgtggcgcccatgctttccttcgacaggaagctggcatagcgggtgtccgcgcttttgaactgtgtactgacataagcaagcccggcaatggacgtgacggccatgagggcaatgacagcgatgattttcgtgcgaattttagcgttttgaagaaagctcattggagacctgacgggtggtcggccggccgcgcattaccgacgtgcggacatctaccgaagcgtgatgggtcattggcagtggaaccccaccctcatggcgagtaactcctcccagaactaccgccgacacttgtcataccattagcttacagaaccattaaaattcgaccgattgtttcttaaccataagatttcaataggcaattcgattgctaatgtagcgcatgattgagtggctgagtctggaaacgatatccagggcgaacacgctgaaaatctccgtgcaatcgcacatattttgtgcaattcaatatttgcttgatttttcggccaatctcgcgcatttcagcggaggaaaatcgacgccctcctgaacggaatgctgactgccggtggcaatatctcaacctgccaagcccagcctgaatgtgctggttatcgacgagaacagcattcgagcctccatcatcgaactggggctgcacgaggccgggtatcaacgggtgaccgtcgtcaacgacatgaatggcctggcgcggcgcatcgaggaggtcaaccccgatgtcatcgtcatcgatatcgagaaccccaatcgcgacatgctcgagagcatcttccagatctcccgcgccgtggcgcggccgattgccatgttcgtcgacaaatccgacgaggattccatcattgccgcggtcgatgccggcgtgtcggcctatatcgtcgatggcctgaaaaaggagcgggtgaagccgatcctggaaatggccgtcagtcgtttcaacgccttcaaccgcctgcagcgcgaactggccgatgccaagtcggcgctggaggagcgcaagatcatcgaccgcgccaagggcattttgatgaagatgcgcggcctgtcggaagacgaggccttcgcgcttctgcggcagaccgccatgaacgagaagaagaagatcgccgacatcgcccagagcgtcatcacggccgccgggctgttgatgtgagtgccggcgcctatcatatgcttgatgtccggaggaaaccgggatggacaagatcatgaccgacaatgccagcggtagccttgccgcaccgacaagcaccgctgccgaaggctcgagaacgctgcgcgccggcttcatcccgcttgttgacgcctcggttctgatcgcggcggcggaattcggcttcgcgaccaaggaggggctggcgctcgacctcgtcaaggacgtctcctgggccaatgttcgcgaccgcctggcgtttcgccagttcgacatcgcccatatgctgtcacccatgccggttgcctcggcgctcgcgctcggttccaacccgtcgccgacgatcacgccattctcgcttgggcgcggcggcaatgcgatcaccttgtcgacggcgctgttcgagcggatgcagcaggcggcggggcttgccgagatgccgagcgcgctcgagagcgcgcgtgcgctggcgatggtcctgggagagatgaaggcgcgaggcgaaccgacgccgacgctaggcatgacctatcccttctcctcgcacaattacgagttccgctattggctcgcagcgggcggcatcgaccccgacaatgacgtgagacttgtcgtggtgccgccacccttaacctcggacgcgctcgccgccggcgccatcgatggcttctgcgtcggcgcgccatggaacatgatcgcctccgagcgcggcgtgggtcgcatcgtcgccgcgaagcaggatatctggccctcggcaccggaaaaggtcatcggcatgcgccctgattgggcggatgccaatcgcgacaccgtttcccggctgatcgttgcgcttgatgccgccgcccgttggtgcgaccgcgtcgaaaaccacgatgcgctggcgcaggcgctcgccgacccgcgctacatcgccgcgcccgtcgagatcatccggcatgtgctggcgggcgaattcagccttgatgccaagggcaaccgccgcgtgatcgacgactacttccttttccacggccgctccgccaactatccgcgccccagccaagcgctttggatctacagccagatggtgcgttgggggcaggccgaaatgtcgctgaacaacgccagggcagcggcctccgcctatcgtcccgatctctaccgggcggcactcggcgcggatagcgcccctgcggatgccgacatccgcatcgaaggagacacggacggagaccggttcatggacggtcatgtctttgatccgtcgcggttcgcggactatgtttcgggcttcgctgtccgtagcgttcaatcgccaccgaagggctctgacgaccactgatcgattgctgccatgcacaaatagcttgcacttgggaatgccgtcgcgatggcattcgcacaaaacatcgccacgggaaaatcggggtgaaaaattgagcagataagcatctgccgattttgcggtttagtttcaatcacataaaatctcatctcagaactggcacaccgcttgcttcgttgaaaccgcatcggtcaacggcgatcggggcgagatgagcgcgcgataagcgctcgcaaaagacatcgacgtcgcaaggcctttgcagtccgggaccctccctcccgatgacgcattcgccgagcggcgtttttttattcccgaatttccggccagcaccagcagagggaacctgcgtaatgagcaagataatcacgaccggcatcacacgtcgcggcctgttgaagaccacggcgacggcagccctgatcacagcggtccggagcgcgttcccgtcgggtgccttcgccgccggcgccggccccgaggtaacgggcgccaagctcggcttcatcgcgctcaccgacgccgcaccgctcgtcgtggcgcaggagaagggcctgttcgccaagcacggcatgcccgatgtcgaggtcgccaagcaagcctcctggggtgcgacgcgcgacaatctcgtgctcggtggtgcggccaacggcatcgacggtgcccacatcctctcgccgatgccctacctcatgcacaccggcaaggtgacgcaaaacaaccagccggtgccgatgaccattctcgcccggctcaactacgacagccagggcatctcggtcgccaaggaatatgccgataccggcgtgcagctggacgcctccaggctgaaggccgccttcgagaagaagaagaccgagggcaaggagatcaaggccgcgatgaccttcccgggcggcacgcatgatctctggatccgttactggctcgccgccggcggcattgatcccgacaaggatgtctccacgatcgtcgttccgccgcctcagatggtcgcgaacatgaaggtcggcaacatggacgtcttctgtgtcggcgaaccctggaacgagcagctggtcaaccagggcatcggcttcacggcggcaacgaccggcgaactctggaagggccatccggaaaaggcgctcggcatgcgttcggattgggtcgagaagaacccgaacgctgccaaggcgctgctgatggccgtgatggaagcccagcaatggtgcgacagcatggacaacaaggaagagatgtcggcgctgctcggcaagcgccagtggttcaacgttccgccgaaggacgtgctcggccgcctcaagggcgacatcaactacggcaacggccgcctcaccaagggcaccgacctctacatgaagttctgggccggcggtgtctcctatcccttcaagagccacgatacctggttcctcgccgagaacatccgctggggcaaattcgcgccggataccgacatcaagaagctggtcgacgaggtcaaccgggaggacatctggcgcgccgccgccaaggaccttggcgttgctgccgccgacatcccggcatcctcctcgcgcggcaaggaaaccttcttcgacggcaaggtcttcgatcccgagaatccctccgcctatctcgacagcctgacgatcaaggttgcgtcctgatccgtgccgccggcgcagaccacgccggctcttccatcccgcaagaggagcgcagaatgcccgctttggccaagaaacagacgatcgcgacatcggcaaccgcatcgaaaaccgcaaccatcctgccgctcgccaggcgtccggcggcaaggttcgacatcaggaagatttcggccacgcttgcccgcaacgtcgtaccgccactcgtcgtgctcgccatcctgctcggcatctggcaggtgctctgttcgtcgccgaccgcctcgctgccctcgccctatcaggtctggcaggagagcttcgacctgatcgcctatcccttcttcaactacggctcgcaggatatcgggcttggctggcgggtgctgatctcgctgcagcgtgtggcttacggcttcgggctcgccgctgtcgccggcgtgattgtcggcgccgtcatcggccagtcggtatgggcgatgcgcggccttgatccgatcttccaggtgctgcgcaccgtgccgccacttgcctggctgccgctctcgctcgccgccttccagaacgccaacccctcggcgatcttcgtgatcttcatcacctcgatctggccggtcatcatcaacaccgccgtcggtgtgcgtaacatcccgcaagactatcgcaacgtcgcccaggtgctgcggctgaaccagatcgagttcttcttcaagatcatgctgccttcggcggctccctacatcttcaccggccttcgcatcggcgtcggtctctcctggctggcgatcgtcgcggctgaaatgctcaccggcggcgtcggcatcggcttcttcatctgggatgcgtggaactcgtcccgcctgcccgacatcatcgtcgcgcttgcctacatcggcgtcgtcggcttcgcgctcgacaagctggtggcggcggtcggcaagctgatcacccgcggcgcttcggccaattgaagggaacgaccatgactgcctatctcaagctcgaccatatcgacaagcatttcgaccgggccggtgtgcgcgccgaggtgctgaagggcatcaacctgacgatctccaagggcgagttcgtctctatcatcggccattccggctgcggcaagtccaccctgctcaacctcatcgctggcctgacgccggtctcatcgggcgccgtgctgctggaaaaccgcgaggtcaacgcccccggccccgagcgcgccgtcgtcttccagaaccacagcctgctgccctggctcaccgtctacgaaaacgtcaacctcgccgtctccaaggtattcggcaattcgaagagcaaggccgagcgtcacgactgggtgatggcgaacctcgatctcgtgcagatggcgcacgccaaggacaagcgtccctccgaaatatccggcggcatgaagcagcgcgttggtatcgcccgggcgctctccatggagccgaagatcctgttgctcgacgagccgttcggcgcgctcgacgcgctgacgcgcgcccatttgcaggatgcggtcatggaaatccatgcgcgcctcggcaacacgatggtgatgatcacccacgacgtcgacgaggccgtgctgctctccgaccgcatcgtgatgatgaccaacggcccggccgccaagatcggcgaagtcctcgacgtgccaatcgcccgcccgcgcaaccgcatcgagctcgcctccgaccgaacctacctcaaatgccgcgaagccgtgctgaagttcctctacgaacgccaccgcttcgtcgaagccgcggagtaaacccatgtcagacacccgcatcgaaaaactcgtgatcatcggcaacggcatggcgcccgggcgcatgctcgagcacttgttcgaaaaagcacccggccagtatcaggtcacgatcttcaacgccgagccacgcgtcaattacgaccgcatcatgctgtcgccggttctatccggcgagaagagctacgagcagatcgtcatccatggcgacggctggtacatcgaccacggcatcacgctctacaagggccacaagatcgttgccatcgaccgtgccgccaagacggtcacctcggaccacggcgtcaccgagagctacgacaagctggtgatcgccaccggctccgtacctttcatcatccccgtccccggcaaggacctgccgggggtcatcacctatcgcgatctcgatgacgtgcaggccatgcttctggcggcgcaatcgcgcgagaaggcgatcgtcatcggcgggggcctgctcggactggaggcggcggccggcctcgcgcagcgcggcatggacgtgaccgtgctgcacgtgatgccgacgctgatggagcgccagctcgaccccgccgccggctatctgctgcagaaggcggtcgaggaacgcggtatcaaggtcatcaccaaggccaacaccaaggcgatcgtcggcaacggcaaggtcgagggcatcgagctcgatgacaacagcatcattccggcaagccttgtcgtcatggccgtcggcatccgcccgaatgtcggcttggcgaaagaggctggcctcgcggtcaatcgcggcatcgttgtcgatgacggcatgcgcacctcggatggcgatattctctcgctcggcgaatgcgccgaggtcggcggcatggtctatggcctcgtcgcgccgctctacgaaatggcccgcatcgccgcttcccaccttgcaggcgacacctcgcccgccttcgtacactccgacacgccgaccaagctcaaggtcaccggtatcgacctctattcgctcggcgacttcgccgatggcgacgaccgcgaggagatcgtgctgcgcgacgccaccgccggcgtctacaagcgcctggtgctgaaggacaaccgcatcatcggcaccgtgctctatggcgagaccgccgacggcgcctggttcaacgacctgaagaagaagcagaccgacattaccgagatgcgggacacgctgatcttcggccaggcctaccagggagggtcgccgctggaccctatggcggccgttgcagccttgccggatgatgcggaaatctgcggctgcaacggcgtatgcaagggcaagatcacctcgaccatcacggccaagggactgacgtcgctcgacgacgtccgcgcccacaccaaggcgtcggcctcctgcggctcctgcaccggccttgtcgaacagctgatgtcgctgacactcggcgacagctacaacccggccgccgtgaccccgatgtgcacctgcaccgaactcggccatgacgatgttcgccgcctgatcaaggccaaaggtttgaaaacgatccccgccgtcatgcaggagctcgaatggaagacctcctgcggctgcgccaagtgtcgcccggcgctcaactactatctcgtctgcgattggccggatgaatacgccgacgactaccagtcgcgctacatcaacgagcgtgtccacgccaacatccagaaggacggcacctattccgtcgttccccgtatgtggggcggcgtcacgaacgcaagcgagttgcgcgccatcgccgatgtcgtcgacaagttcgagatcccgatggtgaaggtcaccggcggccagcgcatcgacctgctggggatcgagaaggaggacctgccggccgtctgggccgatctcggcaaggccggtttcgtctccggacaggcctacgccaaggggctgcggacggtgaagacctgtgtcggctccgactggtgccgcttcggcacccaggattccaccggtctcggtatccgcatcgagaagttcatgtggggctcctggacgccggccaagctgaagctcgccgtctccggctgcccgcgcaactgcgcggaagcgacctgcaaggatatcggcgtcatctgcgtggatagtggcttcgagatccatttcgccggtgccgccggtctggacatcaagggcaccgaggttctcggccttgtgaagaccgaggacgaggcgctggagcatatcgtggcactgacgcagatgtaccgcgagcaggcccgctatctcgaacgcatttacaaatgggcgaagcgtgtcgggcttgaggaaatccgccgccagatcatcggcgatgccgacaagcgcaaggcctactacgaccgcttcgtcttctcgcagacattcgcccaggtcgatccctggtcggagcgcgtctccggcaaggacaagcatgaattcaagccgatggcgacgatcggctttccccaggcagcggagtgaggagatggacatgaactggatctcgatcggcgacatctccgacatcccgctgcgcggcgcccgctgcgtgaagaccccgcagggcaagatcgccgttttccgcacggcggagaacgaggtcttcgccatcgaggatcattgcccgcacaagggcgggccgctgtcacaggggatcgtgcatgcgaaggcggtgacctgcccgctgcacaattgggtgatttcactggagacaggcaaggcgctcggggcggacgagggtgaggtcaggaccattgccgtgaggaacgaggatggggcgctgttcatcgcgttcgagagtctgctgatggcggcggagtgatcggctgatggtggaaatggcaccccccctcgacactctgagagggcacccccatgcccgctgaaaccaaaaccacctgtccctattgcggcgtcggctgtggtgtcatcgcaacggtcgccgacgacggtgtcgtctccgtcaaaggcgatcccgaccatccggccaatttcggtcgcctgtgctccaagggctccgcgctcgccgaaaccatcgatctcgacggacgcctgctctatcccgaaatcgccgggcaacgcgcaggctggaacaccgccctcgatctcgtcgccgaccgcttctcgagggcgatcgccgaacacggcccggactccgtggccttctacgtctccggccagttgctcaccgaggattattacgtcgccaacaagctgatgaaggggttcatcggctccggcaacatcgacaccaactcccggctttgtatgtcgtcctctgtcgccggtcatcgacgcgccttcggcgccgatacggtgccgggcgtctacgaagatctcgaattggccgatctcgtcatcctcaccggctccaacctcgcctggtgccatcccgtcatctaccaacgccttgcggctgccaaggcggcgcgcccgggcatgaaggtcgtggtcatcgacccccgtcgaacgatgacatccgatatcgcagacctgcatctggccattcgtccggatagcgacgtcgcgctgttcatgggtctcttcgcgcacctcatcgcgtccggcgcggtcgaccagaactacgtggcggagcataccggcggtttcaacgaggccttcgccacggccgcgacgctctccgccagcgatatactggagcagaccggccttcccgccatgcagcttcgcgaattctatcgcctgtttacggcgaccgaaaaggtcgtcacctgctacagccagggcgtcaaccaatcctcaacaggcaccgacaaggtcaattcgatcatcaattgccaccttgccaccggccgcatcggccggccaggcatggggcccttctcgctcaccggccagccgaacgccatgggtggacgcgaggtcggggggctcgccaacatgctcgccgcgcatatggcgatcgacaacgccgatgaccgtgatcgcgtccagcgcttctggcagtcgcctgctatcgcgcagaagcccggcctgaaagcggtcgatctgttcaaggctgtcgctgacggtcgcatcaaggcgctgtggatcatggcgaccaaccccgtcgtctcgatgccggatgccgatgccgtcgaagccgcgatcaaggcctgccccttcgtcgtcgtctccgatgtcctcagcgacaccgacacaacccgccatgccgatgtcctgctgccctcgctcggctggggcgaaaagaacggaaccgtcaccaactccgagcgccgcatctcgcgtcagcgcgacttcctcgacgcaccgggcgacgcccgcgccgactggtggcagcttgccgaggtcggacggcgcatgggcttcaacggctttggctatgcgtcgccggcggacatctttgccgagcacgccgccctctccgccttcgagaacgacggcagccgcgacttcgacatcggcgcctttgcaggggtggatgaggagagctaccgcgtcatgtcgccgttccaatggcccgccacgccggagccggctaccgtcagcagcggcggcaagcgcttcttcgccgatggccgattttaccacgcggatggacgagcacggttcgtcgcccttgagccagccgtcgccgatcgtaccaattccgattaccccttcacgctcaacaccggtcgtattcgcgaccagtggcacacgatgacgcgcacgggcaaaagcgcccgcctctcctcgcatatcgccgaacccttcgccgagttgcacccgcgcgacgcgatcgagatcggcgtcggcaatgccaccctggtcgaaatcgaaagcccgcatggcaaggcgatcgtgcgcgccttgatcacggagcggcaggcccgaggcagcgttttcgtgcccatgcactggaacgaccagttcgccgccaaggcccggatagacgccgtcgtcgcgccggtcaccgatccgctatccggccagccggcttccaagaacgtcgccgtctcggcccggtctttcaacgccacatcgtacggcttcgccgtttcggcagccaggcccgaggggcttgatacgccctattgggcgctggcgaaggccgatggcggctggcggctcgagtttgccgtcgaccagcacgtcgaggactggtcgcggtggtgtcgccgcacattcgccattcccgaggcgctcgagccgctcggttacgcggaccggcaatccggcgacatcaggctcggcttcttcgacggtgaccggcttctcgccgcgcttttcatcgcccggcagccggtggccgtcgcgcgcaactgggcgatcgcgcagctttgtgcatcgcatgatcagccgcgcaagcgcttcgctctggttgccggccgccccggctcggacatgccggatcccggcgccaccgtctgttcctgcctcggtgtcggcgtcaaccagatcatctccgccgtgcgcggcggttgccacagcgtcgaggcgatcggcgcgcaaaccaaggccggaaccaattgcggctcgtgtcgcgcggaaatcagggggatcatcgatggatgtcttgcagcagcagcggaatgacagccctgcccggatggaaccgctcgccaagctcccggtcttctgggcactcgacggaaagcgtgtcgtggtcgcgggcggcacggatgcggcggcctggaaagccgagttgctggcggcctgcggcgcccatgtcgagatattcgccaaagacctcaacgacgcctgcgcggcccttgtcgcccgcaagccggggcatccatccgcaagcatccgccaccatcagcgggattggcaggaggctgacctcgacgaggccgtgctggcgattggcgactgcgaccatgacgatgaagcaagacgtttcttcggagccgcgcgcgcggtgggcgtgcccgtcaacgtcatcgacaagccggactattgccagttccagttcggctccatcgtcaaccgctctcccgtcgtcgtgtcgatctcgaccgatggtgccgcccccatccttgcgcaggcgatccgccgacggatcgagaccttgctgccgcaggcgctgaaaggctgggcggggttggcgcaggcgctgcgggatggaatcaacgaacgcttggcaccggggccccagcgccgcgccttctgggaaaagttcgtcgatcgcgccttttctagttcggatacgccggaggagggcgttggcgggctgcttctcgaggaggccgagaggctccggggagcgcccgcccacatgtctcgaggccgcgtgacgcttgtcggcgccggccccggcgatgccgaactcctgacgctgaaggcagtgcgggctttgcaggcggccgacgtgatcctttttgatgatctcgtctccactgaggtactggagcttgcccgccgggaggccaagcggatgcttgtcggcaagcgcggcggccgcacgagctgccgccaggaagatatcaacgacatgatggtcaagctcgccaaggcgggcaagcatgtcgtccgcttgaaatcgggcgatccgatgatcttcgggcgcgccggcgaagagattgcgcatctggaccgcgaaggcatccccgtcgatgtcgtccccggcatcacggcggcgagcgcgatggcgtccaggctcggaatttcgcttacgcatcgcgatcacgcccaatccgtgcgcttcatcaccggccactcccgccatggcggattgcctgatgatgtgaactggaaaagcgtcgccgatccgcatacgacgaccgtcttctatatgggcgggaggacggcggcgctgatcgccgagcgactggtcgcggaagggctggcggcttcgacgccagtcatggtgatgagcgacgtcagccgggacacgcagcgtcactggcgcggttcgatcgcaaagctccacgagggcattgccgtcatcggctacgagcagcctgtgctgatcgccgtcgggtcggcattcgccgcgcgtgtggcgacggaccaggatgacattcagcctgagttgtacctgcagcgcgaggcctgatcccgcccggcgctggctccgttcaggccgcggtctgggcggcgccgaagaccttggcacggcgcacggtgacgaagccgcgatcccccgccttgacggcgcgctccggttcgacgtcgaattcgagctgcacgccactttcggtgctcgcgagaatacggcggccatccggcctgtcgagaacacggtcgacgcgggcgccgatgccgggagcttccgcggaccagtcgagatcggccgggcgcgcgtagatctcgccggcgccatcggcaatgccgggtgcggcgaccgaggcaccgcccgcataggcgacgccagcccggatttcggccggcaatacgttggcgtcaccgaggaatttcatcacgaaggccgattgcggatcgcggcagacctgttcgggcgttccctcctgaacgatcttgccatccttcaggatgacgacgcggtcggcgagatcgagcgcctcttcctgatcgtgggtcacgaatatcgtggtaatgccaagctcgtgatgaatctcgcgcagccagcggcgcaggtcgtgacggacattggcatcgagcgcgccgaacggttcatcgagaagcagtaccttcggatcgacggagagcgcgcgggcaagtgccacgcgctggcgctgtccgccggagatctgtgccggaaaccggtcgcccagcccctcgagccgcacgaggcgcagcagttcggtgacacgcgcttcgatcgccgccctgtcgcgcttgaccttcgacaccttcatgccgaaggcgatgttttcggcgaccgtcatgtgcgggaagagcgcgtagtgctggaagacgaagccgacgccacggtcacgcaccggaatgtcggtcgcatcctggtcgccgaaaaagatctggccgccatccgaatattcaaggcctgcgaccatgcgcaggatggtggtcttgccggagcccgacggtcccagcagcgcgagcagctcgccgctgcggatatccagcgagacgtcgcgcacggcgcgaaacgtgtcgaaggttttgacgacgtggtcgaggcggatcttcatgagcttttctctgctggctgggcaacgagcgccggatgagcggcggacttggcgcgggtccggcgaccggccccctggcgctcgagcgccaccttggcgatgatggtgaagatggcgatgaccgccaggatcgaggcggcggcgaaggcgccggttgtctgataatcgtgatagagcagctcgatgtgcagcggcagcgtattcgtctggccgcgaatattgcccgacaccaccgatacggcgccgaactcccccatcacacgcgcgttgcagagcacgacgccgtaaagcatcgcccatttgatattcggcagcgtcaccgagaagaacgtgcgccagccggacgcgccgagcgatgtcgccgcctcctccagatcgcgtccctgcgcctgcatcagcgggatgagttcgcgcgcgacaaagggcgcggtcacgaacatcgaggccagaacgatccccggaagcgcgaacaggatcttgatgtcataggcttccagcgtcggcccgaagatgccctgcaggccatagacgaagagataggcaacgccggcgacgatgggcgacaccgagaagggcacctcgatcaggacgagcaggaagcgcttgccccagaaatcgaacttggtgatcgcccatgcggcggcaacgccgaaggcggtgttgacaggcacggcgatcagcgctgtcagcaccgtcagcatgattgcatgccgcgtgtcgggactggcgatcgtggcgctatagacctgccagcccttggcgaaggcttcgaccccgatgatgacaagcggcgccaggacgaggaaagcgccgatgacgagtacaaggccgatcaaggtgcgcctgacgatcggctggtcgccgacgcgcggcggtttgcggtgggtgggaatgctgctcatgatcagttcctcaccgtgtatcgcagcgcccgcgcctgcatccagttggtgatcgccagcatcacgaaggcagtcagcaacaggacggaggcaatcgcggcggcggcctggtagtcgtattcctcgagccggatgaagacgagaagtgccgtgatctccgtcgacatcggctgattgccggcgatgaagatgatggcgccgaactcgccgagcgaacgggcgaaggatagagacacgccggcaagcagggctggcgtcagcaagggcagcatgaccttgcggaagatcgtccagtccgagccgccaagcgactgcgccgcctcttcgtaggccgggtcgagatcctccaaaacaggctgcacggtgcgaacgatgaagggaagactggtgaagcacatggcgatcatgataccgatcggcgtataggcgaccttgatgccgacaccttcaagcacagagccgaaccagccgttcgcagcaaacagcgtcgtgagagcgatgccggccaccgccgtcggcagcgcgaacggcagatcgaccatcgcatcgacgagccgccagccgggaaagcgatagcgcgtcagcacccaggcgagcgcgaagccgaagaacaggttgaatgtcgtggcgccgagcgccgaaagcacggtgacccgatagcttgcgagcgcgcgcgtggacgagacgatgcgccagtaatcctccagcccgaggctcgctgccttgaacaccagcgccgccagaggcagaacgacgatgaggccgacatagagaagggtcactcccagcgacagccgtaacccgggcaggacattgcgtctcaagcggtcattcccttatcaatgcaaagccgacaaaattcatcaggccgccgttcgggcgtcgcttggcgtgacatccctcattcctgtgcttgtcacaggaatccagcgacccgacgtctgtcgggtcatatgactctttcagcccaaagacttgggctgactggattcctgtgacaagcacaggaatgagggtggtggatatagtgcccctgtgaagaactaggttaccgaacgttatcggctgccatagagcttgtcgaggacgccgccggaggcgaagtgctccttctggatcttttcccagccgccgaacgtatcgttgacgttgacaaggcggatcgccggaaactgatccttgaactcgccggccaccttctcgttgcgaacgcgatgaccgaactgcgcggcgatccgctggccatcctccgtatacaggaagtcgagataggatttcgcaagcgcctcggtgccatgcttggcggcgaccttgtcgaccacggccacggggaattccgcaagcaggctgaccgacgggatcacgccctgcaccttgtcggagccgtactgcttctcgatgccgcgggtctcggcctcgaaggtgatcagcacgtcgccggtctcgcgctcgacgaaggttgtcgtcgacgcgcggccgccggtgtcgaagaccggcacgttgtcgaagatcttggtgatgtaggcttcgatctttccttcgtcgccattgtaggcttccttggcccaggcgtaggccgcgagataggtgtagcgcgcgttgcccgaggtcttcgggttcgggaagaccgcgcgtacgtcgtcacgggcgagatcgccccagtccttgatgttcttcgggttgccggcgcgcacgaggaaagatgggaaggagtagaacggcgaagcgttgttcggaaacgccttggcccaatccttggaaacgaaaccgttcttcgcgaggaaatcgatgtccgtcgactggttgaaggtaacgacgtcggcttcgaggccctcgatgatcgagcgcgcttgcttggacgtgccggcatgcgactgatcgatcgtaatgcccggattttgcttgatgaaggcttcgttctcggaagcgaaaagctcgcgcgaaacgtcataggatgcgttgagaagctttgtcggctcctgggcatgcgcctgaacggagaaaagggcggcaagcgctgtgccgagaatcagaaggcggttcatctatcgctccggtgtttcattgtgcgttgaaactaatctgacagcgcccggatcgcgaggaaccactgcccccggttgccgactggcttagaaattctgtccctttttcgccatatttcgcggcgcttttacttcaggcgatgcgtgaaccatattatgaccgctgcctaagttgctgctaataaaatgttttcccgacggacccaagacgatcctcccttaaggccatggtgacaaagccctgcggggacatggctcttcggtccgcgatattgctcttgcgctcgttcagcctttgacgtatcacccacccatcacaggggtgctccgtaatgccggggctgagatacgatcgcatgatcgtggaccctcaagctgatctggataatgccagcggagcgaggtagagcgatgttttccggcgcacagatttccctgtatcccatgaccgacgatttcgtcggtgtcataacgcgtgcgcttgccgcgctcgatccccatcgcgaccggttgcggatcgagacggacgacatctcgacgctgatcatcggcacgcccgacgtcgtcttcgccgccatgcgcgatctgttcgcggccgccgccagcagtggcgagcattgcgtactgcacgcgaccatctcgcgcggctgccccggggagcctgatgatccgatctgccagacgcctgaactgaccggcccgatggcgccgctcgacgagcggaaggcacgggcgcatcaggcggtcaaggacgcagtcgttatcggccaggaagcggcagcgcagttttcgctttatacgctcgggatcgacggccacatggacgagatctatggctgcatcgacttcctgaagaattccggcgtcttcgagaaatcgaagaacttctgcacgaagctgcgcggcgataccggtgccgtattctcgacggtgcacgaggcgctggtgcgcttcggcccgccggcgggccatgtgacgatcgaccttaccgtctcggccaacagcccttcgaagcgctaagcgccgcaccgcgcgcgcccaaaccggttggtcccatgtcgacatcacgtccgcccgcatggcaggtcgttcgcgacctgcaccatcacatccgtaccggcctcggccgggcgctgccggccatcgtggccgtctgccttctggtggcagcctgggaggcctatgtgcgcctgtcgggcatttcgcccacgaccctgcccgcgccgtcgcgcgttctggcgcagaccttccagtcgcggtgggccctgttcgacaacgtggtgccgacattgcgcgccacgcttgccggcttcggctgttcgctggcattggccttcatcctgtcggtgctgctcgatttctgtcagcccctgcgtcgggcgctgtttccgctcttcatcatcagccagacgctgccgctggtcgccatcgcgccgctgatcgtgctgtggttcggcttcggcctgatgccgaagattctgcttgtcgcgcttgtcaccttctttccgatgctggtggcgctctgccagggctatcaatcgaccgaagacgagttgcagcaactggtcgcctcgatgggggcgccgcgctggaagcagttcctgctcgcgcgcctgccgtccgccttgcccttcttcttcgccgggctgcgtatatccatcacctacgccgtggtcggcgcgatcttcgcggaatatgccggcgccgccaaagggctcggcatctacatgctgaacgccaagaacaactttcggcccgacctggttctggccgccgtgctcgtcagcgccgtgctgaccctgacgctcttcggcctcaccgtcatagccgaacgcctggccatgccatggacgagacgcggaaagggcggaaccagatgagcgctccacgcctggaactcgaccgcgtcacctgcagctacgacgaaaccgccgtcctttcggatatctcgttgacggtcaggcccggcgagttcgtctccattctcgggccgtcgggatcgggaaagtccacgctgttcaagctcctcaccggcgcacggcgtcctgacggaggcagcatgcgcttcgatggtcgcgtgctcgacggagcggtccgtcccttcgccttcatgccgcagcgcgatgcgctgatgccgtggcggcgcatcatcgacaataccacgctcggtctcgaggtgcagggcatgagccgcgccgaggcgcgccggcgggtgatgccgcttttctccgaattcggtcttgatggcttcgaacagcattatccgggggaactatcgggcggcatgcggcaacgcgcggcgctgctgcgcaccgttgtacaggacaagccgatgcttttgctcgacgaaccgttcggcgcgcttgatgccttgacgcgcgcgggcatgcagcgctggctgcacgagatgtggtcgcaacacgactggacagcgcttctcgtcacgcacgacgtgcgcgaggcggtctatctctccgatcgcatctatatcttctcgccacgccctgcccgcatcatccgcgagatcaccgtcgatctcccacgcccgcgcatattggacggcgcggcgcgtgcgcgtgcggccgagatcgaggccgacatcctcgatacgctcttcaatgccccgaacgacgccacaatcaccactatggaggaaacaccatgaaaaccccgatgctgacccgacgcgctgccctagcttcggccgcggggcttgctctgacgctgccaatgtcgccgctgctgtcgaggccggcccgcagccaggagaagcgccccgtcaaggtcgcgctggactggacaccgaataccaaccacatcggcctcttcgtggcgcgcgacaagggcctttaccgggatgcgggcctcgatgtcgaaatcctgccctatacggatacctcggccggcacgctggtcgccaaccatgtcgccgatttcggcattgtcggctccatcggcctgatgacccagcgcgccgccggcgccgatctcgtcgcgacctacgccgtcgtccagaccgagactgggcgtctcgtcttcaatgccaatcgggacgacatccgcagtccgagggatctcgacggcaagacctatggcggtttcggcagcgcctgggagaacgcgctgatcggctcgctcatccgcaacgatggcggcaaaggcgagttcgagaccgtgacactcggcacctccgcctatcaggcgctggccaacggcagcgtcgacttcacgctcgaggtctacacctgggaaggcgtgcaggcggagctcgagggcgtcaagcaacgcgccttccgctatgcggattacggcgttcccgacgagcacacgacgctcatcgcctccagccaggcatttctggacgacaggccggacctcgcccgcgccttcctgcaggcgacccgcaagggttacgacttcgcggtggatcgccccgacgaggccgtcgatctcatgatcgcggccaatagcgacgcactgaccaaccccgcgctggtccgggcctcgttgaaggcgctgatcgacgggcgctacttccgcacacaggacggcatgacggggcggatcgacccggcgaagatgacggcgatcggcgactatctgttccaggcgcaaatcctgaaggacgccgacggcaagccccttggcgccgcgccggacttctcgcgctatttcaccaacaccccgctcgacgccgcctgacgcacggtatcggccgccaatttccatcagtagcttcgcgcggccgtgactttggccgcgtgccttcctgaacacggaccaagggccgggtagcaaagcgcgtgcgatcatgctctcttggcactatcagctgtcatttcgggacgatgctggctatagtttattggatattaagaacgttgaacgagactcgcctagccgtgacagcgaagcatgtaaatcgatgcaggcaagaatcgcttgcatgaatggcatggcggaaaacatggaacatgaaggtttcgatctaccgttcctcctcaaggagattgatatccttgcggatgaactcagcaagctgcctccttcgatggacaggacggcgctggaacttagactggcacagatgcgccagatcgttgaactgcggcatacgcgccgcggcatgaaaaacctcgatcccaactaaaggttagactgtcgtcatttggtgcactctgttgttgcaagtgcggcaagcgaagcccgattgccggcgatcttccctgcaccgtttccgcaagcaattggccagatcgacgattgtgcttaaagattcccggcaaagaggctaatgaacgcgcaagcgaagcagaggatgtggccatggaaccggaaaccgtaacgatcgacaaccgcaacgacttttcgctttgggcgatcgagcgtgccaagctgatcgtcagcgaacaggggacggcgcttgcgcttgcggcgcgagatatggacgacaccgagatcggtcaggccggcaacgcgcttggacaggcgatcgccgatgccatgattgaagtattcgacggcctgatgaacggcgttgccgaggaatagcggctcagtcgttgatctccagcccgaaagaccggcaagaatggcgcgcccgatattctttagggaacctttccgtgcctcacgggttttatctgcgcaacgtattgaaatccgcgttgctggatcagcaagcccaatgcaatccaaccaaaagcccggtgcagcccctcgcaccgggttttttcttgtgcgttgctgtcggcgtccgcgcctgacgcataaggaacttactatatgttaagagaggcatgtcaccgttgcacggatcgccacaaagggattgtgcttcgaggggtatagggcgttggatacgagaccatggatgatccccgttttggttgcctgcaggcggagcggcgccgtccatacggtcaccagtacccgtgaagcgctcagactgctttttaccgcatggccggtctcggaaggcaaagcctacttttccgctctggaagtgtgtgacggggtcgcgatcggcaaggcatcgcctgaagatgcgcgcctcgcctttatcgccgcggccgttgaggccaaggtgccatacgacgtggtgcccgcgacgcctgttccgctctaagcgcctgggctgcgctcaatactcggtgcctatatccgcatatagccgctgcacctccgctccaccccagaaatggctcgggccggcgtggacatgatgtccacgccggcccgttggttgaaaaggccgtcgttattcgccgggaacgatcgccggatcgccgccgggaaccgcctttgcgctgttggcgggtttcggcgccttccaagcgatcaggcggtagaacatcgggatgaagaaggtcgcgatgaacgtcgccgcgagcatgccgccgatgacgccggttccgatggcgtgacggctggccgagcccgcgccggaactgatggcgagcggcacgacacccagaatgaacgccagcgacgtcatgacgatcggacggaaacgcaggcgggccgcctcgatcgccgcctcgccggcgctcatgccctcctggcgcttcaggaccgcgaactccacgataaggatggcgttcttggcggccagaccgatcagcgtcaccatgccgatctggaagtagacgtcgttggtcagtccgcgcagcatcgttgccagcaacgcgccgaacaacgcgaacggaatggcggtgatgactgcgagcggcagcgtccacttctcgtattgcgcggcgaggatcaggaacaccatgatgatgccgaagatcatcgcctgcgttccggcgccgccggccgccagctcctggtaggccgagccagtccaggcgatctggtagcttgccggcaaggtctcggccgcgacctcctgcaatgccttgatcgcatcgctggacgtatagccgggtgcaggattgccggtgatcttggcggagttgaacgcattgaagcgctcgacctgatccgggccgatgatgcgtgtgacgttgaccagggcgtcgagcgggatcatggcgccgctgtcggaccgcacgaagacctgacgaagatcctgcggcgactggcggaacgcgtcctccgactgcagcttgacctggtagttgcggccatagagcgtgaagtcgttgacatagaggctgccgaaggtggcctgcatggcatcgaagacggtattgatcggaacaccgagcgccttggccttctcgcgattgagatcggcgcggtattgcggcacgctggaatcgaacgtcgttcgcacggcggtcaattccggccttttcgacgccgccgccacgagctgggccgcctgatcggcgagaccggcgatgccgttgccgccgcggtcctggacataggcctcgaaaccacccgtggtgctcaacccctgaatgggcggcggattgaatgccagcaccatcccgtccttgatgccgctgttggcgccgatgatcggcccggccatgttgcgggcgtcgagctccggcgtggttcgctccttccaatccttgaggatgatgaaggagacacccgcgctggtcttgagaccgccggagaggatatcgaagccggagacggcgaagacgtcctggataccagggagttccttggtattggtgacgacctgattcatgacgtcgctggtgcgcggcagagacgcggccggcggcaggatggcgacctgcagcacccagccctgatcctcgttgggcacgagcgaaccggggatggtgtagaacatgtagccggtcgcgcccaggagcgctcccacgagaacaaggccgatcgcgaagcgcttgacgaagaaccgcacgccggccgtatagcctgccgtcatccggtcgaacgcgcggttgaagacgcggaacggcaaggccggctgatggtggccgggcttcaggatcagtccgcaaagcgcgggcgtcagcgtcagtgcgacgatccccgacagaatgaccgaaatcgcgatcgtcacggcaaactgcttgtacatctgcccggccaggccgcccatgaaggagaccggaataaagaccgagcagaggacgagaacgatcgccacgaccggacccgtgacctcgcccatcgccttgatcgcggcttcccggggcggcagcttctccacggtcatcaggcgctcgacgttctcgagcacgacgatcgcgtcgtccaccacgatgccgatcgcgaggacgagaccgaacagcgtcagcaggttgatggagaagccgaggatgtacatgccggcgaaggtgccaacgatcgaaatcgggaccgcgatgacaggtatgagcgtcgccctccagttctgaaggaacaggaagaccacgatgacgaccaaggcgatcgcctcgatgaaggttcgcaggacttcgtcgatcgagacctgaatgaacttcgtcgtgtcatatggcacgcggtagtcgataccgtcggggaaggacttcttcagctcttccagacgcgtcgacagggcctgcatggtggccagcgcattcgctccgggctgaagatagacggcgatcggcacggccgggatgccgttgagactgctcgtcaccgcatagctcttggtgccgagctcgacacgggcgacgtccttcaaccgcagggtggccgcgttgctgttggagcgcagaatgatgtcgccgaacgcctcgggatcggcgagccggccctgcgtggtgacgctgtaggtgaaaggctcgccactggcgcttggctggtcgccgaagcgaccggcggcgaactgcgagttctgctcctggatggccgtcgagacatcgcttggcgtcagattgtactgcgccatcttgtccggacgcagccagacgcgcatcgaatagtcgatgtcgccgagaatattgacatcacccacgcccgggatgcgcttgaggtcgtcgagcacgttgagcagggcatagttgccgacataggtgcgatcatactgggcgttgttcgaaaacatcgcgacgaagccgagaatcgaattcgagcgcttcgcgaccacgacgccctgacgcgtcacttcctgcggcaaggtcgatgtcgcacgttggacgcggttgttgacgttgatcgccgcctggtccgcattcgttccaagcgcgaacgtcaccgtgatctgcatcgtgccgctgttggagttcgtcgattgcatgtagagcatgttctcgacgccgttgatctgctgctccaacggagcggcgaccgtttgcgccaccgtctcggcgctggcgccgggatagttcgccgtaaccaccacctgtggcggcacaagctccgggtactgcgcgatcgggagagcacgcagcccgagaatgcccgcaagcacgataacgattgaaatgaccgccgcgaaaaccgggcggtcgataaagaacctgttactcatcagttggctgccgtctctttcgtgcccttgccggcatcggccgcggccgcttgagccgtggcattgacggccgagcccggacgcaccttgatgacgccttcggtgatcagctggtcaccggcctcgaggcccgaattgacgatccagttgctgccgaccttctggccgagcgtgaccgcattgatcttcgccttgccatccttgccgaccgtatagacgaactggccctgcgggccctgcaacagcgccacctccggaatgacgatcgccgaatcggcggtcacgccgctcaccgtcgcacgcacgaactgcccggggatgagctgacgatccggattgtcgatgacggcgcgtgcctgaatggtgcccgtgttcacgtcgacggtcgccgaggtgaagtcgacgaggccttcggagccgtaggtcgagccatcgccgaacgtcagcttgacgcgcagcttctgctcctggcccttgctcttcatcagatcgatgagatggcggatttcccgcgcttcggcatccgagaaggagaagttgacgtaaacagggtccagctgtgtgatgttggtcagcaggctcgaatccgagctgatcaagctgccttcggaaacctgctccaggctcgtgacgccgctgatcggagcggtcaccttggtgtagcccagattgagctcggcggtcttgacctgagcttcggccgaggcgaccgccgcttcggcgagttcgcgcgcggaaatagcatcgtcgcggcttttctggctcccgactttctgatcgaagaggctgatgttgcgcttctcctcgcggatgccctggctgagctgcgcttgcgcctgcttcaacccggcctgcgcctgcatcagcgccgcttcataggaggccgggtccatgaggaacagcacatcaccggccttgacctgcgcgccttccacgaaattgcgcttcaaaaggatgccgttgacgcgggcgcgtacttccgtctggcgaaacgccgagatgcgggcggcgtattggtagctcagaggcaccgagctcgtggcgatgctgacggtggtgactgaaggaggcggtggggccgcggcctgctgggccaatgccgccgaggacatgaatatcgatacagccgctacaagcaccccactacgaacggtggaaaaatgccgctgatttttattttgcactatattcgcctttaacttgtgctcgatcgaccgagcagccttcgttccctcctcccctggccctccgccagactcgattccattgagaaatgttccgttcgagactccgcccgcagccggcagaagcgacgttcgcctgccgattgcctgtctcgtggaaccttggcacatccatgaggaagcagccgggcatctcgcctctgcttccagtttatcgttttatatcccgtatttaacacgcgacggaagcagacgctccgccatcgcgtttacgtaacagctgggtcggaacatgttaagatgccgaaatccgcatgacgccatgaaaactgttcatgaatagcgcttgtttgatgatgccgggcgggtacgaacgcgcgtttttcagccccgcacattgaggttcggcgccagcgacctgctctaagcgggctctccaccgcgcttattagtcgagcctaatgccatgagatcaacgggtcggttgcctggacatgatcgcctgagcgacgacatgtcggcacaagcaatttttcgtgttcacgaacgccgccaccgcactcccagagatcccaaaattaacgattggttaaccatatccgtcgtttacaatgattaacggccgtcgggtcgttgattcgagggcccggcgtcaaatttgtgccggatacaggggaatacgattgcggcgatcggaaacatgggtttgctaagattgatggcccttgcggggttggtcggcctggtcgccggctgcacatcgaccggaaatatcagacaaccaagcgccgctgaaaccatagcgagcgagaaggcgcttgtcctgccgccgcccggtggcccctcgatcgtgagcgtcgtcgagcagaagcgcggcaacggcgtggatcaatccatctcgctgtttacctcgtcctcggttcccggccagaatttcctgaaagtgcagtttctcggcgggcggggtgagaatcccggggcgggcagcgtctcctacaagatggtcaacgagagcaccatcgcgcgcgaaatggttgccgccgtcccgggcgtgcggatggcgcgttcaacgactttcctgcagaacagctacggtcccttcggctatgcctccggcaccagccgcggcggagacacatgcatctacggatggcagcagatccgttccagccgctcggaccagacgcaggcccgcaatttcggaatgatccaggtgcgcctgcggttgtgcgatgcgcgcgcgaccgagcgccaattgctcggcgtgatgtacgggtacaccgtcatcggcacattcaatggcgaaatctggaacccctacggcacgacgcaaggggccgatccgacccttggacgccccgggagcccgatctatcccgacgaaggcggatatcgcgcaacgtcgatgccgatcggctacgagccggcgccgacgcagacttactcgcgccccgcgacggtgcggcgcgcggctgctcgccctgccgccgcggcgccgatcttgccgcaagcgatcggtccccgcgtgccgggccccgacctttccgagaacgtgccgcaagcgcctatggaagcaccggcaacgaccagtgtatccgctcaaccgcaagccccgcgacagacgatgaccgcgagtggggtcaacgtcccgtcgcccgactgcatcggcaacacggcgagcgccgcctgccagagatgacgatcagataggccgggaccggcgacggtacccggcgcaatgcctttgaaggaaagccgatgcataaggcccgcagcatcttgatctgggcagtggttgcgatctgcgtggtcacgctggtgaccttgccggtgaacctgcaggcgcagctgatcgccagcatcaccgtggttgccgtgatggcgatcatcaaggggctcaagggcgagggaatgtggcgtctgatcgcgctcgccttcggcacggcgatcgttctgcgctacgtctattggcgcacgaccagcacattgccgccgatcaaccagccggagaacttcatccccggcctgctgctctatcttgccgaaatgtacagcgtcgccatgctggcgctcagccttttcatcgtcgccacgcccttgccgccgcggccgtcacgcgttggaaaactacagcgtttcccgcatgtcgacgttttcgtgccgacctataacgaggattcccaccttctcgccaacacgctgtcggccgccaaggcgatggactatcccgccgacaagctgaccgtctggctgctcgatgacggcgggacggtgcagaagcgcaattcgaacaagctgctggaggcccaggcggccgtcgcgcgtcacaacgagctcaagcagctctgcgaggaaatcgacgtgcgttacctcacgcgcgagcgcaacgagcacgccaaggccggcaatctcaacaacggcatgcagcattcgaccggcgagctgatcgccgtcttcgatgccgaccacgctccggcgcgcgacttcctgctcgagaccgtcggctatttcgacgacgatccgaagctctttctggttcagacgccacacttcttcatcaatcccgatccgctggagcgcaatctgcgcaccttcgacaacatgccgagcgagaacgagatgttctacggcatcattcagcgcgggctcgacaagtggaacgcggcctttttctgcggctcggcggcggttctcagccgcaaggcgctggaatcccagaacggcttcagtggcatcagcatcaccgaggattgcgagacggcgctggcgctgcatggaagcggctggaacagcatctatgtcgacaaaccattgatcgccggtctgcagccggcgaccttcgcgagcttcatcggccagcgcagccgctgggcccaggggatgatgcagatcctcaggttccgtttcccgctgctcaagcgcgggctgacgctcccgcagcgcttctgctacatgtcgtccacgctcttctggctcttccccttcccgcgcacggtgttcctgttcgcgccgctgttctacctcttcttcgatctcgagatcttcaccgcctccggtggcgagttcctggcctatacgctggcctacatgctcgtgaacctcatcatgcagaactacctctacggttcgttccgctggccgtggatctccgagctctacgagtatgtgcagacggtgcatctgctgccggcggtgatctcggtcatgctcaacccgagaaagccgaccttcaaggtgaccgccaaggacgagtcgatcgccgtcagccgactgtcggaaatcagccgtccgttcttcgtcatcttcgccgtgcagatcatcgcgcttatcgttaccgtctatcgcatctataccgagccctataaggccgatgtcacgctcgtcgtcggcggctggaacctgatcaacctgatcatggccggctgcgcgctcggcgtcgtgtcggaacgcggcgaacgcgcgtcgtcgcgccgcgtgcgcgtcaaccgccgggcggagttcggcatcaacggcaagtggtatacggcctcgatcgaggacgtgtcggtgcatggcgcccgcttgcatgtgttcgacaagcagctggaacagtcgctggtcggcgtcgaaggcgaagtgcgcttccgtccgttcagcggcgccgagctggagacgctgcctttggtcgtgcgcaacatccagccgacggagggcctgcttgccgtcggctgtcagtatgctcccaagagcgcgctggaccaccgactgatcgccgacctgatgttcgcgaattcggctcagtggacgcagttccagcagggccggcgccgcaaccccggcctgatccggggcacgatctggttcgtcgggcttgccttctaccaaacgagccgaggcctcgtctatttcttccgcagcatgcggcccgagcgcgaagagcaacggcaggtctcgaaggtgaacggctgatgcggaagatcgccacgagccttgcttttctcctcgcggcctcggccctggcttacgcgcagacgacgcccttcgacatgtcgggcgaacgtccgccggaagctgcgcccgccattccccgcctgacgctgccggcgacaccgcctgcttcggctgcgccgtcgaccagcgccgcgccgccttccgcgccggtcacgcccgcacccgtggccccgcccgcgccgatgcagccgatccagccatttgccgtcacgccgcccgcgccggcgccagcggccgaacagcccgcgtcatcttcgccccagcacaacgcggccccagcggcggtacagccagcacctgcgtctgcacccgcggcacagaggccagcgccaccgaccgaggcatccgtcggttcggcgcccgcggcggcttcgcccgctctgccgccaggcacatcacggcgttatgtcgtgcctttcgcgaagctcgggctcgacggcgagtatgaccgcagatcgtggtctgtctatctgacgccggagcaggcggcagcgcaggcgaccttcaacttcagctaccagaatgcgatcgtcgtcgcgcccgagagctcgcagttcgcgatcctgatcaacaacagggtgatcggacagcagccggtcggctcttcggatggctcgtcgaccgtctccttcagcgtgccgccgcgcttgctgcagccgggcgccaacctcctgacgatcgaagcgacacaacgccatcgcaccgattgcagcgtgcaatccacgtatgagctgtggtccgacatcgacccggcgcagacctatctgactttcgtcggcgaggagaccgcgaaattctcgagcacggacgccatacgcgcgatcggcgttgatggcgcgggacagacggcgttcaatttcgtcgtgccggcgctggagcagcccgggaccaccaagccgttgctcagactggcgcagggcctttcgatcttgagcggcatgccgaaccagaccgtgtccttcaccacgaattctttgcccgcgtcatctccgggacggatgacggtcgtggtcgggacgccgagcgaactgcagccgctgtttgccgtaccggttgccgcgcagacggctccgctcgcgaccttcgcgaccgacccgcgctccggccagaccgtgctcttgataaccggaccgtcctggccggcgatctccaccgcgatcgagacgatcgtctcgaccaccgaccgcgccgtaacggttcgtcgcgatgctctggcgacacagcgctggaccgcaccggatgcaccactgatcttctccgacaggacgattgccttctcccagctgggcgtgaagtcgacggaattctctggacgccgcttccgcaccaccttcaacatcgccgtcccggccgatttctacgccaatgcctatggcgaggcgaccgtgctgctcgatgcggcctatacgcagagcgtgctgccgggcagccagatcgatgtctacgtcaatggcaacatcgcatcgaccttgccgatcaccgccaaaggcggcggcatctatcgtcatctgcctattcgcgtgacgatgcgccacttcaagcccggtctgaactcggtatcgatcgagacgatcctgcggacggaagaggacaatgtgtgcgtgccgggaaccgccgcgggcgcggggccgcgcttcgcgcttttcgacacgagcgagtttcgcatgccggatttcgcccgcgtcggccagcgtccgaacctcgcggcgctcgcgggaaccggctatccctacagccgcgccgcctcgcccaccccgctcttcatcgaccgcgtcgacgccgacacgctatcggccaccgcgaccctgctcggccagatggctctgatggccggccggccgctcgatgtcgaaccggccgcctcgccgggcgcgatcggcgaacgtgacgcgatattcatcggctccatctcgcaaatgccgcaggcagtgctgtcgcagctcaatatcgcgaccacgagccaggcgacctggagaccgctggccgcgacacagacgacgcccagcgagaccaacgtgatgttcgacgagtggcgctccagggtcagcggcggcgtctggcagggccagatcacctcgttccaggaatggctgcggcgcaacttcgacatctcgctgagttcgttgcaattcgtgcccggcgccgaaaaggtattcacgccctcaaacaccaacagcttcatgatcgcacaaggcgcgagcacttccggcgacgccacatggaccgttgtcaccgctccctccgcgaaggatctcagggaaggcgcgaacgccatgacggcgcagcaaaattggccgctgatcgccgggcacgtcacgacctattccgccgccacgggcaagatcgacacggttcccgtcacccggttcgatttcgtcaagaccgagacctggacgcttgccaattaccgcctgatcgcggcgaactggttgtcgaccaatgtcctgtcctatgcggttcttctcgtggccttgtcgctgctgatcggcgttgccaccgccggcatgctgggaagactgggtcggcgcgaatgaggggctggctgacgatattggtcgccgcggcgatcgcatcgctgctcggctggagccagcccgcatccgcgcagaccgccaggatcgacgcggccgcctggagcgcctacaaggccaagttcctcgaccccaccggccggatcatagacaacgccaacggcaatatcagccacagcgagggacagggctacgggttgtggctcgcctatctcgccaacaaccaggccgatttcgagcagatctggtattttacccgtaccgagttattgctgcgcgacgacggcctcgccgtctggaagtgggacccatcagccaagccgcacgtcaccgatgccaacaatgcatccgatggcgacatgctgatcgcctatgcgctggcgctggcgggctcggcttggaaaaacaatgattacattgaagcggccgccaggatagcgaaggcgcttctggccaatgccgtcgtcaaatcgggcggacgcacgatcctgctccccggcgtcgagggtttcgacgccgccgggcgccaagacgggccggtcatcaatccatcctactggatttacgaggccattcccatcatggccctgcttgctccatccgacgcatggaatgcgctcacagaggacgggctgacattgctccgctccatgcagttcggaccgcgcaagctgccggccgactgggtgagcctgcgccgccagccgcagccggccgaggggttcgacgccgagttcggctacaacgccatccggattccgctctatctcgccagggcgggagtttcggacaaggaaatgcttttacgattgtcgtcgggaatgaccgccggcgatggagcaccggcgacgatagacttgaaaactggccagccgaaacaatcacttgacgacgctggttatcgaattgttaacgatgttgtggcctgtgtagcacaaggaacgaagctgcccgcgtcgtcccggcagttcgcgccatcgctctattatccgtcgacccttcagcttctggggttggcgttcgtcgcggagaaatatccagagtgcctttgaaatcctcgcttgtcgcagtgtcggtcgcagtcgtggtggcaggtcttgtcaccgcgctgaaggatcgcgccgccattcaggagatgctcggcctcggtgaacccacggcgacgcctcagttgatgctgatgggacggatcaccggtcccgacggcccggcgaggcagccggcgatggacatgcagacgatcgccgaggagatacaggcaaaggcaagcgcccaggccccgtttaattcgcagccgcagaccgaagcgatctcgccgcagccagatgcggtcgcccaggcgcagccgcaacagccggccgtacagcgacccgtccccaccccttcgagcgcccaaccggccgcgccgaaggtggacgagagcgcgcttcgctatttcgcgagccgcggcgacaaggcgcgactgcaggccgagatatcgcgacttcaggcgctctatccgaactgggtccctccggccgatccgctcgccgttccccagagcggtgacaagcagctcgaagccatgtggcagctctattccgaaggccgctacgccgagcttcgcaagtcgatcgccgaccgccagggagcggaaaccggctggcagccgccggccgacctgctcgaccggctggacgtggcggaagcgcgcgcgcggctcgtcaacgcctccgatctgaaacaatatacgaccgtcgtgcagatcggcgcggcgacgccgagcctgctcacctgcgccgacatagacgtgctctggcgcgtggccgaggccttcgcccggaccgaccgcatgccgcgcgcgcaggatgcctacagctacattctgaaaacctgcaccaacccgcaggagcggctggccacggtacagaaggcgtccggtctgctgccatatgcgccgatgcaggtcttgctcggtctggagcggcccgatggaaatggcggacgcgaattcgacagcatccgtagcgacctcgcccgcaatttcgtcgccgccggcaatgccaatcccgaccttgccgtctcgcccaactatctgacgctggtgcagcggctggccgagacgcaggggctggcgtcggacgatcttctgctgggctggtatcatcttcgccgcgagaattacgccgaagcggaaaagtggttccgcgccggacgcgcaaaggaggattcggccagcgcatcgcaagggctggcgctgacgctgatcgccgggaagaaggagcaggaggcggaagacgtcatgtacaagtggcgcggcgactccaaggatgccaccgccacctatctcgccgccaccgccaacctgatggcgctgcagccgccggcgaatatcgccgaaaacgtgctgagccgcatcgcaaccgaaatcatcgcgcagaaatacgttccgacggcacagcaattcggctggtatgcgcgctctctcaatcagccacagacggcggcgcgctggttcgagaccgcgctgcgctggaagccggatgacgaaccgtccgcctacggcctggtgattacgcgcgaacagctgaacgaccgccgtggcgtcgcggaagtgcagcggctctgggccgggcgctcggagcgcatcgccagactgggcgagacctcgtcgctgacaccgccgacgcaggcgccgcttcccgcgcctggtcaggcaccgcagcttcagccgcaacagttgcagacgccacaggcgcagagctaccaacctcaggtgatcgccgagcccgctcccgtggtggccgtggctgctccagcacagcgccccctgccaagacaggcggacgtggcccgttcgcccatgccgtccgcttccgtctcgcgcggcgcccgccagccacgcggctgctcgaccacggtcgatgcgcggctgctcgatcctcaaagcgcgctcacccgcggctggtgcctgatggacctgaaccggccgatggaagcggttgcagccttcgaggccgcgctcgcgagcccgacacgcaaggtccgcgaagacgcagcctacggtcaaagcctcgcctatctgcgcgccgggctgtccaacaatgccgccgtcgcggcgaccaaggcgccgcagacccgccagcgggcggcggaactgcaggtttccatcctcgccgaccgggcccttgccgccttctccgccaagcgctatcgcgagacgctcgtctatctcgatcagcgcgcgcaattgcagcaggaacgcatcgatctgatggtgctcaggggctacagctacctgaacctgcagatgtatggagacgccgagcgcatcttcaatgccgcggcatccgtcggcagcagggatggatatcgtggcctcgccgacctgaaggccgcgacgcaccccgaagcaaagcaatagtcatccagaatccggtcgatgcgtctggcccgccagcgcagccaatccttgccgaaacgcgcccaagctggctgctcttgacgttctcataaaaatagaacataacaagaacaaatagcgaggtaagcgtatgaccagaactgaggaagtcatagcaaacgcactggcggtcgtggccgcgtcgcgcgctgagcgagagcgcgatgccgaacgacgacgccgcgtcttcggcaagatcgaaatcggcctgccgctccccaagatcaagggccagcagctcagcctggatctccactgaccggtgcttgcggggcgacgtgggctggtattttctcgtgtcgggcggtttcaatagccgggcggatcggttatcccggctgccgagaaagaagatgggcgagtgcgtttgcccgtcacagatgagaaagctcgtccattgccggataccacgccttcctgcttcgaccgcccctactccgccttccttttcgacatggacggcacgatccttagctctcttctggccgccgagcgcgtttggggcgcatgggccgcgcggcaggggctcgatgtcgaggctttcctgccgacgatgcatggcgcgcgcggcgtcgataccatcgccaagctgaacctgcccggcgtcgatccggtcgccgaggccgctgccatcaccgaggcggagatcaacgacgtcgagggtgttttcgcattgcctggtgccgcggcattcctggccgcgctgccgagcgaccgctgggcgatcgtcacctcgtcgccgcttcggctcgcgcacaagcgcctggaggcagccggcctgccgataccgaaattcatcgtgaccgccgaggacgtcgaggtcggcaagcccaatccgcaatgctacatcctgggcgccgaacgcctgggcttcagcccgagcgaatgcctggtgttcgaggacgtgcaggcaggcatcctggccggagaagcagccggttccgatgtcctggtcatcacggcgacacagcaccacgatctcgagacctcgcatccgacgcttcattcctacgaggacgtccgcgttcggatctacgaggacggcaaggtcggcctccgcaagtaatacacggactgaaaatgcccgccgcgagacctgcggcgggcatctgctcttcggctcgggagagagtgagccttagatgttggcgagcaaatcgttgatgcgtgactccatgtcggcaagcgccgcatcgatttccttctggccggtgatagcagcgctcatctcctggccgataatgtcctggatcgcgaactggcgctgaacggtcggcggcagcggggtgccgagcgtcgcgatcgccgagatcgtgtcgcggtgcggcagcgccttgaactccttggaatcgagcaccgccttgacggctggcaaatggccggtgcgcgaccagtcgaaatcgttgtcgcggaagaacttcaggaacttgccgatggcggcgacctcctcctcggagcggtccttctgcgacacagcccagctatggccgtcggcatactgcgccttcttgcccgggaagagttgcggatacggatagacggcatagccgcccttgttgagcgccgtgcccgctgtctcggacgaggcattgtagtcgccgatcacccaggtgccgttcagctgcacgccgccttcgccggccaggaacgcgttgatgctggcggcgtagtcgaggtccttgaccgtatcgccgttgtcatagatcgccttgtacatctcgaggaccttcttggcctcgggcgtattgatcttcacctgcttcggatcggcgaagaagttggaatcctgctggaagaggtaggtatagaggttgcgcgtgtagagcgcgacttcgttggcgaggttctggacgaagtagggcttgccggtcttttcgcggaactgcttggcttgtgccagaagctcttccgggctggtcggcagcttgggcgtgccgtcggcgttgacgaggtcggcctttttgaagaggtccatgttgatgtggtagagcatggtccagttgtcgatcggcaggccgtagatcttgccttccttcgtcacgccgccgaggctggcttcggtgaagtcggtcggcgcgacgcctacggacttcagcacgtcgtcgagcggcatgatcaggcccttgctctggtagtcggcaagcacggactggtggatggtgacgatgtcgggcggatcgcccgcggcgaactgcgcggtgagctggtcgtagcccggccattcgaccgtggtcacggtcacgcgcacatcgggattgtcggcgttgaacttgttgatcagcgaggtgatgataccgcactcgccgacggccttgctgacatcggtgttggtgccccaatcggcatcgcaggccccaaagaaacgttgcacggtaagctccgtggcggcgaaggccggcgttgacgcgccggcaagcgcgatcaccgacgccgccgccagcatgtatttcctcaatgtatgtgtcatgcccttctcctcctcttcggggctttgcccctttggctggcctcctcccgggaagccggtttcgacgtcaccgcttcaagcctcagcgcacggcggcgccggagaccgcggtcacgatgtatttctggaaaaacaggtagagaacgaggatcggcgcgctggcaaagacggcctgcgacatcagaaagccgaggccttcggactgcgcgaagttggtctgtgtcgatgcgatgccgaccgtcagcgtatacatttccttcttcgtgcccgagatcagcggccagaagtaatcgttccaggcgccgaggaaggtgaagatgccgagcgtcgcctgggccggaaccgtcaatggcaaaagcaccttccagaagatcttgaagcgactggcattgtcgagcagtgccgcttcgtcgagctccttggggatggcgcggaaatactgggtcatcaggaacacgccgaacggcgctgacaatccgggcaggatcagtccctgataggtgttgtggaacttcagccagctgaacaactgatggcgggcgatgagcaccgcctgttccggaaccgccagccccaggagcacgatgatgaacagcgtgttgcgatagggaaagttcagccgcgcgaagccgtatccggcgagcgacgacaacaccagcgttccgatggtaagcccgcctgcgacgatcacgctgttcagcacccagcggaacaccgacgatgtcgccaggatattgatatagttgccgatcgtgtagggcgcgttgaagacggagttcatatccgccatcagctccttgttgtccttcagcgacaggccgatcacccacagcaccggcgcaagcatcaccagcgcgcagagaatggcgaggaaaaggatcacgcggtcgcccagcgagcggccgaccatattgccacctgtcgcgagactcatccttcttctccctttcggcgcgaaatgacgtactgcgccatggcggcgacgaggatcagcatgaagaggatttcggaggcggcagcacccagcccgagatcccatttggtgaaggccgcttcgtagatgtagaagacgatcggcttggagacgttgttcgggccgccgttggtcatcagcttggcctgaccgaagagttggaactgcaggacgatctggatgatcacgaccagcgcgaaggtgcggcggatggacggcagcgtgatgtaccagagcgtgcgccagcggctggcattgtcgagcgccgccgcttcgtagatatcgcccggaatctgctgcagggcggagaggaacagcatcatcggcaggccgatgcaccaccagatggtggcgatggctatgccgatcatcgccagcttcggatcggaaagaaacgccggaggcgtggcgccgaaccagccatagatggtggcgagcaggccgaaattgccgatgaagacgatacgccagatcagcgtgacgatggtcaccgacagaaccgacgacgagaagtagatcgtgcgaagggcggccgccgtgcgcgtcttgcggttcaaggccagcgccagcatcaggccgatgatggcgagcgccgggacagtcaggagcacgaagtagaaggtgttgccgatcgcctggatgaagatcttgtcgcgaaacagcctgagatagttgtcgatcccgacgaaacggccgacgccaaaggcatccgccttgtgcaggctcagccagatgccccagaagagcggcacgatgagcagcgtcacgaagaagaacagatagggcagaacgaagatcgcgttgcgccagagcggggcgttgatgttctgcaccttcaggcgggcggaagccttggcgagcgtgccggtggctgacagcgtcgtctcagccatggcccggctcctcattgtgccaggcgcggccgtcgtcgttgaatagatgcgttctgccgccgtcgagcgtcagcccgacttcgtcgccgatcgcgacacggctgttgccgatatcctcggcgacgatgacgctgccatccgtgagcctggtatagagcagcgtgcgatcgcccaggcgttcgagcacatcgaccttgcccctggtggtggcggggacgccgttggcgatcttcaccgcctcggcgcgaatgccgagcgcatggttgccgccaccgagaccggcggcgcggatggcggtcttgagttgcgtgccatcaggcaatttggcggtgatgaagccgttctcttccgctatgccgacatcgagaaagttcatcgtcggcgaaccgacgaaagtcgcgacgaagcggctggccgggcgggagtagatctccatcggtgtgccgatctgctcgatcttgcggttgttcatgacgacgatgcgatcggccagcgtcatcgcctcgatctggtcgtgggtcacgaagatcatcgtcgacttcacgcggttgcgaagctgcgccagttcgacgcgtgtgcggacgcgcaacgccgcatcgaggttggacaatggctcgtcgaacaggaatgccttgggttccttgacgatggcgcggccgatggcgacgcgctggcgctggccgccggagagctggccaggcttacgttccaggagatgaccgatctcgagcatacgggcggcctcggccacgcgcgccgtgatcacatccgatggaaccgcgatgttgcgcagcccgaaggccatgttgtcagcgaccgtcatgtgcggatagagcgcgtaactctggaacaccatggcgatgtcgcgctggccgggtggcagcgtatcgatgcgctcgccgttgatcgagatcgtgccgtcatcgacactctcaagcccggcgatcatcctcagaagcgtggatttcccgcagccggaggggccgaggaagaccatgaactcgttggccttgatcgacagcgacaagccgtcgagcacggtcatcgaaccatagcgcttgctgacattgctgatttcgatattggccgtcatccggctgctcccaagatgcagtcggaatccgaaaatccgatatgaacacatggttggcacgaaacggctcgaatggcgcctgcctcgacgagcaggccgcccttcgtccatgatggtgccaaaacagaagcggtagctcccatcttttcctcccagtggcacgtcaaatctggtgcgtcgacgttaaatcatacaacttcgatgtcaacatatcttcgatatgtatcagatatcgtgatttataatcaggcctgcagccggatcacgcggtaggacaaaggcgcgatcttcgccgtcagcttgccatcggcgaatgcggagccgctggccttcaccggaacgacattgtccggcttttcggccgtgttggtgatggcgagatccgaatgggcaatgacctgatcgtcgatgaccttgaggttgccgaattcgagcaggctgacgtcgagatcaagcgcttccgtaccgtgacggttgacgatgaagaaggtaacgacgccggcgcccttgtcgtggacggccgagacgtcgaggtagggaacgctgccgacgtcgtcgacctcgtaagtcgggctgtcgaccatcaacttcagggccgtgccgcggccatagaccgaggcgaagtagtaggggtagaagatcgtctggcgccatgccgcgccggccggcgtcgtcatgatcggcgcgatgacgttgaccagctgcgccaggcaggcgatcttcacgacatcggcgcggttgatgaaggtgttcaggatgcagccgacctgcagcacgtcctcgaagttataatcgtcctcgagcagcgccggcgcgtgcggccagccattggcgcccgcgagcgtcgccttgtcgcgctccttggagtggtaccagacgttccactcgtcgaaggagatgtagacgtccttggtcgagcgcttcttcgccttgatatagtcgatgacgccggcaaccgtgccgatgtagttgtcgagttcgatgctgcgggcgagatagttcgccgtgttctttgcgcgattctcgaaatacatgtgcagcgagatgtaatcgacctcgttataggtgtgatcgagaacggtcgcctcccattccggataggtcggcatatgggcgttggacgagccgcagacgacgagttcgagcgagctgtcgaaggcgcgcatcgccttggcggtttcatgcgccagccggccatactcgtcggcggtcttgtgaccgatctgccaggggccgtccatctcgttgccgaggcaccagagcttgacgtcccagggctcggagcggccattggcgatgcgcttgtcgctccactcgctgccgccgggatgattgacatattcgaggaaattgcgggcttcatcgaggccgcgcgagccgagattgacggccagcatcatctcggtcttggccgagacgcaccagtcggcgaattcgtgcatgccgacctggttgctttcggaggtgtgccaggcaagatcgaggcgcgtcgggcggctttccttcgggccgatgccgtcttcccaattataggccgacacgaagttgccgccgggatagcgcacgatcggaacgttgagctccttgaccagatcgatcacgtccctgcgcatgccgttttcgtcggcggtctcgtgaccgggttcatagatgccggtatagacggcgcggcccaggtgctcgataaacgagccgtacaggcgcggatcgatgtccgagatcgtgtatttgctgtgcgcgataaccgccgccttcatgatatcctccaccatatcattttttgtgatttatatcacaatttacgatgaataaagcggaagcgtcggccgcggtcaagggcaaaattcggaaaatcggatacagtctagcgtgttttgatacgcagcaggatgtcctggtcgtaattgccgaaaccgcggccgaaaatgttgatgccgccagggtgcttggcgtcgtcgcgaacgccgatgcgcaggcgaatcgagtggtgctcgtcgagcttcagatccgaaagcgccacgtcggaaatgcgcaacccatcgacgaaggcaccctcgtcgttgatacggaagctcttcagcttgccgtattgcgagcccttcaatttccaccaatccggcgtgaaagccccacgtttgtcgccgaaatcgcccggagacgtccaggtgccgatgtcgatgccattgaccgtgagcgtgatatcggaaggccagtcggcgctggttccgggcacttccgaactcagttccatgacgaactcgatctcgcggacgcgggtgttggtcagcctggcattgttgggaaactggtattcgacatgcccgcgcgtgaaccagatcagcgccgtcttcatgcggtccggatcgaggaaagtattgggcacgtcgagcaggccgatgatgccatccaccgaacagaggccgcagggtgcggtcacatcatagctggtatagagaccaagcggcatcgccacctcgatcgcatccggttcggtttccttgatttcattcttgaagacgacgaggatctcgtcatagacgctgtgacagaccttctggttgccctttcgcgccttctgcgtctctgtgcggatcagccccgcctcctccagcatctgcacgttggtcgagacgctggactgcggcaactcaagaatatcagcgatttcgttgacgttgagagggcctttttcgtgcaggagcttcaatacggaaacccttgccggcgatgccagccccttcaggatgggcatgccttcctcgggatcgacgacaagaaaattgcggctcatgggtttccgatcgcacgtaggtaagagaataaagacctacgttacatatcagcaatctcgatagattcaatcgggacggcagcgtcgtgttacgttttcgtgacaagctgacgacaatcacctcgctcgcatgacgagcgaggtgattgcataggagcggcgttgaactccgccgtatgttatgcggccttgaccggagcctcgcctcgtctgtaggcgatcagatcctcgatggtgatcaggtgcaggccatggcgctcggcgaaatgctcgagctccggcagacgggccatcgtgccatcgtcgttcgcgacctcgcagatcacgccggaggccggcaaccccgccagtctggcgagatcgacggccgcttccgtatgcccggggcgcgacaggaccccatcgggatgggcgcgaaggggaaagatgtggcccggccgcgcgaaatcgtccggccgcgcattcgagcccaccagcgcgcgaacggtggcggcgcggtcggcggccgaaatgccggtggtcgtttcgggaatgtagtcgaccgagacggtgaacgccgtcttcaacatttcggtgttgcgcggaaccatcagcgggatgtcgagctcgtcgagacgctcgccctccatcgcgacgcaaatcagcccgcgggcgtggttcatcatgaatgcgatcgcctgcggcgtcaccttctcggaggcgatcacgagatcgccttcgttttcgcggtcgcgatcatcgacgaccacgacgatttcgccgcgcgacatcgcggcaaccgcatcttcaatcctggaaatagtcaacgtcatgcctttcaagggttagccgcttgcgcggcgtacatggccgtaaggccacaatcatcccttgggcgaacaagcatggagacgccgcacggatgcgacgttcgctgcattgctctcttccatccggactataccgtcggctccggcatctcaccggatctgctgacccttcgtttcaccgaaggcgctcgcgggctccgagtttcctcgataccgccggtggggaattgcaccccgccctgagaacgaagcgaccataagcgaatacaggcgcattccgcaagtgctggacgatccaaaccgggggcgctgaccgaacgcagtgttcaatcatttgcggccgccatggctcggatggatgcctgaaatctttatagcttttttatttgggacgccgggcgtccgtctcgaccctttatgcggatcggcagcataactcacgtgcggaccaagatcgtccgccggttgcaggcatctcgatgacctcaccgcttcgaaacatctggaaggaaatgcgaccgatgatggacatcgttctgatcggcaccgccgtgatttttttcgcgctctgctttgcctacgtcaaggcatgcgacgcactctgaaccgaggccatacgccatgatttttgactacgtgctcagcggtgcggtgacggtgttcctcgccgcctacctcacctacgccctcattcgccccgagcgcttctgaccgtcgccgctcgtattgaaagtttcgtctcatgaccctcattggatggttacagattctgctgttttgcggaatccttgtcgtgctcgtcaagccgctgggtggctatatgacccgcgtgttcggcggcgagcgcaccctgctctctcccgtcctcgttccgatcgaacgggaactttaccgcatcgccggaaccagcgagcgcgaggaccagcactggacgtcgtatacgctcgcgatgctgacgttcaatctgctcggcgtcctcgtgctctatctgctgctgcgtttccaagggatgctgccccttaatccggcgggcatgacagcggtcgggcccgagctctccttcaacaccgccaccagcttcgtcgccaataccaactggcagaactacggcggcgaaagcacgatgtcctatctcacgcagatgatgggcctgacggtccagaacttcgtctcggcggcaacagggatggcgatcgcggtggcgctgatccgcgccttcgcgcgcgcgtcgggcaaggcaataggcaatttctgggtcgatatgacccgcgtcacgctctatgtcctgctgcccatatgcatcgtgttgacgctggtatatgtctatctcggcgtcccccagacgcttggtccctatgtcaacgcgacgacgctcgaaggcgcgcaacagacgatcgcagtcgggccggtggcgtcacagctcgccatcaagatgcttggcacgaatggtggcggcttcttcaacgccaactccgcgcacccgttcgaaaaccccgacaattattcgaacatgctgcagatgctgtcgatcttcgtgatcggcgcggccttcaccaacgtcttcgggcgcatggtcggcaaccagcgtcagggctgggcgatccttgccgccatgggtgtgctcttcatcatcggcgtcggcgtgacctactgggcggaagcggccggcaacccgctgatgcaggccttcggccttggcggcggcaacatggaaggcaaggaagtgcgtttcggcatcgtcatgtcgtcgctcttcgccgtcatcaccaccgcggcatcctgcggcgcggtcaatgcgatgcatggcagcttcacggcacttggcggcctcattccgctgatcaacatgcagctcggcgaggtcatcgtcggcggcgtgggcgcgggcttctacggcatcgttctgttcatcatcgtcgccgtcttcgtggcgggcctgatggtcggccgcacgccggaatatctcggcaagaagatcgaggcgaaggaaatgaagatggccgtgctcgccatcctctgcctgccgctcgccatgctggtgttcaccgcgatcgcgagcgtgcttccctccgccgtcgcgtcggtgggaacggccgggccgcatggattctccgagatcctctacgcctatacgtcggctgccgccaacaacggctcggctttcggcggcctcaccggcaacacgccctggtacaacatcacgctcgggctgggcatgctgatgggacgcttcctggtcatcatcccggctctcgcaatcgccggatcgctgatcgccaagaagaccgtgccggcatcggcaggaacatttccgaccgacggcccgctcttcgtcggcatgctggtcggcaccatcgtcatcgtcggcggcctgaccttcctcccggccctggcgctcggccccgtcgtcgaacacctcgccatggtcgccggccaaaccttctaggtgggatcatgatcctccgtcacatcagacgaaaccagacagcacgccccagacgatcggggcgtgagcgccagccgcaggcgagaggtaccgacatcatcatcgccatgatggctgtcctgctcgttctcgcctgtgccttcaaaattctaatcggctgatcggacaggtccgatcccctcgtttcctttcgaaagctggagtctcctatgagccaggcaaaatccgcgagcatcctggatactcgcattctcattcccgccgtgggtgctgccttcaaaaagctggacccgcgcacgctcgcccgcaaccccgtcatgttcgtcgtcgccacggtttccgttctgacgaccgtgctcttcctgcgtgatctggtctcgggtggcggcgatctcggtttctccttccaggtcaatctgtggctctggttcaccgtgctcttcgccaacttcgccgaggccgtcgccgaagggcgcggcaaggcgcaggcggaatcgctgcgcaaatcgcgcaccgaaacccaggccaagcttctgaccggggagaacaggaccagctacaggacggtcccgggcaccagcctgaaggtcggcgatatcgtgctggtcgaagccggcgacatcattccgtcggacggtgaagtgatcgagggcgtcgcttccgtcaacgaggccgccatcaccggcgaatccgcgcccgtcattcgcgaatccggcggcgaccgttcggccgtcaccggcggcacgcaggtgctctccgacgagatccgcgtgcgcatcacggcggccgccggctcgaccttcatcgaccggatgatcgcgctggtcgaaggcgcggaacggcagaagacgcccaacgagatcgcactcaacatcctgcttgcaggcatgacgctgatcttcgtccttgccaccgcgaccatcccgagcttcgcggcctatgctggcggctcgatcccgatcatcgtgctcgtcgccctgttcgtgacgctgatcccgacaacgatcggcgcgcttctttccgcaatcggcattgccggcatggaccggttggtccgtttcaacgtgctcgccatgtcgggccgggccgtggaggccgccggcgacatcgacacgctgctgctcgacaagacgggcacgatcaccctcggcaaccgccaggcaaccgcattccatcctgtgcgtggcgtcagcgagcaggagcttgccgatgccgcgcagctggcctcgcttgccgacgaaaccccggagggccgctcgatcgtcgtcctcgccaaggaaaaatacgccatccgtggccgcgacatgagccatctgaaggcaaccttcgtgccgttcaccgcgcagacccgcatgagtggtgtggatatcgagggatcatccatccgcaagggcgccgtcgattcgatgctggcttacgtgaatggctctcccgcgattgccaccggcaatgccgccgtcgcgctgcacgtcaacaacgacaccgcccgcgaactccagtcgatcgccgacgaggtcgcaaagagcggcggcacaccgctcgcggttgcccgggacggcaagctgcttggggtggtgcagctgaaggacatcgtgaagggtggcatccgcgagcggttcgccgagctgcgacgcatgggtatccgcaccgtgatgatcaccggcgacaatccgctgaccgccgcggccatcgcggccgaggcaggcgtcgacgacttcctggcgcaggcaacgcctgagatgaagctggcgctgatgcgcgaggaacaggcgaagggcaagcttgtcgcgatgtgcggcgacggcaccaacgacgccccggcgctcgcccaggccgatgtcggcgtcgccatgaacaccggcaccgtcgcagcccgcgaagccggcaacatggtcgatctcgacagcgatccgacaaagctgatcgagatcgtggagatcggcaagcagctgctgatgacgcgcggcgcgctcaccaccttctcgatcgccaacgatatcgccaagtatttcgcgatcatcccggcgatgttcctgacgttctatccgcagctcggcgtcctgaacatcatgggcctgtcgaccccgcaaagcgccatcctgtcggcgatcatcttcaacgcgctgatcatcatcgcgctgattccgctgtctctgaagggtgtgcgctatcggccgatcggtgccggtgcgctgctgtcgcgaaatctgctgatctacggcgtcggcggcatcatcgtacccttcatcggcatcaaggcgatcgacatgatcgtcgcctctctcggccttgcatgatttcagggctggacgcgaggcgcccggcccacgccctcattcgaattccaggagttcaccatgttgaaacagcttcgcccagccatcgtgatgatcgttgcaaccacggcaatcaccggcctcgtctatccgcttgccatgaccggcgcggctcaggcgcttttcccgaaacaggccaatggcagcctgatcgagaaaaacggcacggttgtcgggtcggccctgatcggtcaggcctttaccggcgacacttattttcacggacgcccgtcggccgccggcgacggctacaatgcgagcgcctccagcggctccaacctcggcccgaccagccagaagctgatcgatcgcgtcaaggcagattacgaggccgccaaggcgaccaacccgaacgcggacgttccggtcgatctggtcacggcatccggcagcggccttgatccggatatctcaccggaagccgcctatttccaggtcccacgcgtcgccaaggcacgcaatctagacgaggcaaaggtcaagggcctggtcgatgccgccatcgagggtcgggaactcgggctgcttggagagccgaaggtcaatgttctcgcactcaacatgacgttggacgcaacctcgacgcagtaggtggccaaggccacctacagtagaacagcctgcgaaggaacagagcatgtccattggcgaccgcgacccgacgatcagaccgtctcccgacgccttgctcgagagggttcgctccgagatgcgcggccgcctgaaaatctttctgggcgcggcgcccggggtcggcaagacctacgagatgctcgtctcgggacatgcgaagatcgccgatggcgccgacgtcgtcatcggtgtggtggaaacgcatgggcgcaaggaaacacaggcgctcctggcaggctacgagatcattccacgtgtcgttatcagttacaaaggccggtcgctggacgaaatggatatcgacgccatactggcgcggagaccggatctcgtgctggtcgacgaacttgcccatacgaacgccgaaggcagccgccacccgaagcggtacctcgatgtcaaggaactgctcgagcgcggcatcgacgtctattcgaccttgaacattcagcacgtcgagagcctgaacgacgtcgtgcagcaaatcacccgcgtgcgtgtgcgcgaaacggtgccggattccgtcatcgaccttgccgacgatatcgagatcatcgacctgacgcctgacgatctcatcaagcggctgcatgacggcaaggtctacatgccgggcacggcggcgcgggcgctcaccaattacttcacatcaggcaatctgacggcgctgcgcgaactggcgctgcgcaagaccgcgcagcgtgtcgacgaccagctgctcactcatatgcaggccaatgcgatctccggcccctgggcggcaagcgatcgcgtgctggtgtccatcgaccaccaaccgcgttcggcggcgctggttcgctacgcctcgcgcatggcgtcgcgcctgcgctcaccctgggccgccgtctatgtcgagacgaaccacgccgtcaggctgacggacttagaagccgacagcgtcgccgcgacattgcggctggccgagcaactgggcggcgaggccgtcacgctgcccggccgcgaatgctccgaggagctgctgcgctacgcggccgccaacaacgtcacccacatcgtcgtcggcgcgcccgggaaaacctcgtggtggaagtggtgggagcgatccgacgccgacgccctgatccgtcaggccggtgagatcagcgtccatgtcatctccggcagcgagcgcgacagcaggaccgcgccgtcgggcgttcgcagcgccacacccgcaaagtcgctggatctcagggcttatgcgctcgcgaccggctacgtcgccgtggcgcttctcgtcggcgtcgtccttgatcaggtcctcgacgtcaggaatctcgctctggtgttcctgatgtccgtgctgacatcggcggtccttcatggtctacgccccgcgctctattcatcgctgctcggcgcgtttgccttcaatttcttcttcctgccgccgcgatacacgctgacgatcagcgatccggaaagcgtgctggcgctgtttttctttctcggtgtggcgatcatcgccagcaatctcaccgcgaccgtgcagcgccaggccgccgccgcgaggcgccgcgcccgcaccaccgaggatctctacctgttttcaaagaagctcgcgggcaccggcacgctcgacgacgtcctgtgggcgacggcgtttcagcttgcctcgatgctcaaggtgcgcgccgtcctgttgctgcccgagcaaggatcgatcgcggtcaaggccggctatccaccggatgacacgcttgacgatgccgatatcgccgccgcccgctgggcctgggagcacaatcatgccgcgggacggggtgctgatacgctgccgggggccaaacgtctctatgtgccgctcaggaccggccgcgccgccgtcggcgtgatcggcctcgacagtgatcgccgggacggaccgctgctgacaccagagcagcagcggctgctcgatgcgctggccgaccaggcagcgctcgcgatcgagcgcatccaactggtcgccgatgtcgaccgggcgaggcttgcggcggaggccgaccggctgcgctcggccctgctgacctccatctctcacgatctgaagacaccgctcgccgccatactgggtgcggcgggcaccttgcgcgactatctcgattcgatgaccgcggacgatcggctcgatcttctcgcgaccattgtcgacgagtccgaacgcctgcatcgtttcatcgccaatctgctcgacatgacgcggctggaatccggcgccatggagccgaacgcgacgccgcatttcgtcggcgacattgccgggggtgcgcttcggcgtggcgcgaagatcctcgcgcaccacaagacggaaatgacggtcgcttccgatctgcccatggtgcgcgtggatgccgtcttgcttgaacaggtgctgttcaatctgctcgacaatgccgcgaaatattcgcccgagaactcgacgatcacgatcaccggccgggcaaacgcctacaacgtcttcgttcaggtctccgacgagggccagggcattccgccggccgatctcgaacgcatattcgacagcttctatcgcgtccgcaagggcgaccaggttcgggccggaacgggcctcggcctatcgatttgccggggcttcgtcgaagccatgggcggaacgatctcggctgaaaaccgaagcgaccggcggggcgcgcgcttcaccgtgcagctgccgatcgccatcgacattccccaactggatgatctcaaatgacaggcatggccattacaattcttgtcgtggacgacgagccgccgatccgcaagcttctgcgggtggggcttacggcacagggttacacggtcgcggaagccgccgacgccagttcggccaaggaatacacacgccatcagatgccagacctgatcatcctcgacctcggcctgcccgaccagcatggctacgaactgctgcaggagtggcgtcaggcggggcttgccacgcccgtcgtcatcctctccagccgcaccgacgaaacgggcatcgtccgggcgcttgaaaccggcgcggacgactacatcaccaagccgttcggcatgaacgagctcggcgcgcgcatccgcgtggcgctgcgccatcggctgcaacagcagggcgagcgtgctgtcttccagaccggcggtctttcaatcgatctggtgaagcgcatcgtgaaggtggatggcaacgaggtgaaattgtctccgaaggaatatgagatcctgcgtatcctggcgcagcatgcgggcaaggtcctcacccaccagttcgtgctccggcatatctggggaccggcggccgatgttcagtatctgcgcgtctacgtcaggcagttgcgccagaagatcgagagcgctcccgaccagcctttctacatcaccaccgaaaccggcgtcggctatcggctgcgcgaacccgacgacatcaccgacacgccaagaccggggcaaggtctgatcggaccgacatgacaatgaacctcacgaccatatttcttcccgatgacgtcctcttcgacgtggcacagcagaacaagacgaacgtgttgcgctttgccgcaacgacggcgtcacggacgttgggcgtggacccggttgcgctgttcaccgtgctcgaagcgcgtgaattgctcggttcgacgggcatcggccgcggcatcgcggtgccacatgcagcgcttcccgatctcgggccgccgcgtggtttcatcctgaaactggcgcggcctctggatttcgatgccatcgacgaacagccggtcgatctggtcttcctgcttctttttggagaaaggtggcgctcggaatacctgaaggtgctggccaccattgccaggaaggcgcacgacagcgcggtgctcgacgccatgcgacgtgcgacgagcgccggcgacctttacgggtgcttcgccggccccgaaccacgagacggcgcgctgacgatcgccaagacatagcctggaaagcatcgcgcaccttcctgaatcgcctgaaccttctcctcccgcgatcgttattgctgctatgagggacgttaggacaaaaagagcgccgcctgacaacgatgaaccggatgccacaggcaaatccgatgcggcggcgacgtcgaccgacgtggaggaaacgccccctgccccggaagaacccgacgagaaactgacgccggaggagttggagcgcgcccgcaaggcctatcttctgaagcggttctggatcagcgcgcgtggcttctggggccgcaagggtgacaggtttgcctggccttgctgcgtgggcctgcttgtcctcatcggactgaatgtcgcgtttcagtacgggatcaatgtctggaaccgcgaactgttcgacgccattgaacagcgcaacgccccgacggtctatttcctgggtgccgtgttcccgccgctggttctcggaagcgttgcgcttgtcaccatccaggtctacgtccgcatgatgatccagcggcattggcgatcgtggctgaccacggcgctcatcgcccgctggctcgacaatggacgctattaccaactgaacctgatcgatggcgatcacaagaacccggaggcccgcctgtccgaggatctgcgcatcgccaccgaatcgccggtcgacttcgttgccggcgtgattgcggcgttcgtctcggcatccaccttcatcgtcgttctctggatgatcggtggcgccttgtcgttgcccatcggcggcatggtgatcacgatcccgggcttccttgtcgtcaccgcgatcatctatgcaatcaccacctcgagcgcgatcgcgttcatcggccggcatttcgtcaaggtgtcggaggcaaagaaccaggtggaggcggagtttcgctacacgcttacccgcgttcgcgaaaacggagagagcatcgcgctcctcggcggtgaggaagaggaacgcaacgacctcggtaaaacgttcggtaacgtccttcgccaatgggcgctgcttgcgcggcaatatatgcgcaccacgctggtctcgcacgggtccatgctgatcgcgcctgtcgtgccggtcctgctctgcgcgccgaaattcctcgatggcagcatgacattgggacaggtcatgcaggcggcgtcggcattcacgatcgtccagggcgcgttcggatggctggtcgacaactaccctcgcctcgccgattggaacgcgagcgcgcgccgcgtcgcatcgctgatgatgtcgatcgacggcttgcagcgcgccgaacagagtgacacgctgggacgcatcgagcacggagaaaccgcgggcgacgtgatgctgagcctgcataatctgtcgatctcgcttggcgatggcaccgcggtcgtcaaggaaacagaagtcgagatagatcaaggcgagcgggtcctggtggcaggcgaatccggctccggcaaaagcacgctcgtgcgcgcgatcgcgggcctctggccgtggggaaccggcagtgtcaactttcacgcggacaggcagcttttcatgcttccgcagcggccatacatcccctccggaaccttgcggcgcgcagttgcctatccccgcgccgccgatagctgggagctcgatgacatcaacgcggctctcgacaaggttggcctcggccatctcaaggacaagatcgaggaagacgcgccctgggatcagacgctgtcaggcggcgaaaggcagcggctcgctttcgcgcgcctgttgttgcacgatcccgatatcatcgtgctcgacgaagcaacgtcggcactcgatgacaagagccaggaccagctgatggaattgctcgtcggggagctgcccaatgtcaccattctcagcgtgggacaccgcgcggagcttgaagcctttcacagccgcaagatcacgctggaaaaacgcaatggcggcgcccggcttgtcagcgacgtcgatctcatgccgcgcaggaagagccgcaacgtgatctcgcgtatactaaagcaccgaagtcgtcctcgcaaaagtccggcgggctagcggctgttcgacgcaatgagcggctcgacgatgtcgccgatgatcgccagcgccttggcgcgcgcacgctcatcgtcgggcgcctcgaactcggcaagctcgatgcccgcgatccgttcagccggtatcgcctccagcagcgagcgaagctcgcccggcaacaggccatccgcgatccggtaggcggcgggaacatgatcgggttcgagcgcgtcccagtcgatgtgtatccagaccggggcgtcgccaatgaacgacagcacggcctccagatcgatcgagcccgccatcaaggtgacgcgggcgctttcgagcagttcccgctccgccctgtcgatgtcccggatgccgatgatggccacatccgacgccataacctccgagccatgcccgctttcccagaggccgcaagcgccggccaaagccattccgccgagataaccggatccggtcgtcaccggcgtgttgaagtcgccatgcgcatcgacccagagcatcttgaggcccggaatggtgcgcgccgccgccggcagcgtggccagcgcggccgagcaggtgttgacgctgagcaacggaatatcgccggcatcgatcgccgcgaccacctcacgggcaagcccgctcaacgtctcgttggcggcgggcaggctgacgctccagtcgtccacccggtgctcgctttcacgtccgacgacgtgagcctcggtggagagacgaacggccagcatgtcggaacaagcccgcgcgccggctatggcatgcggtgtccggtcgccgatgcggccttgcgatgtgatcaagcgaaacggtcgattgcgcatggtattccgttttggttggctgtctgaatgggcgaggcgaattgccactggctaggcaaaattccgatgttaatcaagcggttcgttgcggcaatacgatcgtccacgctggcgtcccgtcagcagtccagccattagcggcagcgcggccattggcgtcgctggatgttcgggtgtcgccgcctcagctcttggcaacgggcgctgctggcagaagcctgccgtcgaagatcattgcgatggcgcccatccgagcgccgcgggcctccaatggccaatgatgcatcggaccagctccgggacgatatcgtcgcgaacaaaatcaaggctggggcgttgatcccatgtggtttttcgaaaaggagcaatccgatgaagagaacgctaggcgcggcaatggccgcaatattcatcgtcgcgggcggcctgagcccggcaatggcgcgcgacaacaatcatcgcgacaacaccggacgggcgatcgccggtggcgttgctgccggggtcgtcggcgggttgatcggcggggccatcgccaattcgcagcctcgctacgccgagccggcgccacgtccgcgctgctggtatgaagatcgtgaggtcggaaacagctatgacggaggatcccatgtcgaaacggtgcgcgtctgccgctagcctcctgcgctacgtctatgcggggaaccgctccgcatagaccggcctcaccgcaaagtgtgggttgaccaccctgcgtggcgaggcgacaatcagctatggagaacgcgaggaggacctgatggaagcagaacgctggcgccatatggagagcgcgcccagggacggaagccggatcctggtgaccatctatccatccgaacagggaccgggagaagtcgatctggcatattggtcagctggcgatcgttctggcggcgaagggtggcgcgcatcggattcctcacccgggcgtgtgatcgaatatgcggagcccgagctgaagtgttggatgccaatgccatcagccaatctcgaccgcgcttccatgccgctaccctgggaagtcgacgacgctttgcaactggatggttcgggcatctagcgggcctgtaacctgattgcggagcccgaccgcagggcggcccttcacattcgcgacgatggcggtaaggtggcgcccggcagggaggccgcatgatcgacaaactggaattcttcatcgccgtcgccactgaaaagcatttcggccgcgccgcccaggaatgcggcatatcacagccctccctctccgccgccattcgccagctcgaagaccagctcggcgttattctcgtgcagcgcggctcgcgctttcaagggctgacgccggaaggacagcgcgtgctcgaatgggcgcgcaggattgtcggcgacgcgcgcaccatgcgccaggaaatgcgcgccgcccgcgcgggcctcgccggccatatccggatcgccgccataccgaccgcgctctccatgttgccgcaattgaccgcgccgtttcaggagcgccatcccgacgtcaccttttcgatcgtctcgcgcaattcgctccaggtgctgagcatgctcgagaatctcgagatcgacgccggcataacctatctcgagaacgagccgctcgggcgcgtgaccagcgttccgctatacgccgaacagtataatctcatcaccgccgccggcagcccgctgtcggatcgggaaagcgtcacctggaaagaggtcggcgacatcaggctctgtctattgaccgccgacatgcagaaccggcggatcatcaaccagttgctggccgaagcaggcgcaacggcgcggccgaccctcgaatccaattcgatgatcgtgctgttttcgcatgtacgcaccggccgctgggccagcatcatgccgcgcaatgtcgcgaaatcattcggctttccgtccgaaatccggatgatcccgattgtcgagccacaggcgcatcacgtcgtcggtctggtggcgacgcatcgcgaacccttcacgccgctggtctccgcgctgctgcatgaggcgcgcaccctcgtcgacagaccggaatttcaataggaaaatcctatcgaccgacgagacagctttattgatcgcttcgtccttccctgaaaaagtcctataatgatttgacggcccatgtcgtcggccggggcttctggaggaggcttgccgaatgtccgcggggtcgctgcttgtctgggagggcagctgatgaatattcatgtcgccaagggcgatatctccgatcaggtgcgtgacatcgtcgatcgtctgaagacgctcgaagggccgatgctgccgatcctccacgagatccaggacgtgttcggctatgtgccgcaggaggcgctgcctgtcatcgcgcacggtctcaacctgtcgcgggccgaagtccacggcgtcgtcaccttctatcacgactatcgcagccatccggccggccggcatatcctgaagctctgtcgggccgaatcctgccagtcgatgggcgcagaccgtctggcggagcgcgcgaaggcgatgcttggcatcgactggcacgggacgacgcccgacggggccattacgctggagcccgtcttctgtctcggactctgttcgtgctctccatcagcgatgatcgacggcgaggtgcatggccgggtcgatctcgccgatctcgaggagatcatcgcggaggcgcgccgatgactgtcaggatctatgttccgcgcgatgcggcggcagtggcgctcggtgccgacaaggtggcggcggcggtcgccaaggagatcagcgatcgcggtctcgatgcggtgatcgtccgcaatggctcgcgcggcatgcactggctggaaccgctggtcgaagtcgaaatcgcgggtgagcggatcggctacggtccggtaaagacgcgggatgtcgtgtcattgttcgatgcgggactgctagcaggcggggatcatcggctctgtcttggcgcggtcgaggagatcgcgtttttcaagcggcagacacgactgactttcgctcgctgcggggtgatcgatccgttgtccctcgtcgactacgaggcgcatggcgggctgtccggcctgcgccgtactgtcggcatgcagcctgccgatatcgtcaaggacgtcaccgattccgggctgcgcgggcgtggcggcgcgggtttcccgaccggcatcaaatggaagaccgtgctcgacgcaccgggtgcgcgcaaatatatcgtctgcaatgccgacgagggcgacagcggcaccttcgctgaccggatgatcatggaaggcgaccccttcgtgctgatcgagggcatggcgatcgcggggctggcgacgggagccaccaaaggcttcgtctatatccgctcggaatatccacacgcgatcgccactatgaccgaggctgtcgagatcgcgcgacgggctggcgtgctcggcccgtcggtgctcggctccggcaaggcattcgacgtcgagatccgcaccggcgccggcgcctatgtctgcggcgaggaaacggcgctcctgaacagcctcgagggcaagcgcgggatcgtgcgcgccaagccgccgctgccggcgcacaagggtctgttcggctgtccctccgtcatcaacaacgtgatctcgctcgcgtccgtgcctgtcatcatggacaagggtgctgcctattatcgcgattttggtatggggcgctcgcgcggtaccatcccgttgcagatcgccggcaatgtcaggcatcccggcctttatgaggtggccttcgggctgacgctgggcgagatcgtcgatgagatcgccggcggcacggcatcgggacgaccggtcaaggccgtgcaggtgggcggaccgctgggggcgtatttcccacgcgcgctgttccacacccccttcgactatgaggcctttgccgcgaaggacggcttgatcggccatgccggcatcgtcgtcttcgacgacagcgccgacatgctgaagcaggcgcgcttcgcgatggagttctgtgccgtcgagagctgcggcaagtgcacgccctgccgcatcggctcgacacgcggtgtggaaacggccgacaagatcgccagcggcatcgagccggagaagaaccgggcgctgctgacagatctctgcaacacgatgaagttcggttcgctttgcgcgctgggtgggttcacgccttatcccgttttgagcgcgatgacgcattttccggatgatttcgcgccggcgccgatggtggaggctgcggaatgattgacgctgcattgaccgtctattcccctccccaacccctccccacaagggggaggggcttggaacgccgcgcgcttcccgttctcatctcaacgcttccacatgcgggaaagccgctgcagtgcgatgaccgcgccgcagtgaagcccctcccccttgtggggaggggttggggaggggtcttagcgccatccacgacagcagatcattctcttacggaggcacaccatgtccctcgttcatgaaatcgactacggcacgccggcctccgcctccgagaccatggtgacgctcacgatcgacggcaatcaggtgacggtgcccgagggcacatccatcatgcgcgcgtcgatggattctggcatcgagatcccgaagctctgcgccaccgacatgatcgacgccttcggttcctgccggctctgtcttgtcgaaatcgagggtcgcgcgggcctgcccgcgtcctgcaccacgccggtcgcggcgggcatggtggtgtcgacgcagacgaaccggctcaaggacgtccgacgcggggtcatggaactctatatttccgaccatccgctcgactgtctcacctgtgccgccaacggcgattgcgaactgcaggacatggcgggcgcggttggcttgcgcgatgtgcgctacggctatgatggcgagaaccacgtcaaggcgcgagacaatggcgggctcaacgccaaatgggcaccgaaggatgagagcaatccctatttcaccttcgatccggcgaaatgcatcgtctgttcgcgctgcgtgcgggcctgcgaggaagttcagggcacgttcgcgctgaccatcgaggggcgcggcttcgattcccgcgtctcggccggcatgcacgaggacttcgtctcgtcggagtgcgtttcctgcggcgcctgcgtgcaggcgtgcccgacggcaacactgaccgagaagtcggtgatcgagatcggccagccggagcattccgtggtaacgacttgcgcctattgcggcgttggctgctccttcaaggcggagatgcgcggcgaggagctggtgcgcatggtgccgtggaaggatgggcaggcgaaccgcgggcactcctgtgtcaagggccgcttcgcctacggctattccagccacaaggaccgcatccttaatccgatggtgcgcgagaagatcaccgatccctggcgggaagtgacctgggacgaggccttcgcgcatgtggcctccgagttccggcgcatccagtatcagtatggtcgcgattcgatcggcggcatcacctcatcgcgctgcaccaacgaggaaacctatctcgtgcaaaagctggtgcgcgccggcttccgcaacaacaatgtcgatacctgcgcccgcgtctgccattcgccgacaggctacggcctcggccaggccttcggcacctcggcgggcacacagaatttcgacagcgtcgaaaagagcgatgtcgtcgtcatcatcggcgccaacccgacggatgggcacccggtcttcgggtctcgtctgaagaagcggctgcggcagggcgcaaagctgatcgtcatcgatccgcgccgcaccgatatcgtccgctctccgcatgtcgaggcggcctatcatctgccgttgaagccgggcaccaacgtcgccgtcatgacctcgctggcgcatgtgatcgtcaccgaaggcttgttcgacgagcgcttcattcgtgagcgctgcgactggtcggaattcgaggactgggcggccttcgtcgccgagccacaccatagcccggaggcaaccgaggcgctgaccggcgtgccggcggagatgctgcgcggtgccgcccgcctctatgccaccggcggcaacggcgcgatctattacgggcttggcgtgaccgagcacagccagggttcgacgaccgtcatggcgatcgcaaacctcgcgatggtgaccggaaatatcggccgtcccggcgtcggcgtgaacccgctgcgcggccagaacaacgtgcagggctcctgcgacatgggctccttcccgcacgagctgccgggctatcgccacgtttccgacgaggcgacgcgcgatatcttcgagaaactctggggtgtcaaaatcagcgacgagccgggcctgcgcattcccaacatgctcgatgcggccgtcgacggctccttcaaggggctttatgtccagggcgaggatatcctgcagtccgatcccgacaccaagcatgttgcggcggggctggcggcgatggaatgcgtcgtggtgcacgatctcttcctgaacgagaccgccaactacgcgcatgtcttcctgccgggctcgagtttccttgagaaggacgggaccttcaccaatgccgaacgacgcatcaaccgcgtgcgcaaggtgatgagcccgaagaacggctatgccgactgggaagtgacgcagaagctggcacaggcgatagggcttacctggaactacaagcacccgtccgagatcatggacgagatcgcggcgacgacgccgagcttcgccatggtctcctacgactatctggaaaagatgggctccgtgcagtggccgtgcaacgaggcgcatcccgagggatcaccgatcatgcatgtcgatggttttgtgcgtggcaagggcaagttcatccgcaccgaatatatcgccactgacgaacgcacaggaccgcgcttcccgctgcttctgacgacggggcgcattctcagccagtacaatgtcggggcgcagacacggcgcacggaaaacgtcgtctggcattccgaagataggctggaagtccatccgcacgacgccgaacaacgcggcatccgcgatggcgattgggtgaagctcatgagccggtcgggcgatacgacgctgcgcgcgctgatcaccgaccgcgtctctcccggtgtcgtttataccaccttccaccatccggacacgcaggccaacgtcatcaccaccgacttctccgactgggcgaccaactgtccggaatacaaggtcacagccgtccaggtttcaccgtcaaacgggccgacggattggcaggtcgagtatgacgagcaagcgcggcagagccggcggatctcgggcaagctagaggcggcggagtagacgatgtcacacggcacccacgacaagcttgtctacatggccaaccagatcgcgggcttcttcgcgacgcagcccgatgccgaggccgcgcaaggggtggcctcgcacatcaacaagttctgggagccacgcatgcgccggcagctgttcgagatcatcgaacacgaggacaagacgctcagtccgctggtgctgcgggcggcacccctgatcaagaaaccggcgccggtcgcgccgcccaatccggagacgatcggctgacggcatggcacctcagcgtttgcgggccttgggtcgcgaacgcctgctggtgcggcatcactccggcgttgcggccggctcgcgcttcgcctcgcctgttcgcggtatatgagataggccgaaggatcggacgcgagcggcgctttgcatgagttgggcgaacgaccgctcgcttattccgtccgccttgttcaattgggcgatcatcagatcgtcgagcacttccgaaaccgtaaaatccagatccactgtttgatcctccgccagtagacaaatcactatcagcggaaagcggcggagacgtgtaccggaaagtcacatctaggttacccgtttggacgttatgcctgtgtgctcggtcatgggcgctctttttcgcgacacgcgtcgtataccgagcttgcctccggagggaggctgctttagctccttgatggaatggagcaggcaaatgatatttctggtaattgcggtcccgatcgtcgtcgtgtgttttcttctggctccccgaccgacattgatcgctgtagcgtgcatgcttctagtgggcgccggcgttggcctctacgtctacttccagcagaccgaccgaaatagtcttgcagcgctcgtttcgggaacaagcaccggcggtcagggctgccccgatccggccaagtcggttttcgtgacgttggcgaacgcttccgacaggcaggtcaacgtggtccgcttcagattgatcgccaagcgctccggccatagcagcgaagtctattcggactacttcacgaccgacaagatcatcgagccgcgcagcgagttcggcaattgctggacgctcaacccctatcgcggcctcgacacattgccgggcaagccctcccccgccgatttcgactggtcggtggagatctcgtcggtcgatttcgcggccaggccatagcgcctgctatcgggcctgcagaataaggagccccaccacaccgagaaggctcatggccgcgagcgagaggacgccggccaatagaacgcggccaccggaggcgaacactgtgcgcatattcaccgataggccaagcgccgccatggacaccgtcgtcaggatcgtcgatgccgatttcgcggtgtcgaccgctcccggtggaataaggccgaggctgcgcaagcacatcatcgcgaagaagccgacgatgaaccagggaacgaggcgagttgcggaaagccaagctccgccagtgcgttggccgccgtttttcagccgcagcagcaacaccacgggaccgagcatgagaacgcgcatgagcttgaccagcgtgccgacttgaacgctggcggcgccgatgggcgcggtggcggccagcacctggggcacggcataaaccgtcattccggcgaacacgccatattgccactgcgtcatcccgaaggccgaaaacaaccacggcagcaacaggacgaccaggattccaagcgccgcggtaaaggcaatggacgaagccacgtcatcgaagtccgcgccgatcacgggagcagccgcgacgatcgccgaattgccgcatatggaattgccgcaggcaacgagcgtcgccagatgatccgtcaggccgagcaggcgacagatgctgtagctgatgaccagggagagcatgacagtggcgaacacgacggcgaccatcatcgttcccgcatcgacaaccgtccggacactgatcgaagcgccaaggagcacgatcgccatttcgagcaggagcttgctcgaaaaatccacgccggcgcgcagtgaaggcgcgagcccgacgacactgtgatagatcgtgccgagcaggatggcgaagacgagcgcatccatcagttcatagccgaataccgctttctccgtgaaagcgatcgcctgcgacatcagggtgacaatgacgctaacccccacgccgggaagaatttccaccaaaccagacctgcgcaattgaaactctccggcattgatcgcccgaagaaaataaagctcttcatcattcctatccatagaataataaatgacattttattcgacataaatgaacggttcgcgagcgctggcgagccatggaacaagccgcgtgcgcgatcattaacctccggtcagccgcgacaggagacggaagcaatggcaaaggacgttacaaatcgcagggcgaaggaacatgtcgacgatgaccagaatggtgtgatcgttgctggacccgaagcgcatgcgcgcgagcacgccggaaaagacccggcgcacaagatatcacccgagaaagacaaggccaccgcgaagcctgtcgcgggcgggcgtggttccaaaaacgccaaatagggtggcaggcgccgagacgagaggcgacctgtccaaacgtaaaaacctcccgtacgctatccgcgcgcgggaggttccttttcaaggcctgctgtaggccgtttcgcttcagttggtcaggtcgaagcggtcggcgttcatcaccttcgtccaggcagcgacgaagtccttcacgaacttctccttgctgtcgtcctgagcatagacctccgcataggcacgcagcaccgaattggacccgaagacgagatcggcacgcgtcgcggtaaagcggacggcaccggtcttgcgatcgcggatctcgtacgagttgcggccggtcgggacccaggaataggtcatgtcggtcagcgtgacgaagaagtccgtggtgagcgctccaacctgggacgtgaagacgccatggttcgagccgccatggttggctccgatgacgcgcaggccgccaacgagagccgtcatttccggcgccgtcagacccatcaactgggcgcggtcgaggagcagttcctcggcgctgaccacatagtgctccttctgccagttgcggaaaccgtcggccagcggctcgagcggcgcgaagctctcggcgtcggtctgctcggcggtggcgtcgccacggccggccgcgaatggcacctggatatcgaagccggcagccttggccgcctgttcgacaccgtaattaccggccagcacgatgacatcggaaaccgaagcaccgcttgccgccgcgatcggttccagtacggcgagaacgcgggcaaggcgttccggctcgttgccggcccagtccttctgcggcgccaggcgtatgcgggcgccgttggctccgccgcgattgtccgaaccgcggaaggtgcgggcgctgtcccatgccgtgctgacgaggtcggagacggagagaccggacgcggcaatcttcgccttgaccgccgagacgtcgtagctcgtgctgcccgacgggaccggatcctgccagagcagatcctcggccggaacatccgggccgatgtagcgcgccttcgggcccatgtcgcggtgggtcagcttgaaccatgcgcgcgcgaaggcatcggagaatgcggcgaagtcgtcgcggaagcgcagcgagatctcgcggtagatcgggtctacgcgcaatgccatgtctgcgtccgtcatcatcgggttgagacggatgctcgggtcttccacatcgacgggcttgtcggcatcggcgatcgagatcggttcccactgggtggcaccggccgggctcttgaccagatgccattcgtgcttgaacagcatttcgaagaagccgttgtcccatttggtcggctcggtggtccaggcgccctcgatgcctgaaaccacggtattgcggccgatcccgcgtcccttggtgttcagccatccgagaccctgggcttccggacccgccgcttcaggatcggcgctgaggtcggcgggattgccgttgccgtggctcttgccgatggtgtgaccgccagcggtgagtgcaacggtttcctcgtcgtccatgcccatgcgggcaaaggtctcgcgcatctgtgcggccgtggcgagcggatccgacttgccgttgacaccctcggggttgacgtagatcagacccatctggacggccgcgagcgggttcgaaagcgttgcgggctttgcgacatcgccatagcgaccatcactcggcgcaagccattcctgttcgtcgccccaatagacatccttttccggctgccagatatcttcgcggccgaaaccgaagccgaaggtcttcaaaccggcgacgtcataggcgatcgtgccggcgagcgcgatcaggtcggcccaggagatacggttgccgtacttcttcttgatcggccacagcaggcggcggcccttgtctgtgttgacgttgtccggccacgaattcagcggtgcgaaacgctggttgccggtgttggcgccgccacgaccgtcggccgcgcgatacgagccggccgcgtgccaggtgacgcgggccatcatgccgacatagctgccccagtcggccggccaccactcctggctttcggtcatcagcgccctgagatcggctttcagtgcctcgacgtcgagcttcttcagctcctcgcgatagttgaaatccttgccgagcggattggtcttggtgtcgtgctggctgagaatgtcgaggttcagcgcgttgggccaccattgcatgacggatttgccgagtgccgtgttgccaccgtgcatgaccggacacttgccggccgattgtgtcttcgtgtccacgttaactctccctaaaattcgaactcgggttgacgtcgcgtgccaattgttcttcgcgggccagggaaccggctggcggttcaagccccgagatagggaataagcaactccctcgataaattccaattgtatattctaaagagtctgatagcttttaattatgattggcctatccatgaagcatctccgctatttcgaggctctggcgaggcttgggcatttcggccgcgccgccgaagcctgctcgatttcccagccggcgctatccgtacagatacgcgaactcgaggagttgatcggcgcgccgctggtggaacgtggtggcaggcagatcaggctgaccagcctcggcgaggaatttgccgaacgcgtgcgcggcattctgcgctcggtcgatgatctcgcggaactggcgcgcgccacgcggacaacgcttgccgggcggcttcgcatcggcgtcattccgacgattgccccctatcttctgcccgatgtcatcaagactctgacgcagcgttatcccgggctcgacccgcgcccacgcgaggcggtcacccagcggctgatcgaggatttgcacgaggcaaggcttgatgcggccatcgtcgccctgcccgtctccgagccgacgctcgaggaaatcccgctcttcaacgaggagttcgttctggtgcgcccgctcgaggacgccggcaagccggttccaagttcggaaatgctgcacgcgatgcgcctgcttcttctcgaagagggccattgtttccgcgagcaggcgctgtcgttctgcaacatcgccgccgcgccgcctcgcgaactcatggaaggaagctcgctgaccacgctggtgcagatggtgggcgccggcatcggcgtcaccctgctgccgcagatggcggtgcgtacggagacacgctcggccgatgtcagcgtgttccgcctgctggaaccccgccccttccgcacgatcggcatgatatggcgcaagaccaatccgctggtatcgcaattcgggccaatcgcggaaatcgtccgcgaagccggtgctcgcagaacttacgaattcgaagatctgtcgcagtcaccgcccgcggtcatgtttgatgtgtccagtcggagctgaaaatcaggctcggccatgatgcggaagacttgacggagaaggccggcccttgccctgccaggggcgttggcggtagtgtcgcccggcatcgcgacggcaacccttgcggcatgaccggcctcttacggggacgcgcgcggatgatgcgtgacttgcgaggaagcgtcgtggatacacctcctgttgtgatcgactatgccggcgtcatccagacgtcgctcgcgccagtctttctgttggcgggtaccgcggcctttgtcgggatctacgccacccgcctcggacgcgtctcggaccggttgaacgaggtcgtcgagaaagacattccggacgacaggcgacagcggcaactcatctatcttcgtcggcgcacgctggttctggagatcgccgtcattctcggtgtcgttgccggcatcagcacctgcggagcgatccttaatctcctgtccggcgcgctcgatatccgcatccggcctttgaaccttttctggttcttcggcaccgctatcgtcgcgctcatgctgtcgctcatcgccttcctgctggaattgatcgcagctggccgcagcatcctcctccagatccgcgacaacaatcgtgaccccggggtgggctcctagaagccgatttgctccgcacgcggaaatacggaatttccgacgattgagcttcagttgatacggatgccgcccttgcggtcgtcgatcgcctcttcgagagccagcatacccgcgaagacggtgacggaaacgagcacgccgagcgtggcgtcggatgcataatgagccccgaccacgacgcgaagggcggcggtcgtgaccgaggcgatgatcaccggaggcgctatccatgtgcgatatcgcggcggcaacagaaggagaaggccgatcagccaccccgccccggacgcctcgccggagatgaacgagcaattgcgttcgcatgcccccccgaacgatcccgctggcatgaatgtcatctgcccaccaaacaggtctgtttgtgacggacgcggacggccgaattgctccttgaaaagcaggctcgtgatcaagccggcgctcacacccaggcttgccagagagagccagagccggcgcaccggcaggtaattacggaccctgcgcgacacccccgccaaaaccagggcggccaggatagtcgctgcagccacgtagggcaaagcgtaaagggtccagcgaagggttctcgcccaggtctcggcgccgatcgtgaaagacccgcacgaattccccggcgatagttccatgcagagcgggctgctgaagaacaacgccgaaatcttgatgtcgatcatcggccaagcgtgaaagatcgccagcagcgagaaccatagcgccaccaggatgaaaaacgcctccgcgtatgtccgccgacgggcagcgatttgcaatgtcatcatggtcggctctcttcgccaaaagatatgccggccatatttcgtcatcgcctgacgtgaacctgaacgctcgctctcaattccttacgaattggtcacgaatccgtaagcagtgcgtgtgaacgcacagtgtcagagcattcccgcatgccgggagccgagcttcctcgtccatccaagtccggcgaccgtttcccccgccggccggtactcgcaaccgacatagccctggtaaccgagctcatcgagcgccgcgaatatcctgaaatcgtcgagttcgccggttcccggctcgttgcgcttcggcacggaggcgatctgcacgtgcccgatgagaggcatcgcctgttcgaggccgacaagcacgtcgccatggatgatctgccggtgatagatgtcgaactgcagcttgacgttgcgatggtcgagatcggaaatgaagccgatggcgcgattgaaatcgttcaggaaatagccgggcatatcgcggccgttgatgggctcgatcaccaggccgataccgtcccgcgccgtcgcgtctgcggcataggctagcgcgtcacggtaggcggcgatggcagccgtatcgttcgcatcggcgatccccgccatcatgtgcaggagcggcgatcggatggtcctggcgtagtcgatcgccttgcgcaccccatcacggaactcgtcgcggcgttccggtaaggccgccaggccacgctcgcccgtggcccaatcgcccggcggcatgttgaacagtgcctgcttcaacccggccgcgtccagcttctcggcgatgacatcggcggggtgatcataggggaaaaggtattcgacggcttcgaagcccgcatcggctgcggcctggaaacggtcgagaaaagcgtgctcgttgaacatcatggtgaggttggcggcaaaacgcggcatatcaggcctccttgtccatgccgggcagttgcagccctgcaatcgaagccagaagacgcgcgacggaggaatcatcgtcccgccccatgccggccgcctccgtcatgacgaaaagctgcagggcggcgctggcgatcggcagcggaaatttccgttggcggccgatgtcggagacgatgccgagatccttggtaaagatcgagacggcgctgtggggcgtataatcaccggcaaccacatgcggaatgcggttttcgaacatccagctgtttccagccgacttggtgatgacgtcgaagacccgggatatgtcgagcccgaggctcttggcgaaggtgatcgcttcgcaggcgacggcgatatggacgccggcaagcagctgattgacgatcttgaaggatgatccgataccgacgtcgtccccgagttcgtagaccgtcgccgccatggcgtctagcgccggccgcgctgcggcaaagctctcgggcgaaccggacgccatgaaggtcagcgcgccggcatccgccttgaccgagccgccgcttatcggcgcatcgagataaagtacgccatgttcgccggctctgcgcgcgaattccttggcctccgccggggagatggtagccgacgatattaccacggaaccaggcgtcagcgcggcaacggcgccttcggggccaaacaaaacagcttcggtctgcgccgcattgatgacgacgacaacgacgatccccgcatccctcatagccgcggccggcgtggtgaacggcgagccgccggccgcctcgaggctgcccagagccgcctcgctgatatcgcacccggagacggtgtggccggcacgtagcagcgagcgtgccatgccaagccccatcgagcccaatccgacgactgcgacgtgggtggatgcggtcatcatcgcttgttcctttcaaatccgcgcatcaatatcgagccctggacaggcgaaagcctcgagagcagcgccagaatgaagaatctcagcgctaacataaaaaagtaatcacatcctctagcaatcttcaagcggaatatgttagcgctgagataacgaaggatgcgacgggcgtcgccatggaagggaggccatatgacgcgatatgaagttcccaccctggcgcatgtggccaagctcgccggtgtcagcgaaaacacggtgtcacgcgtcatccgcaacaagggatcgatcgcggaggacacgcgcaaccgcgtcgtcaaggcgatcgaaacgctgggttatgttcccaatcgcgcggcgggatcgcttgcctcgtccggctcgctgctgatcggtgtcctcctgccgtcgctgtcgaacgtcgtctttcccgaggtgctgcagggcatccatgcggccctcgccacgaccgcctaccagccgatggtcggcgtgacgaactacgatgccggcaaggagcaggacatcctttcctcgctgctcgcatggcagccggccgcgatcgtgaccaccggcttcgaccacacgcaagcgacgcggcgtatgctgagcaacagccgcgtgcgcgtggccgagctgatggatatcgatgccgagcccatcgacgtggccgtcggtctttcgcaccggcaggccggatacgcgaccgggcgccacctgatcgagcgcggttaccgtcgcatcggttatgtcggccatgactgggcggccgaccggcgcgcccggctgcggcatgatggcgcttgccaggcgctgtccgaaaccggtttgacgttgcgggccgaagaacgcttcgacgggccgagctcgacgatggcgggccgcgatacgctcgcgacattgctggcgcgcgcgcccgatatcgacgccgtcgtcttttccaacgacgacatggccgtcggcggcttcttccattgccttgcgaccggcattgtcgtgcgcaaacagcttgccctcttcggcttcaacggcctcgacatcggtcaggcactgccgatgccgctttcgacggtacgatccaaccggttcctgatcggcaagacggccgtcgaaaggcttctggaaagccccacgcggcccgagcagcgcgtggttatcgacactggcttcgacattatcgaaggcgcgacggcctgacgaatgtctctatatcttgggagtgagtaaacatgcttttaggcgcggtggcggatgatttgacgggagcgacggaccttgctctgaccctgtctcgggagggaatgcgaacggttcaggtggtcggcattccgcctgccgattttaactatggagacgcggaagccgtcgtcgtcgcgctgaaatcgagaacgattccggcagcggaagccgtctccttatctctcgacgcctgccgtcgcctgatcgcagccggcgccgagcagatcatcttcaaatattgctcgaccttcgattcgacgcctgagggcaatatcggcccggtcgcagaagccctgcacgcgtatttgggcggcccgctcacgctcgcctgccccgcctttcccgccaacgggcggacggtctatcgcggtcatctcttcgtcggcgacatgctgttgtccgatagcccgatgaaggaccacccgctgacgccgatgaccgattctaacctcgttcgggtgttgcagcggcagacggcgctcaaggtcggactggtgaaccgcgacgtggtgggcaagggtagcgatgagatcggagcggccttccggcaggcgtcggatcggggtgaagggatcgtcgtcgtcgacgccgtcaccgatgacgatctgcgcgcgatcggacaggcggcggccggcatgcggctgatcaccggcggttccggcatcgcgatcgggctgcccgaaaacttccgccgcgccggcaagttgcgcccgcatcgcgccgagagcggcatcgccgcgccgcagggcaaggccgtgatcctcgccggctcgtgctcggcggccacacgccgccaggttttggtcgcgatcaaggccgggacgccggcgctgaaactcgatccgctcgacatcgcggccggtcgcaccaccgtggatgcggtcgtcgactgggtggcaccgatcaccggcgccattccgcttgtctattcaagctccgagccggatgacgtgaagcgggcgcaacaggcactcgggcgtgaccgggcgggcgaattggtggagcatctgctggcggaggtggcgttccagctgacaggtcgggactattgccgctttctggtcgcggggggcgaaacctccggcgcggtggtcaaccggcttggcgtccaggcgctgttcatcggccccgagatcgatccgggggtcccatggacggtgagcatcggccgcgagaagcagccgctggcactcgcgctcaaatccggaaacttcggcggcgacgacttcttcttgcgggcatgggatctggtgcgatgacggcgatcatttctgaagaaacaaaattgcgggacgagatcgcgagcgtcgggcggtccctgttcgaccggtcgctgaccttcggctcgacgggcaacatcagcgcgcggctgagcaatggcgacatgctgatgacgccgaccaatgcctcgctcggcagcctcgatccggcacgcctctcccgcttctcggcggaaggtgtgcatgtcgatggcgacaagccgacgaaggaagcgttcctgcaccaatgcatgtattgccagcagaagatgagcggcgccgtcgtgcatctgcattccacctacgcggtcgccgtcagcattctcgacggcgtcgacccgaccgacgtcctgccaccactgacggcctattacgtgatgcgcgtcggcaagcttccactcgtcgagtacttccctcccggtgaccccgcgctcgccaccgcggtcgcggaaaaagcgaaggacagccatgcggtgctccttgccaaccatggccccgtggtcgcgggcaagacgttgcgcgaagcgcaatacgcgaccgaggaactcgaagagaccgcgaagctccacctcctgcttcgcccgcacaaggtcaggccactgacggcggctcagaaagccgaactgttgtcccctcagtagctgtaggccggcagccaacggtatgcgcgtctcatgacaaacacagatcgtgtcgacgtgcgtgggtacgcttttgaatgttctgcaaacgcttatgccccgacggtcacatagcgtcgcgcgcaatagaggagtgcatcctggctctcggcggcgttgacgccgatcacacggccaaagagcacccgatgcgttccttgatcgagcgcgtttgtcaactcgcattcgaagctgaccagcgcatcctctagaacaggcgcgccggtattgccttcgacccatccgccagtcgcgaagcgttcggccatcggggtcttgccgccgaagaggttggacagcgcttcgtggctcggggcgagcgtgttgacgcagaagaagcgcgcggtctcgaaagccggaaagcaagaactcgttcggttgatacaggcgagcagcgtggcaggcgtgtcgctgacgctgcagacggcggacgccgtgaagccataaggcccgtcaccggcgcgcgtcgtcacgatattgaccgcggcgccgaggcgcgacatgccgtggcgaaaggcggcgctctccacggtctcgaagctgtgtcccatcatccccatgtcgcgctcctaaacccgttccggccgttcgaaacccatgcggtcgcgcaacgttttaccctcgtacgcggtacggtagaggtcccgctgctgcaggatcggcacgaccatatcgacgaaatcggtcaggccatcggggaagtgcgacggcatgatgttgaacccatcggcggcgcctgttgcaaaccaggtctcaagcgtgtcggcgatatactccggcgtcccgcacaacacccaatgaccgcgcgcggccgccatgaggttgtagacatcccgtaggcgcatactctctcgccgcgccttgtcgagcatgaccttggcgaaggcgtgataactgtccgatggcttcaagtcctcgggaatggggccgtcgagatcgtagacgctcatgtcgatcccgaagcgatcggagagcagcgacagggcattggtctcgctgatgaagccctgaagcgctgcgagcttatcatgcgcctcacgctcggtgcggccgacgatcggcataacacccggcaggatcaccatgctgtcttccgtgcgatcgtatttcgacagtcgatccttgacggagcggtagaaggagcgcgcctcgtcgagatcctgtgtgaccgagaaaacgacatccgccgacttcgccgccagttcctggccgggaccagagccaccggcttgcagaatgatcggttggccctgcggagagcggccgatgttcagtggtcccttgaccttgaaatgcgcgccctcgtggtcgaggcagcgaaccttggccggatcgatatagaggccggtcgcacggtcggcgacgatcgcgtcgtccgcccagcagtcccagaggccgcgaacaaccgtcacgaattcctcggcgatctcataacgcttggcatgatccgggtggatcgttccgaagttcgccgctgccgtcgggttcgccgtcgtcaccgcgttccaggccgcgcggccgccgctcaggtgatcgagcgacgcgaagacgcgggcgaccgtgaagggatcgttgtaggtggtcgagacggtggcgccgaggccaatatgtttcgtcgcgccggcgacggccgagagcagcgtcagcggctcgagccgcgccgtgtaagaaggatgcgccgccggatcggcgtgcaggttgtcgcccatgaagatcaggtcgaagaggccgcgctcagcttcctgcgcgatggcgcggacctgatcgatatcctggaaacagtcgatcgcgcccggcatccgccatccggcgacatggctgccggtaccgagaaggaagaggccgaagtgaatcttgcgtgtcatgttatgcttatctccagaagacgtaacgccgctctacgaagctgatcgcgccgaagaacacgaggctgatcgtcgaggcgacgatgatggcggcccagaccttgacgaagtcgatctgcagcaccgcctgataaatgacccagccgaggccgccgtaagcgccgagcatctcggtgacgatggccaccagaacgctgcgcacggtcgagacgcgcatgccggcgatgatcagcggcagcgcggtcggcaggcgcagccgccagacgatggcaaactctcccgcgccgaaagagcggatgagatcgaccgtcttgcggtcgatccggtcgaggccggcgatggtgctgagaaagatcgtgaaggaaacggcgatcgccaccatcaccaccttcgacgtcatgcccatgccgaaccagagcaggacaagcggcgaataggcgacgacgggcaccgagttgatggcggtcgccaacggcaggacgacgccgcgcgcggcggggataatggtgacaagcaccgcgagcgacatgccgatggcgcagccgatcacgtagcccgcgatggcctctcctgccgtaaaggcggcggcgtcgaggagcgtggccgagtcggatacaattccagccagaatgctgctgacggatggcagtacgtaggacggcaggttgaggcctcgcgccgacagctcccatatcgcggcaagcaacaacgctccggcgataccacgcccgatctgacgcaggttttccttaggttggctgttcatttctcgctaccccagaagacaatgtggcgctctacccaggtcacgacgccgtaaagccccatcccaaggcaggcggagacgacgatggttgcccatatgccgacgacgttttcattgtacatcgcctgtagcagcagcacgccgagaccggtggtgtcaccgaaccactcgccgacgatcgcaccgacgagggcaagcgaagaggcaagcttcagcgcaacgaagatttgcggcagggcggccggtagatagatccgccgcagaatctgcccatccctggcgccgaagctgcgcatgagctggacctgcttcggatcgaccgacgaaaagcccagaatcgcgtttacggtgaccggcaggaagctgacgtaaaaggagatcaccgcctttgcgaacagcgtattgccgaaccaaagcacgaccacggcgccgaaggcgataacgggaatggtctgcgacacgatgaagagcgggaagaacagctcgcgaagcaccgtccagcggtgaaagacgaccgcgacagccacgccgaacagactgccggcgacgaagccgaccgcggtctcgaggaaagtccgccacaggccggagagataagcgccaggcgtcgccatgatgttggcggcgatggcgcttgggcgcggcagataataggggcgtataccgaaggccatgacgatgacttcgatcgccagaagtccggcgaccagccacaagattggttttaccgcggcggagatcctacccgtcgaaatgacgggcaggtctgtcgcggatgggttcattccagtcacaggcgtcgttcctcggccggaatcttgtcgatgaagctcgcgttgaaagccttgtcgagatcgaccggctttgagatcacgccgtatttggctagaagctcgttggcggagccgacggcggccttgtcgatagtgaagatgccatcggtcgatgctttgcccgcggtcatgagcgtcttgatctcggacagcatgaattcctgctgggcgcggtcaagcgtcggtgcgatcttcatgatggtgtcgattgcttccttctcgttggcgaaggctgccttccagcccttgacgctggcgcgcaggaacttttcgacgagctcgggtttctcgttggcggtctgctcggagacgatcagcgtatcgcgcgggaaggagacaccgctatcctcgggtacgaagaggttgaggttttccttgcccacccgctggttgatcacataaagctcgttgtagcgggtggcggtcacgacatcgacctgcttgtcgacgaaaggcgtgacggaaacctgctgcggctggatatcggcttgcttgggatcgatacctgcctttgacagcatcgcggaaagcacgtggttggcgccggtgaaccaggtcgtgatcttcttgccgttgaaatcggctacgttcttcacagccccgtccttgcgcgagacgaaaacgaatggcgtctgctgatgggagacgccgatgcagacgatcggcaagcccttgtcgcgtgcggcaaacacgctgtcggtaccaccagagagcccaaaggtgtcggcgccggtcgcgacgaggttttcggtcagaaggttcgggccaccggggttgatggtgaggtttatgccttcgtccttgtagtagcccttttcaagcgccacgtagaagccggcgaactgcgcctgggtgagccacttcaggcgcaggctggcattgaccatctcctgcgctccggcaggagcggctgacatgccaagcgcgggaagcgtcatggcggtggcagccagtgctgcgatcacgttacgtctgtttagcatgaaaccctcttttatattgttcgtgacttgtcgttgtcttctcccccctgatgcgcttactgccggaagtccgagccttccctgtcgagctgacgcagaaaagccggccactccctttcgccggcaataagaatatcgcccttgctctcccagaactggcgcgccgccttctcgcaaacgtcgtgcggcgggatgaccatctcgacgccggatgcggcctgaagatcgagctggatgcgcgcggcgcgctcgaaatagtagagcagcatgaaggcctcgcccggcgtgcgaccgatggtcaggatcccatggttgcgcatcagcatcaccttgttgccgccgagatggctgataaggcgctcctgctccgccagatcgatggcgacgccttcataggcgtggaaggcctggcgctgatagaagcgcatggcgaactggctgagcggcaacaggccgtccttctggcaggagaccgcgacgctggaatccgaatgcgtgtgcaatacgcagacggcatcatggctcgacttgtgcagcgcgccatggatgacgaaggccgccttgttgaccgtatatggcgtatcgtcgagcttattgccctcgatatcaatcttcacgaggctcgacgcggtgatctcctcgaacaggaagccgtaggggttcagaagaaactgatcctcgtggccgggcacgcgcatcgagatgtggttgtagatcagatcgtccatgccgagccgggcaaccatacggtagcaggcggcaagatcgacgcgcgccttccattcgtcttcggcgatgtgggccgggcgccccgaataatggtccgtcatactctgtttcctcgttctctatcagtgtccagcgacctggaaggacttcatgctttcctcctcgattgcctcgagaagggtcttcttcagtgcaataaattcgggagatgtgacgatgtcggccttgcgcggacgcggcaggtggaccagctgttcgagtttaaccttgcccggacgcgcggtcatgaccaacacgcgatcacccagaaagattgcctcgtcgacatcgtgtgtgatgaacagcaccgtgcgcttgtgcttctgccagacgtcgagcaaccaacgctgcatcatcgtgcgcgtgagggcatcgagcgcaccgaacggctcgtcgagcaacatcagatcgcgcttgaacaggaaggtgcgcatcagcgccacgcgctggcgcatgccgcccgagagctggttgggatactgcttctcgaagccggcgagaccgaactcggggagcatttccatggccaacttgcgcgcttcggcgcgcggcacgccttcgatttcaagcgccagaatcgcgttgtcaatgacgttgcgccagggcagcaagagatcgcgctgcggcatgaaagacaccttgccgaggagatccgatgccgtggagctgacacccttgaggcgcaggatattgcccggatccggctcttccaggccggcgaggatgttgaagagcgtgctcttgccgcaaccggacggaccgaccacggtgacaagttcaccggggcgaattgatacatcgagatcgctgagtgccttcgtcgcgccgaatgtcttcgagacgttccgcaactctatgagcggctttccatcatccacggcctcggcggcctcgagcaacgaaggatctggggtggcagctcgcgcctttcgcggctttagcaactcgatcaatcccatggcaccggaggttggccgccgagggaagaattcggttggcgtaatcgccctgtcagtcatgctcaccgctcctgtcacgtatgcaaatcttgatcaaagaaatacaagcaagccctatgccagatgcatatcagtcttcactttcattcaaatagctccttctgcaccacatcctggaagccgccgcgctcccaagggcatttctggctcttaagatatacggaatatgccatttgagtattcaaataatcgatattcgtgttctgaaaatgctaattgttgtgcacggaaatggatattttttagccactcgcaatcaaggcccgaaatggcggcaaatcgacatctctggcacatgcacgcaaaaaagaccggaagcgacatcgctcccggtctaccaaaatcaataaggaagacctgcgcctaggaaagagcccgcttcatcatctcgaagaagccatcgttcgatgccgtctcaacaactcgcgcattgaccttgaactccggccagcggttgccgagcaccggcgggtgaacggcggagaagcctcgcgtgatttcacccgcggtctcgatccggacaaccgcgtcccgggcactctcgatcagatcggcattgagtgccatggcgcaggtgagagagtcaggatgcgtgctgatcgggcgaccgtaacgcgcctcggcggtcttgcgcggcaccgccgaaaccttgcggtagaactccgaaagcggcgtgttcatcgcaaagatttcatcgagctggtccgcttcgaacaggctggagcgcatggtaagcgtccaggtcgagagcgtgatgttgaagccagcctcgaagacgatcttcgccgcttccggatcgatgaagaagttgtactcggcgcacggcgtgatgttgccgaccgagttgtcggtaccgcccatgatccagagatggcgaaccgccttggcgatgcgcggctccttcatcaccgccagcgcgatgttggtcagcggcgcctgggcgaggatgtcgatctcgccaggctccgccatcaccttctcgatgatcgcatcgacggcatgcatcgtctcgggccgctgacgggcgatcggcaggttggcgccgctcatgccgtcattgccgtgcatggtagaggcttcccacgacttgaccatcggccgccgcgcgccgcagtaaacaggaacgctgcctgagaagccggcggcctcgatggtcgccagcgcgttctccacctgctggtcgaatggcacgttgccgacgcagacggtcaccgcctccagcgtagagcccggcgtcttcatggccagcagcagggaataggtatcatcccccgcggtatcggtatcgataatcagccgcatcagtagaactcgaatcccatggtgcgggcatgatagtagaggccaccatcctgcacgatcagaaattcggcgcgggtgtcgccgtcattgtggtggctgtgcttggcagcagcaggcgttaccagcgttgcccaaggcgaccaatcgcatttctcttcggcaaccatggagtaagcagggtctccggcgacgaccagcgtgatggcggcagaattgtgcttgtgcggcggctgcgcactcttcggcttcagcgtgttcagcgagagcgtcatggttggcgtgatgttgcgggcggcttctgtcttttcagccgagaatatcagcgcgtgacccgatgtcgaggcattggcgttcgaactgtagacgacatccaactgatgtgtgatttcatcggccggataatgcacgaactgcaccgcggcttccgtgccggtgacaggagcggaggtgtcgaacttcagctgcggatcattgccgacagcccagaagacgcaatcgtccttggcggtgatcgcggacgtgacgccacccggcataaggaagacatcgcccttgccaagcgtcgccttctcgtcaccgacgacgaggctggagctgcccttgatgacataccagatcgaggccgtgtttacgagcgtcgtatccagcgtttcgccggctttgaccacagcatagcgagccagcatcagtggcgtcgtcgctgcaaagccgcattccatcttctgggactggtcgcagttgatgaagccggtcttctccatcttcatcgcctcagccggttcgtccatgaagatgtgccccggcacggcgggaagctttatgttgaaggcattgccggaattgaaatagcggctgcgcgcctccgctgcgttggcgggctcgcgcggcagttggaccggcatttcggccatgtcgttggctgtgctcatcatgcatctccttggttgaacgaaacacccgcttcctccagaagcaggtcgagaagaacggtcgctccggcggcgacatgatccggctcggaccattcgtccggatggtggctgatgccgccccggcagggaatgaagatcatggcggaacgcgtcagcggtgccatttgccgggcgtcgtgtccggctgcggaaagaacgtccaagtgcgacaatccatgccggtccgccgacacgcggatcgcctgcttcagcccttcgtcgaaaccattggatggcgcatcgacgagacggcggatctcgacctggcaggcgtcggcctccgcgcatgcgatttcctcgaggcgggcgccgcacgcttccagcaaggcattttcgggatgacgcaagtcgatgcggaagatgactttagccgggacgaccgacggcgcattgggctcgaccacgacacggccgatggtgaacttgatcagttcctcgccggccacggcatcatgcatccgcgtcgccatgcgcgcgaaagcctgcaacgcatcctgccggcgggccatcggctcggtaccggcatgggcctcgcggccggtgatcgtgatgtcgtaagtcttcttgccctggatgccggagacgacgccgatgacggccccttccgtttccaatacatccgcctgctcgatatgaggttcgatgtaggcgtggatcggaaagcctagcgcgcgacgtggcagctcggggaacgccgcatgcagcgcgccaagggcatcgccgacgctgacgccatcggcgtcgcgcaccgccatcacttcctcagctgtgcgcagcccggcgaaaagctcggagcccatcatgccgggagcgaagcggctgccctcttcgttcatccagccgacgaccgtgatcgaacgctcgagtttcaggccagcttcccatatcgctgtcacggcctccagggccgccatcacgccgaaagctccatcaaaaagaccgcctgtcggctgactgtcgatatgactgccggcgacgacaggcgccagtagaggaactgaacccttgagcgtcagaagcagattgcccgccggatcggtggatgcttcgaggccggcctcggcgccccatgcgatgatccggcgccaggccaggatttcctcgcccgacagtgcctggcgattgacgccgccgccgggcagcgcgccatcctcgccgagcgccatcaggcgggtccagagacgatcgggagagattacgggccgcgccatgtcctttactccgtccgcatcacctgaccgggatcggcacggggatcgcgcactttccaggcgccctgctccacctgggcaatgaaatcggacacgagagaattgaacagcgccggctcttcgaggttcagcgtgtggcccgtcttgggaaggatggcgagacccgcggccggcagcactttcttgaggtagatcgaaggctgcaggcaatgatcgtcctcgtcgccggtcatgaccagcgttggcaccatcatcgtcttcaactgcgcttcgagatcccagaaggacgggcggcggcactggacaccgcgcattgtattggcggcaccgacagccgagtgatgcgacaggcgttcggcgaaggccgcccagccgcgcgggtccttgttctggaactgcacccggctggcaccgagcgaatagatcttcgagaattcggccggatccttctcgaaattgtcagcgaccttcagcgaggtattgcggaaatagtcggccgtttcccgctccgtgccgtaaccggcgccggcgacagtcagcgaaagcgcgcgctccggcgtgcgaaggccgaaatgtagggtggcgaagccgcccatcgacaggccgacgatatgcgccttctcgatgccgagcgcgtcgagcacggcaaccgcatcgtcggcggcgttggcctgcgaatacatctcgatatcagcggggatgtccgacggcgcatagccgcgcgccgcataggtgatgcaacggtgacgacgggcaaagaagctcatctgcggttcccaggcatcgtagttgccgccaaactcgtggatgaacaggatcggcgttccgctctctcctgccgtctcgtagtaaagcttcgttccatccttggcggtcgcgtacatgtgaaagcctctttgcctcgtatcgtcgatggatatgccggccctagaaaagggccggtacgtcgttgagcgtgcgcgccgtttcgatgtagcgcggcaggccttcgcagaaacgctcggcccaggccgatggcaccgaggtcgagaccttgatgaagcgatcaccgaaagcggccgtgtggtagcggccctggcggatcatcacgccttcgcggcgggcagcttcgacgatggcctcgggagatacgccggttgaggcggtttcaagaaccaggaagttgccgtgcgagaccgggatcggaaccgaaaggccagtggctttcgcggcctcgatgatcatcgccttgttggcgctgtcgatgcgacgcacgtccttcatccattcaggtttgaccgaaagaccggccatcgccgcacgctgggccacgaccgacgcgccaagcaccgaggtggaggccgccgaaaactcgtcgaccagcttcggttcggcgacgagagcgccgatccgcatgccggcaagaccgagccacttggagaacgacagcgaaacgaccgtgccctcgggggcgacctgcagcaccggcgtatggccgtcggcgaaatcgcgataggtgcaatcgtggatcagcagcgcgccaaccgaacgggcgatctcggcgaaggcttcgatctcctcgcggtcataacggatgccgagcggattgttcggatcgactatgtagatgatggcgcagcgctcatcgacattggcgcgtagcgcttccggcgtcagcttgtagttgaccgaggcgtcgtagatcggaatctggatcacttgcgcgcctgcctgttcggcgaacatgcacggccacttccaggtcggatcggtggtgataaacgtagtaccaggcttcgaccgcgctttgcagatcatcgcgagcgcattaacgccgccttcagtgacgagcgcttcaaccgaggttccggcgacgccgagatcggcaacgatcgcgctgcgcagcgcctcgaagcccatcggcggggcataggcattgaactcgccggcttcgaccgagcggatcatggcttcagcgaccgccggatgggcgggcacgtggttggtgttctgacccatccaagccaggtcaggcgtcgagaagaggtcgtcgaaatagcggttgcgggtgcgagcgtcggccatggatcagatcaccgagccgcgcgctgcgatgccgccgtcgatcgtgacgaccgtgccgctgatgtagccagccttcggcgatgccaggaagacgcagagatcggcgacttcctcggcggttgccggacgcttacccggatacttgtcgtagagttcttcccagcggctctcgtcgccgagcatgtcgatagccttccgcttcatgattttgaacatgcgcggggtatcaaccgggccggggttgacgccgacgacgcggatgccttcatccatgctgcggccgccaagcgccttggtgaagctcatcagcgcggcattacctgtggagccagcgaagtaggcggcatcccagttctcgccggaattgccgatgacgttgatgatgacaccacccttgcctttgcggcgcttccagaattcgcgcgccagcgtgatgtagccgaacaccttgaggtcgaagccgcgacggatcgattcgtctgtgacatcctcgatggagccggcgggaatatcgccagcgttgttcatcagaatatcgtagtctccgcaggccttgtcgagcgccaccatggcgtcggtcgtgccaaggtcggcctcgtgcacggtaacgttgaccggatactgcgccaattccgccttcagttcttccatcgccgcgccgttacgggcggcaaggtgaaggtgacatccttccgcagcaagcacctttgcgatggcatggccgatgccctgcgaggcccctgtgatcagcgccgtctttccagcaagattaagtttcacctgcatctcctatgtgaatacatatttcgtattcttgcatacgctgatttgacgtcgtgtccataggcgtgccactaaaatatcgaaaaatttttctatctatcatgaagctgaggaatttattcgcagtctttgcaaaccgaaaaggcgcccagcccatttcatgggcaatatcgcacttatttgagaaaacttattttatgtatacgaatatctattgcgcgaatactgaaatgacataatgtcacgttcaggccttcgggcacgaatgacacctgaaacagacggctggaatatcctcatggcagatgtgtccctcaaaaatgtggggaagacttacgaaaacgcttcggcgaacacgatcgagaacctgaacctggacattcgcagcggtgagttcgtggtgcttgtcggcccatcgggctgcggcaagtcgacgacgttgcggatgctggcggggcttgaagagctgacggacggagagatctggatcggagaccggcgtgtggacgagctggagccgcgcgatcgcaacattgccatggtgttccagaactacgcgctctatccgcatatgacggtggcgcagaacatgagcttcggcctgaagctgtcgggtatggacaaggccgagatccgccgccgtgtcgaggaagccgccaaggtgctggatatctccgctctgctggagcgccggcccaagcagctctcgggcggccagcgccagcgtgtggccatgggccgcgcgatggtccgcgatcccgcggtcttcctgttcgacgagccgctttccaacctcgatgcgaagctgcgcggccaaatgcgcgcggaaatccgccggctgcacaagcgtctgaaggcaaccactgtctacgtcacccacgatcaggtcgaggcgatgacgctcgccgatcgcgtggtggtgctgaacaaggggctcatcgagcagcagggtacgccgcaagagctctatgagcgtccggcgacccgtttcgtcgctggcttcatcggtagcccgacgatgaatttcctaccagccgaggtcattctggatggtgagacgccgacgctgaagttcgcgggtgccacgctggccgttcccgccgacaagctcgacgccttgaaggctttcgccggccgccgcgtcgaagtcggcctgcgtcccgaacatttcctggccgacggtgcaacagaaatctcggtgccggtcgacatggccgaactgctcggcccgacgacacttgtccatttcacgcttgagggcgtctcctgttcggccatgctgccgccggaacttgcggcagccgaggggcagatgcagtcgctgcgcatcgcccgcgatcgcatgtccctcttcgacccggataccggccgcgccatctgacgcgaccactgcctgcacgacgacaaaaaaacaaggagaacagccgatgaatgcccgcatactctttctcgccggcctgcttggcgccaccgcactcggcggtactggcgcattcgcccaagatggcgttgcctgtaccggtgacaccacgacgctacgcattctgcgcacgccaggaaactacccctatcccgcgcctatggaagcctggcagaaggcaaatccctgcgtcaagttcgagatcaacgaagttcccttcgcccagcttgccgatacgatctccgttcaggcggcaagttccaacccgcctgacgtgcttgtctatgacggcccgaacacccagtcctacgccgcctcgggcatcctgctgcctttgaccaagtacctgcccaagggctgggatgaagatgtccttcccgcaaccaaggccgagcacagctacgaaggcgaggtctattcgcccggcatcgagcagaccaccgtcgccatgtactacaacaagaagctcgtcgaagccgccggcatcaagccgccgcagacgctcgacaaggcctggacctggccggaagcactggctgccttcaaggcctgccagcagggcccggccggcgcaccaagcgtctggggtctcggcccgacccgcttcggcaacggccagcccggcctcgtttaccaggacttgatctaccagcggtcagccggcgacccgaaagccgacccggcaagctccgcctataagacctactgggcgctatccaaggacggcaagtctgtggagggatatctgaacacgccggaagcggtggaagcgctgaaattctatcagtcgctgttcaactccgaaggggtcgcacccaaggtaggcattccgaacgccttcttcgacgccaaggcctgcttctacattgatacgccagccgccggtaatgcgcttatcaaggatccgaagatcgaatggggcacgacccccatcccctacttcaagacaccgatcgttcacactggctcgaccacgatcggcgtaacggcgcgttccaagaatgcggacatcgcggccaagttcgtggtcgacatgtccacgggtgaatacgcctatatgaacgtcagccagcgcggcaaccttccgacgctgaaaagcctgttcccacgcttcgagacctataacgcctatccgatgaaggtgttcgtcgaccagcttcaggaatggggccagccgcgtcctccgggtcctaagttcgcccagtacgacaagctcgtcacggattctctgcgtgccgtcgccttcggcggcgatccggccgatctgatggccgacgccgagaaaaaagtacagcgagttcttgatcgctaagcattggacgcaagaatgtcggtctcaaataccctatccacggcttcggccaaaccaaagacgcgaaagcccgctacgaagcggcagaagcgcgattggctgtttgcggccggcttccttgcgccgttcatgatcctgttgctggtcttccagtacgtgcccttgctcgtcatggcccgcaacagcgtctatgattactccctgctcaatccggccgccgccaagttcgtcgggttgcgcaatttcaccgacatgatcgattatgacgatgccgccgtctccttcggcgtcaccttcctcttcgcgctcggcgtcgtcgtcttcgtcatcccggtggccttctcgctggcactcttcctcaattccaagctgccggcgcgcggcttggtccgtaccatgatcatgctgccggtcgtgacctcctccgttgtcgtcgccaccatgtggtccttcttgctcgacccgtcgaacggtctgatcaacggcgtgctgaacatcgtcggcatcggcaaccaaccgttcctcacttcgacaagccaggcgcttcccgccttgatcgccatgacgctatggcagcaggtgggcttcggcgccatcctctttctggccggcctgcagggcctgccggtggaactgacggaggccgcccgtatcgatggcgccacccgccgccaggtgctctggaacgtgacgattccgcttctctcccgtacgacgctcttcgtcgtcgtgatcatgacggtcttctcgctgcaggccttcgcgcccgccttcctgatgacccagggcggaccgcaggacagcaccaacctgatcgtctaccacatctacaacagcgccttcatcatgcagcaggccggctatgcctcggcgctatccgtggcactgctgctcgtggtgctcgccatctccatggcgcagatggccctgctgcgctctcgctggaattactgacatgaagaagcaacatctccggcgtggcgccatggtcgccctcatcatcgtcgtgatcctatgcggcttcctggcgccctatgcctggatcgtctcctcgtccttcaagaaccagctgactctgttcaacgacgtcacgccgctctcctggcgcgccttcctgccggtcgagggaacgttcgagaactatcgcacgctgttcgagcgcaccaatgtgctgaccgcgctgatgaacaccgcgatcgttgccggtggccaggtggcgctgacgctgctgctctgctcgatggcggcctactcgctgacgcgcatccgctttcccggcgccaagatcgtcttcgtgctgatcctgctcactttccttctgccgatcgaggcgatgatggtgccgctctatcaggtggtttccggtctcggcctctccaactcgctgctcggtgtcatgatcccctggatcgccagcccattcggccttttcctcttgaagcaggcgttcgaggaactgccggtcgaactcgaggacgccgcccgcatcgacggcgccggtcatgtgcgcatcttcttttccatcgtactcccgaacgtgaaggttccgatgttgacgctcggcctcatcacattcctgttctcgtggaacagcttcctgtggccgctcgtgatcatccaggacccggcgatccaggtcatccaggtggcgatcgcccaacagggttcgccgacgcagctgccaaactggggcgaaacctttgccggcgcaactgtcgcgaccgtaccgctcatcctgctcttcctgctgctgcagaagtatttcacgcagggcatgaccacgagcgggatcaaaggctagaccgtgaacgcatcgaccttcagccctgccccgttttccacactggacgccccgatgggcgggcagatcggctatcgcacgttcggcaccgaaggcgattggctggtgttgatccacggctggtgcggcaatgccgagcattggaacgcgatcgcgcccgaactggcgcgcgattaccgcgtgctggcggtctcgcatcccggcttcggcgggatgctcccgccgccgccggctggtcagacaatccgcgcgatgggcaccgctgtcgcgcatctccatccgtcaacggacgaggcgatgcgcgaggcaattgcggacgatatgatcgcctcggctccaccgaccttcgcactcgatgtgaaggacgacctcttcgcatgggacgcggaagaacgttggccactggtcactcgccccgccgtgatactcaattctacctgggttgcaaggctggcggatcccaagccgatggcctgtttcagcaccactgatgtgatcgaatacgactccggtcacttcccgatgatcgaagctcccgtgatgattgtggaaaagctccgaagctgccttgccacactcgtatacgcataatccacccattgaatgcaccgcaaaaagaaaagtataaatgccgccagcaaaatacaaattggccattcgcagttccgcgagaggagtgaccgcattggatcaggatgacacgcgtctgccggaggcggcaaacgggatgcgcgctccgacccgcgccggcgagttgcgtgagcagctcgagcagatgatcctggacggcaggctcgaacccggcgaacggctggacgagatggaactcgcgcgccgcttcggtctatcgcgcactccggtgcgggaagctatcaaggccctgctggcgatcgggctcgtcgagacacgcggccgccagggcactcacgtggcattgctctccatccccgcattgatcgagatgttcgacgtgatgtccgctcttgaaggcctgtgtgcccgcctggccgcccgccgcgcgacgccggccgaacgcgccggcatgcgcaaggtgcacgaggaactggtcgaagcctataattccggtgatccggttgagttctacaaggtgaaccagaagttccacgaccagctctatgaagcggcccacacccacttcatcgccgatcaggcgatccagctccggcgccgcatcggcgcttaccgcatgcgcgcgacctatcagcccgggcgcatgctgagcacgctgaccgaacacgtccgcatcatggacgcgatcgacgccggcgatccggaagcagcgcgcaaggctgccagtgatcacgtccagcttctcggcgaccagttgaccgacttcatatcgtcgctgcccgcgcatatgagccgcgcgcagtaacacgcgagaaattcagcccatgcagggaccgcgcggtagccgtcgcgcggaggaggaacatatgctcgccgcatcgcatcccgtcatcctgaaccagcttggaccagaactcggcaaggcgctcgaagtgcacccttccagaccggtcgtgatagaggacgccttcccaccggaaccatggaagatcgcgccgaaagccgatattctggtgacaggaggctttgccagctggaagcaggcaccgcgcgactggcagtttccgcagcggttgaagtgggtgcaatcgcaaacgacaggcatcgagatctacccgccgaccctgctgcaggaccggatcatgacctgcgggcgcgggctaaacgcactgccgatcgccgagttcgttttcgcggcgatgctgcgcgtcgagaagcggctcgaagagacgtgcgcccgcagcgaggcggactggcgccagcacgacattggtcgcctctacggcaagacgctggggctcatcggctacggaagcattggccaggcgatcgcacggcgggcgcttgccttcgacatgaatgtcatggtcaaccgccgcacggcgtgggagggcgatagcggcatcgtcgcggccgggatcgacgagatcttcgcaaccgccgaccacctcgtcatcgccgcgccgctgacggcggacacgcaagggatggtcaatcgtcagttgctcagctccgccaagccaggattgcacctcatcaacatttcccgcgggggcctcgtaaatcaggaagcgctcgtggcggcactcgtcggaggtgagattagcgcagccacgctcgatgtcacgacgccggaaccgctccccgacgcgcacccgctttacaccttgcccaacgtcttcataagcccgcatatctcctgggcgggtggcgatcaggatcaggccttccggtgccggttgatgaaggaccttaacgcctatctgaaaggtgaagagcttgaagcgctggtcgatcccacgcgcggttactgaccggaaccgctttcatcagctcgatgagcgtctctgcgatcgaatagacgcgcctacaatgcctgatcatctagttcgcgagtgcgatgctctcgcggcggatgaagcggctggggatcacgctgcgcaggtccgaaaccacctcggacttttccatcctggcgatcaacacttcggtggccgtctcgccgagcgcgaccatcggctgttcgatcgtcgacagcggcggcgcgcaatatgcgcagaccggcgagccgtcgaacgagacgatcgacaggtcttcgggcaccctccagcccatcttctgtacgcggctcatgaacgagatcgccatgtcgtcactggtggccacgaccgcggtcggcttttcggcaagccgcgcgaaatcctccgcggcccgcaatccggtttcgaagccgaactgataggtcagttcgccgccggatcgcgtcacactgtcttcggaaaggcccgcctcccgtacggcctcgacgagcccggcatagcgctcgacgtcgtgatagttgcccgatgggccgcagatatagaagaagcggcggtgtccgagggccaggagctcgcgcgcggcttccttcacggcctgacgatcgttggtgatgacgctcggaacggccgtgtcgctcatgtcgagaagaagcgacacgatgggcaggccggcctcggcgagcgagcggttggcgacgaccggaagctgtgacgagaggatcagcgcaccgcccaccgtaccgccgaaggccagatcgaggatatgccgctcggaactctcgtcgcggtcgaggttggcgatcatcagattgtagccgttgcggatcaccgtgcggttcaccgcctccagcacctgcgggatgatctgcgaggcgccgtaatgcagcgatcccggcagaacgatcatgatcacgttcgacttgccgaccctcagattgcgggccgccgcgtttggggtatagccgagttcctcggcggcggcggcgatgcgggcgcgcgtcttttcgttgacgcggccggggtttgccagagcccgactgaccgtcgagatggcgacgccggccaggcgcgccacatccgccatcagagcggacgatccctctgtggatgaattgctttcattttttttcatttattccatccacttaaacccagcgccgggcgaagccccgcgcctcctgaaatcgttatagcaaacgtttgccaaaaaatcgaagaaagccattgcatcttttatcggcttgtctaatatcggtgcatggcaaacgattgccaagtgtcaaagcgttgaattatcgaaataaatttcgccgtgaaagccgtctttcgcgacgggttgcctatgctcatcggaggaattgaacaatggcgtcgagtgagaatctgcgtttcggtgtggatcttgttacctttttccatccgggattctggggcgtcgatagctacgacgcgatcatcgatcacgccaagtccgagccgcgcaagttctgggacaagatcctcgacagcatccaggcctcgggcgtcaccggcgtcgagctgacgttttcgcccttcaactggcaggacgcgatcaagacctacggctcggtcgaaggcttcggcgctgaactctccaggcgcggcctgcagctcgcatccggcttcttcgcggaactcgaagcatcgggcgacttcaccgaagcgtcggcgcaggacgccatcatcgccaaggcggaactttacgccgatttcatcaaggcctgcggcggtgatgtcatggtgatcggcgcgccgatgcgccagacccccggcgccgaacccacccgtttccgcgatttcgagcaggccaggatcatcgccgatttcctcaaccggctgggcgcgatcctctaccggaagggtatcaagctcgccgttcatacggaagcgcactcgatcttcgccgccgcccgcgacgtcgatctgctgatgctgttgaccgacccgacctacgtccacatgtgcccggacaccgcccacatcatcctcgaaggctccgatccgatccagctcgtcgaccgccaccacgagcgcatggtcatcgcgcactggaaggacgcgatcggcaagatgccttcagacacgccgattggggccgatatccacgagcgccatcgtccctacttctgcggcttcggacttggccgtgtcgactggccggcctggatccggttgctccgcgaccgccagttcagcggctgggcgatcctcgaactcgacgccgctcccgatcccgtcggcgatatcgccaatggcctgaccctcgtgcggcagtcgctgctgccgatctatcgctgaccaaacctgtaaccaacggccccgcgaagagggtctattgaagaggtggaaccatgaagaaaatgacaatcctgctcgccggcaccattctggtcggcgccgtcggccttgcccaggccgatgacaaactgaaggccgaggtcttcacctcgtggacctcgggcggcgaaggccgtgccgtcgacgcgatcaagaaggaattcgaaaagcgcggcggcgtgtgggaaagctccaccgtggccggcttcgaaaacgccaacgccgccttccagaaccgcctcgttgccggcgacccgccgacggcaaagcaggtcgtggtcggcaaggacccggccgaattcatcgagcagggcctgatgaacccgatcgacgacgtggccgccgcgggcaagtggaaggacgtccttccgaaggcgctctacgactatatctcctatgacggcaaggtttacctgacgccaacgggcattcacggcgaaagctggatgttctattccaaggacgctttcgccaaggccggcatcaccgaagagcccaaggactgggacgccttcttcgccgacatggacaagctgaaggccgccggcctgacgccgatcgcctggggtggtcaggcctggcaggaggtcaaggtcttcaacatggtgctcctgtcgcaggtcggcatggacgatttcatgaagatctatgccgacaaggatcagactgccctgacgtccgacggcgtcaagaaggcgctcgagatctttggaaagctgcgtagctacgttgacgaaggatctccgggccgcaactggaacgacgcaaccgccatggtcatcaccggcaaggccggcgtgcagttcatgggtgactgggcaaagggcgaattcaccgccgccggcaaggtcgcggagaaggacttcggctgcgcgctgtcgccggcctcccccggcctcctctacatctcggatgccttcggctacctgaagaccaacgatccgaaccaggacgccgcacagaagctcctggccgaagtcgtcatggatcccgccgttcaggtcgacttttcgctcaacaagggctctatccctgtgcgcacggacgtcgacaaatccaagttcgacgcctgcacgcagaagggcatggccttcctggcagacagcaagatcgtgcccgaacacgccatcaccacgacgccggaacaggtcggcgccctgaccgacttcatcggcgaattctgggcaaacccgtccgcggatatcgacgcgtcggcagcgcaattcgccgcgatcttcgagtaggatcgggccgttgccgcctgcgccgcaccaccggcgcgggcggcttttgaaccactttcgcaaagacattcagatgaaacgcaagaataaccgctcgaaggcggcgctgatcgcgctcatcccgacctgggccgcggtgatcgtggtctatatcggcaccatggtctggtcggtcaccctctcgttcacgaattcgcggctgttcccgtcgtggaacttcgtcggcatggagcagtattccaagctgttcgcgacggcgaaatggcttatctccttccagaatctgatcatcttcggcattctctatgtcttcggctgtctgttcctcggcttcctgctggccgccgcgctcgatcgcaaggtgcgctttgaaagcgccttccgtacgatctttctctatccctacgccatgtccttcgtcgtcaccggcctgatctggcagtggatgatgaacccgacgctcggcgtgcaggcaagtgtgcgcgcgctcggctggcagagcttcaccttcgactggatcatcaaccgcgacctcgcgatctatgccgtggtcatcgcggccctgtggcagggtgccggcctcgtgatgatcctggttctcgccggcatgcgcgggatcgatggcgaacagtggcgcgccgcgcgcatcgatggcatccctgtgtggcggacttatgtttccatcatcctgccgcaactgacgccggccttcgcggccgcgggcacgctgctctcgatgggcgtcatcaagacctacgatatcgtcgtggcgctgaccaatggcggtccggggtcggccaccgaggtgccggcgaaattcatcatggacaacctgtttcagcgccagaacctcggcctcgcgacggctgcggccaccgttctgctgctcacggtcctgatcatcatcgcgccgttccgctatgcccaacacatccgcgcccggcgccaggcaggtaccctatgacgacccatccccgtggcccgaagccaacgcagttcaccgtcgcgcgcgtcggcctctatgccttcctgatctccgccgccctgttcttcgccgtgccgctctacgtgatgatcgtcacctcgctgaagaccatggacgagatccggctcggccagatcttcgcgttgccgctccgtctcgatttcaccgcctggcagaccgcctggtccggcgcctgcgccggcagcgaatgcggcggcgtgcgcatgggcttctggaactcgatcaagatcaccgtcccggccgtcgccatctccgtcttcttcggcgcgatcaacggctatgcgctgtccttctggcgccccaagggcggccgcgtgatgttcggcatgctgatggccggcgcgctcgttccctaccagatcttcctctatccgctggtgcgcggcatggccgtcatgggcttctacaacagcctcggcggcatcatcctcgtgcacgtactcttcggcctgcccctggtgacgctgcttttccgcaactacttcgtgacgatcccggaagagctcttcaaggcggctcgcgtcgatggcgccggcttctggcggatcttcatcgagatcatgttgccgatggcgcttcccatgatcgttgtcgcctcgatgttccagttcaccggcatctggaacgacttcctgctcggcgtggtcttcgccggacgcgacaatcttccaatgaccgtacagctcaacaacatcgtcaacacgacgatgggtgagcgcaattacaacgtcaacatggcggccaccatcctcaccgccatcattccgcttgccatctatttcctgtccggacgctggttcgtgcgcgggatcgcggccggcgccgtgaagggatagagccgaatgcaatccgctgtttcaatcaaggacctgaagatcacctatggcgaccacaccgtcatagagaagatgtcgctggatatcgccgccagggaattcctggtcttgctcggcccctcaggttgcggcaagtccacgctcctaaacgccatcgccggccttgccgacatcaccgacggcgagatctggatctcgggcaacaacgtcacctgggacgagcccaaggatcgcggcatcggcatggtgttccagtcctacgcgctctatccccgcatgtcggtgcgcaagaacctctccttcggcctgcgcgtcgccggcctgccgaaagctgagatcgatagccgcgtcgagcgcgcggcatcgctgctgcatctcgaaaagctgctcgatcgacgccccgccgagctctccggcggccagcgccagcgcgtcgcgatcgggcgcgcgctggttcgtgaggttgatgtcttcctcttcgacgagccgctgtcgaacctcgacgccaagctgcgcaacgagctgcgcgtcgagatcaagaagctgcaccagcagctcggcaacacgatgatctacgtcacccacgaccaggtggaagcgctgacgctcgccgaccgtatcgccatcatgaaggaaggcgtgatccaacagctgggcacgccggcggaaatctatcaccgccccgccaacctcttcgtcgccggcttcatcggcgcgccggcgatgaatttcataagcggcaagatcgagcgcgaggctgacaggctcatcttcagggcggcggatctcgtggtcgacatctccggctacgcctttgcctccgcgcccaagccaggcccggcgacccttggcctgcgtcccgaacatctcgccatccgcacgaagggcgaaagtgcggcgatcaccgccagcgtttcggttatcgagcccatgggctcggataccgtcgtctggctcacctggaacgacacgacgctgtcgttgcgggtgatgggcgatctcgatctccagccgggcgataagatcggcctcgggctcgatctctccaaggcatcgttgttcggtgaggacgcaaaccgtctgtgagccctcttcgcggccgataaaaagggccgcgtctccatttcattgatgaagtcaggttttgaaagacatgtccgagaaaatgtatgacgcgctggtaatcggctccggcgcagccgggtcctttgccgccaaggaactgacggccaacggtctgtcggttcttctgctcgaggccggccccgagatcggcaagaaggatttcaacccatccaggaagaagccgccggcaagcgccatcaacatctgggagcgcgcgcgcgccaccatcaagggccagccggtccagtcccgcgccgcgttcttcaccgagcgtttcagccgtttcttcgtcaacgaccgcaagaacccctatacgacgccgcgcggtgagcccttcctttggattcgcggtcgccaggccggcggccggttgcacagcttcggtcgcgtgctgctgcgctggaccgatgacgacttcaagatcagcagccgcaccggccgtggggtcgattggccggtctcctatgacgaactcgcgcccttctatgccgaggcggaaagccatctgggcctctacggcaatgaggaccatgtcccaacgctgccggacggtgtctattcgcgtcccgccaagctgacgtcggccgaagagctcttcaagaagaccgtcgaaggcgatgcgcccgaacggcatgtggtctcctggcgctacatcgcgccggacgcagagcgcgtgcctcgaccgctgcgcgaggcgatggcgtcgggcaagctcaccatccgctatgacgccatcgttcgccgcgtcaccaccgacccgcggaccggtcgcgcgaccggcgccgagctcatcgatcgcaacacgggcagcgttcatacggtccgcgcggaaaacgtcgtgctttgtgcgtcgccaatcgaaagcatccggctgctgctgaactcggcttcggagaggcatccgaacgggctcggcaacagctcgggcacgcttggccgctatttcatggatcagctgccgtgcctcgcctttggcactttcccgcccgccaagggctggtcgcatgacgactccgctccgcaggacccgttctacaatccgtcgggcggcatcttcgtgccgcggttcgagaacgtggacggcaagccgcagcgcggcgatttcgcctatcagggcagcgtcggccgtgcgccggtgggagacaatgacgccgcaagcctggcgttcttcggcttcggcatgatgcttccgcacgccgacaaccgcatcaccctggatgcccgccgcaaggacgcctggggcattccggtcccgcatatccgctgcgtcatgcacgagacggaaaacgcgctgatccgcaaacaggagaagacgctgatcgacatggtcgagggcgccggcggcaagctcgacttcatcggttcgcctctcggtctgagggaaatgggccggggcgccttcccggacgccgacgcgctgagccgcttcctgtttcgcaaatggttccgcaagaccatgtgcatgggggccgcgatccacgagagcggcggcgcccgcatgggtacgtcgcccgataattccgttctcaacagctggaaccagagctgggacgttccgaacctcctcgtcaccgatgccagcgcctttccgggcggcggaacggcaggcacgacgctgacagtcatggccctgacgctgcgcgcctgccgcaagctggttgatgactaccgcaagcaataacgggaaaggggcgacctcgaagcgccagctgacgggcctccccttcttgataatcatggcggcgtcattgtgcggttggcgccttgctgcaatcttgtcgacttattgtattttacatatttcaagttcgagattatgaatggcactttgatgcgacgataaggaacagcgccatggaacaggtccagataagcaagaatgaactgaatgaccgggtcgtggccattctgctcaaggccgggctcagcgacttccaggcgaaatcggttgccgacgtcattgtcgctggcgaggctgacggatgcaagtcgcatggcatctatcggctggatggtatcttgcgcacggtcaaggcgggcaaggtaaaccctgtggccgcagcacatgtcatgagtagcgagacctcggcgatcatcaaggtcgacgccggcggcggttttgccaacccggctttcgaactcggtttgcctcatcttgtcgagcgcgcggccaagttcggcattgccgcgctggtcatcaacgattgcacgcatttttcggcgctctggtgggaagtcgaagccctcacccgtgaaggcctggcctgccttgccatgtgcccgagctatgcgaccgtcgcgccgacaggtggcagcaagccgctgctcggcaccaatcccttcgccttcggctggccgcgcagccaggccgtcccctatgtcttcgacttcgcgacctcggtcgccgcgcgaggagagatcgagctccatcgccgcgccggcaagccccttccggaaggttgggcgatcgatgccgatggaaacccgacgacggagccggaggcagcgctggccggtgccatgctgcctttcggcggccacaagggctcgtcgatcggcacgatgatcgaacttctcggcggtatcatgatcggcgatctgacgagctccgaagcactcgactacctcggcaccaccacgcttctgccgctccatggcgaactcgtcatagcgatgtctccccaggcgttcgcagccggccgcgccggcgaccccttcgcgcgcgccgaagtgctgttcgatgccattgccggcagtggcgcgcgactgccgtcgcagcgccggttcacggcgcgccagaagtccgatgccgaggggatcacgctgacggcttcggaaacagaacatctcgagcgcctgctggacaaggggctcgacgccgtcgcctgaccgcggcctaaaggcacaaacgaaaaagggccccgttggaggcccttttttactcgcgactttgtgtaaacctacgccttgtaggtctgaaccgcgcccggcagcttgctccactcggcgtaccaggtgtcgaacagcttcagctgggcttcgacgtagccgcgctggctctccgaaagcacgtccgtttcgttgaagtgcagcgtgtattccctgtcgcccttcagaaccatcatgtgcttgaagaacaacacgagttcggggccttcatcgaaggaagagagaaccgcgagagccgattccagttccagtgcgcgctggcgtgcctcgccatcgcccttggcagcgccgttcgccagattgcacatgtgaagcacttccttgggaagcacgcaaccgatacccgtgatcgcgccggttgcgccgcagttgacgaagccgtggaatacggccgtatcgacgccgatcatcagcgacacgtcatcgtcgcggctggtgatgttctcggctgcatagcgcatatcggcggcgccgccgaattccttgaagccgaccaggttcttgtgctcttcgcgaagcgcgaagaacaggtcggcgcgcgtggcaaagccgtaataggggctgttatagatgacggccggcaggtccggggccgccgaaaggatcgccttgaagtggttcttctgggcggcgacgacggagccgcgcgacagcacgcgcgggatgaccatcaggccctgagcgccgatcttctgggcgtgggcggcatgtgcaaccgcggaagccgtattcacggcacctgtgccgacgataacaggaataccggccttgaccagccgttcgacgccctccatgcgctgcgcgtccgtcagcaacggccagtcgcccatggagccgcaatagacgacggcggacatgcccgtggcgatgagctgcttggccttgcgcaccagcgcgtcaaaatcgggcgtgcgatcgtccttgcagggcgtcatcaacgcggggatcacaccggaaaaaatgctggccttcatgtcgctctccatggtcggtttaccgggtcatcaaccgtacgtctcgcgcacgctacccttggtgaaaaggagtatcatttaaaatacttcttgtcgacaaggaaaatgcatcgcccgtcagagcgcgatgtccagcttctgattgcgcgcgaacatgcgctggacctgctcgacgatctgctcaccatgtatctttcccaaacggtccgcggcctccaggtcacgcccctcgatggcggcgatgatctcgtcgtgctcgtccacgaagcgttgcggaaactgctcctcgtaggaattgtaatagagccgcaatatgcgtcgtccctcgtccagcagccgccgaaagagcccggtgaaataagggtttcgcccggcttcggcgatcgccgtgtgaaaggccgcgttgaccgcgatcatctcgcgcagatccctggcctcgaccgttgccgcatactggtggtgcagttgacggatcgcgacgaggtcggccgcgttgtggttctgcgccgccagcctggtcgtcacacggtacatcaggacaagcgcgtcgaaataggtgttgaggttcaggagatcgatgtttgacaccagcgtggagcggttcggaagcgtttctatcagcccctcgccggccagcctgacaagcgcctcgcggatcggcgttcgcgacatctggaagcgctccgcgagcagaacctcgtccaccgggctgccgggcgcaagcttcaagtcgaggatctcgtcgcgcaaaatgtcgtagacgagcttcacgcccgaaccgcggcggcgctctactacatccttggtggcctgttcgatcatggcagatccccgaatatcaaagtcgaagcttactatagccgaaaagcgaaattgaacagacgtggtcaagcacgcttcgactggccatccgggcaatggcttggattggacggaatggatccgaatgagcacaggcccgccaccatttgcttttgcgctcgccgcgctacctccatcggcatgaacattggaggaaatcccttgcgtaaaccgatcatactcttcgcatttgccctattcgccctgcccgcaaccgccgttgcacaatcacctgacctcgaagagacctgcaaatccgtcgccaagagcttcttcatgagcgatcagctcgccattggcaccgtgcagtcctttcccgagttgaagccgccgggtgttcgcatgacctactcgacaagacagggcacggcgcctgccgagatgaccgatatattcgagtgccagttcgacaagacggacaagccgcgcaacctggcccggttctgtgtgtcgagcacatgctattttccgaccgttgacgacgcggaccgcaagcgccgcttcgaggaaatgcgcatacttctcagccgctccgaaaagtaagggtcacctgatcccttgcatcgccggcaggtgatcaagaaagacgagcttgatcgggaactccgccgctcgatctccgttcggtgtccaggcgacggacgtcgcgtgagggcgatatcgtcccggattggacttgcaacatgacgatcgaaccaagccgaccgttggtacctcagtgggccgcgccgatttcggtgcggataggcaacggtcactccgaactcattcatggacccgacgaggcattgtattacttccgtcaccgctggccactgacggattcgctcgcgctcgacacggcgcgacgacgctgccttgaggcccgtggcttcgacataccatgcgagacagcgaaagatgcagtcattgccgccgcgatcgaagcgaagatccttgcctgatttcgcagctttgacggatgctcgttgaggcggtttgcggtcgctgccctgaacgatcatttaccgagagctaaattcgcgatcaaaaatgtacgtttcatgacagtcgctggcaaagcacggcgacttgctccagatatccgcctaagcaccttgggttgagtgggtcgtttgcggggtgccaacgcgaaaggcgcttcatacgatgaattccaccgaaacgacggatgagcccggcatctggacctggtgcctggaaagaaatgttctctacgcggataccgcccttgccgggcttttcggccttgacgcggacgaaacgctggttggcctgcctgtcgaccgatatgtggagcgtattcaccccgacgacagaggccgtgtcgccaaggccatgtcggaggcggtcatcggcggcatgccctacttcgaggagtatcgcgtcaaggacggttttggcgaaacaaggcacgtgatcgcgctcggtcgatgcttccgagacagatccggaaatcctgttcattatgccggaataacctatccgctagacgccctctgagaccgccgcgacgagcggcgccagacgcatcctccgctatcaacatgacagagcaaattccgtagaagcaatggcttagcacccacgtccaagcaattgtcgaaaccgcacagacgcgttaacgctatggaatagccaagcctttcccgcctattgtcggcgccgggtccgatggatcggcgactcggggatggcaatggcaggctttgacatgacggatatcaggaacaggatcttacgcgcccttcctgaaaacagcctgtctgccctgatcccgcacttgaaggcggtggaactgccctcgcgaaaagtcctggtgcagatcaacgagcggccgctgcatgcctatttcatcgaaagcggcctggcatcgatgatcgcgatgagcacggacggcgaaagcgtcgaggtcggtcatatcggcttcgagggcatgtccgccgcccacatcgtgctgggagcggacacgacgccgaaccggacgttcatgcaggtcgccggatatgggtacgccctgccgataaaccgattgcggcaggccgccgacggcgatgcgctgcttctggagctgttgttgcgctacaaccattatgccgcgttgcagctcgccaattccgccctggccaacgcccgttacagcatcaacgagaggctttcgcgctggctgctgatggtgcacgaccggctgcggtgtgacgatcttccgctcacccacgagttcctggcgctgatgcttggcgtacgtcgttccggcatcaccaacgaactgcatattctcgagggcatacacgccatcagggctacccgcggaaacgttcgcattctcagccggcagaagcttgaagcgatagcggcgggcagctacggcacgccggagcagatctacgaggatctgtttcgcaaaccattgagcggacctattccgcctcgctgatcgcttggcgaaacggaaccgtcagcacgattttaccgtcggcgtcgcgcacctcgatcgatctcgatgatatatcgcgcccttgccggatggcatgcgccatcaggtctcgcgcgttggcgatcgcttcggcagtcgcggctccaagatctgcgcagtcagtaccctccagatcctcgatcttgctcttctggccgacgacatggaagtagtagagtgacatcagcgtgatccgatcgggaggctacatgacgggctcgtcgaccgcgacgagacgcgcatactcgcgttccgacaatccatagctatcgccggcgatttgcatcaacttgcctcggtcgaggatccggatgttgccgcgcgtggccttgatcgcgtgaaggccttcggcgatatgcaactggtcggtcacgccggagcgccggacgccaagcatcagcgccaggaattcgtgcgtcagcgggagatcgtcggaatcgacccggtcgtgcgacatcagcagccagcgcgccagccgcgccggtacgtcatagcgggcatttgccagtgccgattgggcgacctggatcgacaggtactgcatgaagcgcaggaaaagatcgagtgcatcctcgttcgtagcgagagccttgttgaacaccacgacgggaattctgatcccctctcccgccacctgcatgtaggtgctggtcggtgtgcgatcggccttgaggatgacgtgcccgccggccatcgcctccctgccaagatgtccaacctcgacgctctgcccgctttcgcttttggccacgaccgatgcgatgccggactcaacgaaatacacgaactcggtgcggcgattgggtgtgatcagggagtggcgcaaaggcaaatccatgcgctccatatgcggttgcagcgtccgataggccgcctcgggaagtcgcttgagaaggtggttcgtcaccttcaagcggtcgatcgtcatgaatgacatgccggctcctccgcgaacttttcgactgaactcaacccacgacaacagccaaagttcccggaaagcaccgtgacaccatgaggtggatacgagctagcggatgatcgccggctcggcgaggccgcaggcacgcgtgatcgccatcgcaagcattctttgatccgccggctttgtaagccactcgcaggccttgagcatgtcgttgtctgcgtcgggatccggcgaacgaccagaatagaccactgtggggacagttaggtcggcgagagtgcggatgagctcgtcggcgacctcacctttcaagtgatagtcgacgatggcgatagcgggtgccacggactttagccaggacatagccgcatcgatcttggaaaaggtcacgacctcgtcatatccaagttcttgcagcgtctcctcaagttcaagcacgataaacaggtcgtcctcgacgatcaacgcggtcttcttgtcttgcgcgttcatcgggatgaactgtagcgcctggcatgagttacaatcgcagcaggcttcaaggtacggttccgcacagtgatcggttgtagaaaggcagcgccgtccgaaacgctgcgcaccattgtcgaaaccgtacggagaagcggcaaaacggaacaaagccgtgccggcgcgcttcctttcccattggaggacgcgacatgatctatcagcagatgacgaattccttcgaggaggatgtcgtcgacctcatccccgcattgaattccttcgccaggacattccaccgcagccagaccgatgtcgatgatctcgttcaggaaacattgacgagggcccttggcaacatcgacaaatttcgccccggctccaatctcaagtcgtggcttttcacgatcatgcgcaacctgttctgctcgcgcttccggatcggcaagcgcgagatggtcggattggaggagtgcgtttcggacgccggcagcgtggccgccgatcaggaatggcggatacggggccacgaactggagcgcgcctgcggcgggctcaaagagcccttcaaatccgctttcgaattcgtcttcatcgacggccgtacctatgaagaggccgccgagcactttcactgcgctaccggtaccgtcaaaagccgcgtcaaccgcgcccgccagcgcatcgccgcggagtgcggagaggcagtagcttaggcaccagcgacactacagcggctgcagttccagagatcggcggatcggatatcaaagatggcgacgagcactcttgtcgcttctaaccctctcatcctggcttccgtcaccctgcacgctatacgctggacgttctcaacccggaccgttgtccttcccgtgtctgcaaggcatcgatctgcttgcctttccacatcaaaccaagcggccgcgcgctgcaacagtccagcgttccggcgccacactgccttcgtcgactacaagaatttcgtcgaccatgttggtgaccacgcaagcatgattgggcacgatcctgaccttgtcaccgaccgaaaggccgattgggccggtgctgacaagccttccatgctcttccgaaagctgatcgatagcgatgtcgtcacgaccgagcacgtggccataaccggcaaggccgagaagatcggaggtcagtgttttggaacccgcgtcgatcaccgcacgatccaccgccggaacggagatgacggtcgcgaccaccgtcagcgcgcaatcttcccaaccgcaggcgccgcgtgagacgagcgagcggtcattatagacataagtacctggcctgtattcggtcgtgacgggcgcatcggccgcatgcatcatcgacggtgttccacccgaggtgacgaccggcacggagattccattttcctcgatgcccgccttggcttccctcatgaacgcctccactgccgcttcggcgccgatcggcggataggtcatgaggccgccaaacacgaggcccggcattccggctatgagcttcgccagcgaaacggcttcatggggtgaagccacgccgcagcggtttgccccggtattgcactcgacgagaaccgcaagcggcgcgcgcgaatccttgaaggcggcggagagcccctcgacgaccgtgcggctgtccgcgacgaccgacaaattcaccctctccgacagcgcccgcaggcgctgcagcttggctttcccgacaatattataggtgatgaggacgtcggttatggctttgctgccctgcaccatggcctcggcctcggataccttctggcaggtgatcccgcacgcccctgcctgcagctgcatctccgcgatcgcgggtatcttgtgtgtcttgatatgagggcgcacccgcagcttgtgggaatccgcatactgctgaaaacgttcaatattctttcttgccacgaccaaatcgaccagcactgccggcgtatcgatttcagtcagaatggcggcttcaattggcaccggattaccctcgatgaaaaaatgctgcactgccgaaaaaacagtcagcggcgtgaactgcgtattttttagctgcctctattgacaattcattgccgatcgagctttctatgtcaatccaataaagcagacacatgtccggtatattggacatcaggtcaccgtacttgtcaaaaaaggggaatgtcatgacagtttctttccgcgccagccttgttgcactggctgcagccacgcttctttccacgccggtgctcgccgccgacggcagcaaactcgatgaggtgctggctcgcggcaagctcatcgttggcacgggcagcaccaacgccccgtggcacttcaagagcgccgacgacaagcttcagggcttcgatgtcgacatgggtcgcatcatcgccaaggccctgttcggcgatgcggaaaagatcgaatacgtcaatcagtcgtccgatgcccgcatcccgaacatcacgaccgacaaggttgacatcacctgccagttcatgaccgtcaccggcgaacgcgcccagcaggtcaacttcaccattccctactatcgcgaaggcgtgggccttatgttgaaggctgacggcaagtatgccgactatgccgcgctcaaggccgcaggatcgtccgtcacgatctcggtcctccagaacgtctacgcggaagccatggtccgtgcggcccttcccgaggcgaccgtcgatcagtatgattccgtcgacctgatctaccaggcgctcgaatccggacgcgccgatgcggtcgccaccgaccagtcctcgcttgcatggtacatgacgcagaacccaggccgctacaaggacggcggctatggctggaacccccagagctatgcctgcgcggtaaagcgtggagatcaggattggctgaactttgtcaatacagccctgcatgaagccatgaccggcgtcgaattcgacacctatgccaagtcctacaagacctggttcggcaaggacctgaccccgccgcagatcggcttcccggtcgagttcaagtaagtcgaatacacttattcatgcacgtccgatgacgatgcggagcgggatctcatcctgctccgctagccatccgtttcgcctgccggaaggccgatccgatgaattacacgctgaatttcgccgccgtatggcgcaactttgacggactgataaacggcctggtgctgagcctcggtctggccgtcgtctccatcctgatcggcgcagtgattggcctcgtcgtggccttcgcattgatgtcgaaaaaccctgtggcggcgatgcccgcgcgtctttacgtaacgatcatccgcaatctgccgatcctcgtcctggtcctcttcgcctatttcgccttgccgcagatgggcgtcaggctcgacaagataaagagtttcgtactcgtcctttcgatctactccggtgcctatcttgccgaagttttccgcgccggtctcctgtcgatcccacgcggactgaccgaggcgggccttgcgatcgggctgacatccacgcagatccgcaagtcgatcattgcgccgctgatgttccgcaacgtactgccctccctgtcatccacggttatctccctcttcaaggatacgtcgctggccgccgccatcgcggtgccggaactgaccttcgccgcacgaaagatcaacgtcgaaagcttccgcgtcatcgagacctggatggtcacgtcggcgatctatatcgcaacctgtttcctcatcgccttcggcatgcgcttcatcgagcgtcgcctggccctgccgaggtaatcccgatgtcccagtccttcctcgaccagctctggatagctcgcttcgtcattttgaacgggcttggcatgacggtctccatttcgatcctctccatcatcgcgggttcggttctcggaattttcgtgggccttgcgctcgcctatggcaagtggccgctgcgccttgtcgtgcgcgcctataccgacatcatccgagggacgccggtcctagttctggttctcgcgagctattacatctcggctgcggcgggacttgacttgaagcccttctcggccggcgtactggcgctggcaatcttctgctcgtcgcatgtgggtgaaatcgtccgaggcgcgcttcaggccatttcaaagggccagaccgaggccgccaaagcgatcggcctcaccttcggacagacgttcacttccgtgctgtggccgcaggcaatgcgccaatgcctacccgcctgggtcaacaccgccgcggaaatggtcaaagcctccaccctgctttcggtgatcggcgtcgcggaattgctgctgcgaacgcaggagatcatctcgcgcaatttcatgagcctccagttctacttcctggccggagcgctctacttcgttgtcaacttcgcgatcgagcgcttcggcaagtatgtcgagcgcaagactgccctgccatcctgaggaggccgagccatggccaagacaattctggaaatcaacggcctgcggaagacctacggccagaatgaggttctcaaaagtgtcgactgctcggtcgaagaaggcgaagtgatttcgatcatcggttcctccggctcgggcaagacgacgatgctgcgctgcgtcaacatgctggaggaattccagggcggaaccatccgcctcgacggggaggagatcggctatcacgtcgaaggctcgacccggcgtcgcaaatcggaaaaggagatcgcccgccagcgcgcgctgaccggcatggcctttcagcagttcaatctctttccccatatgacggccgccgaaaacgtcatgctcggcctgatcaaggtcaagaagatgaagaagcccgaagcgcgcgccatcgccgagaaatggctcgatcgcgtcggtcttggcgctcgcacgaaccattttccaggccagctttcgggcggacagcagcagcgtgtggcgatcgctcgcgcaatcgccatgtcgccgcgcctgatgctgttcgacgaagtgacctcggcgctcgacccggaactcgtgggcgaagtgctgcaggtcatcaagggtctggccgccgacggcatgaccatgctgctcgtcacccacgagatgcgcttcgcctacgaggtttcatcaagggtcattttcatgaaccagggcgtcatctgcgaagaaggtgatccgaaggagatgttcatcaaaccgaaaaccgagcggctagccgagttcctgaaaacctcgagcttcaactagaagaaacaagcagaaagagaaaacacaatgacgatcaagcgttacggcaccggagaaaaaggcgccggcggccagccgttgcccttcgcgcgcgccgccgaagccggcggctggctctatgtctccggccaggtgccgatggagaagggcgaaatcgtccccggcggtatcgtggcgcagagccacaaggccatccagaacatgatcgccatcctcaacgaagcaggatacggggttgaggatatcgtgcgcatcggtgtatggctcgatgatccgcgcgacttttggagcttcaacggtgtctacgccgaatacttcaacgagaacccgccggcccgtgcttgcgttcagtctcacatgatggtggattgcaaggtcgaagtcgactgcgtggcttaccgcgcggaccgcgcataacgttaatttcgagacggccccatcgtagcgccctgcgcgttgcgatggggcctgattgtcagattggagacacgcatggctgagtccgcctcggatacggcaacgcgacgcacacgggggctggatcgcgctttcgagatcctggaattcctgcgcgtgaagcgacagcccatgcggcccaacgagatcgcatccgagatcggcgcaccgcgttcctcgatttacgagctcgtcaacctgctgctcagccatggcatgctcgattattaccaagacgatggccgcgtgtatctcggccgccgcctttatttccttggcacggcctatgccgaacagttcgacctgatgcgggaatgcgaccgcatgttgatccggctggcggaagagacgcgcgagaccgcgcagatgtgcctgctggaagggcgaaagtatactgttgccatgatgcgggagggcattcgtccgttccgcatctcctcaaacgtcggtgaacttgtgtcgatcgcatggacggcgtcaggccgtcttttggtgtcgcatctttccgatcagcaaatcctcgacctgatcccgcccgaagattttgtccttccgaacggacgccggctcgacccggccgatttcatcggccaagttcgcagcgccgcgaaggatggttacttcactttcaacagcgaggtggagaatttcactcattgcttcgctgtgccaatccatcaagccgatggcgcctgtatcgcgaccttgtgcctcgtcgctccgcgagaggacgggctgcgcaaccgcgatgcctacctcgacagcttgctcagagccgctggtgaaatttccgaaaagctcggcttccaaatcgatcgaacgaggcttggagcaacggcctagcctccgatcagccgttacttcgcggcgattgccgtcatttccacgagcaattcaggacgggccagacgcgcttcgacggttgcacgtgccggcgcgtggcccttcgaaacccacgcatcccaggcttcgttcatttcttcgaagccggacatgtcggccagataaatattgacgctgacgagattgtccttggtgacgcccgcgttgcgaagcgtgtcctccaaatccaacaacacctcctccgtctggagcctcacactcttgccgcgcgtcgcctcggcgacatgacccgagagaaagatcaagttccccacgacaaccgcatcactccagcgatcggtcaatcctattctctcgatcattttgaactccacgctgatgttgacggtatgagttagtcgggttgcgcggacgatctacaggcctctgcgacttgtgacaacaccaacctggcgctgccgcagagccgtcatagtcacaacatgtccaaagaacgcgcggtgcccagaactagataaggctgatccccttgatcgccaaccagctgggaaggagcatgaccggaacccaaacgaccgccgagacgacatttgcgacctgaaatcgaaacatgtccatccgcatcatccccgccatgaacggaacggtgcaacgcagggggcccaggaagcgacccatgaataccgacaggggaccgtagcgacggaaaaacgctcttgccttcgcggcccgcgctcggtgtttctttccccatggactatagatgatccgccgccccgacgtgctgccgatccggtatgacacgatatctcccaagacggcgccgaggatcgtggcagccaccatcggtattgcgtcgatcgccccggaggcgaccaacgccccggcaacgatgaacagaggcgtcgccggcacgaaaaatccgatgacaaagacggactccgcgaacgcaatcagtcccatgatgaccggagcccagctctgattggcctttatgaagtctatgataattgaaactagagtgtccaagtgtcgatcctgattcgcgccacgaaactagtcgtgccgaactgacgaaagcctgacacagatagggtgaggccgcgccgacgagattattggttttccgtctgcctggcgccgggtccttacgtgacgcgagccagacggggttgggaacggttggtgcagcgccctaaatcacaaccagcggacaaaccacgaaggtgtgcacgcgacggtcatcatcaggacgcttcacggcgacttgctaaacaaggcagtcgcgagctagcctccggccagctgagtgcgccctagcgcaaacgcccgacgatacggccaagaatcatggccagcatcggcagcatgaagagggcgaccatgcccaatccccagatgatgacgatcaacggcttcacgatcatggaagccaagccatatgcctgtgagataaagccgcttgaaccgacgagcttcaccgtctcgcctgcttgcttgccaccccatgtttcagcgacaccggctccgccgtcgacgactgtggtcgccgctcccgcggcccaggcaaggatggggtcagccatcacatagccaacccacgcgactgaggaccatcccgccatcaagaccaggatcaaaagccagacaaagggcttgacccgggtcggtcgtcggttcccgtttgccgggctggaattcgggctctggtagtagttcatgatgcactcctggtttgcgcggctttggccgcgcgcggcccgtgttggtcagacacgggcacgtcaatcaaaaaaacggcgcaagaagggcccgtgcgaagttcccgtgccgaaatgccgggcactgcattgcccggataccgttcgcggtagacgcttcgttctcgatcatatcgctgaacctttcgctcaagacaccctgatacgccactgagctgcaaggtgggttctcatgtaactagagggtcaagggagtgcgacaaatttgaccagcggcgacgattgccgccttcgtgccccatcaaacgcgcttggccgacaacacgtcgaatgtctttgcgatcgtcgcggtggatcgttcgtagtcggccaatgccaggcaggcaatcagcgcgtccacgacagcgagctgggcgatgcggctggtcatcgcctccgttcgaaattgagtctccctggccagcgtgtgcaagacgatgtcggtatatgccagtagcggcgtcttgccgaaattcgtgatggcaatggtcgtggcgcccgcgtccttggccagccgtgtcgcggccagtgtttcgaccgtgcttccggagtgggaaatcgtgatgaccaccgtcgacggatcggcaagcgatgccgtgatcgcttgcacatgactatccacgctggcgcgcgacatgatgccgatccgcagcagccgatagttcgcatcctcggcgatcggcgcagcactgccgatgccgaacacctccacccggctcgccttgcggatggcctcgaccgcctgggcgatcgccgaaacgtccagcgccttctgcgtatcctgcaatgcctggagtcccgattgaaagatcttctcgatcacggtcccggtggcatcggcttgggtcagatcttcgtggatgaattgtacgggctgaaccagatcgcgggcgagcgccagcttcacctgctggaaacccttggcaccaagcgactggcaaaagccgatgacgctgccttcgcttgcctccgaacgctcggcgacttccgtcaccgacatgttgacgacatccgcggcgttcagcgcaatgaagtcggcgatccgaccggccgcaggcgtgaggtccttccgcatcgcgcgaattcggtcgacgacgccggaaagttcctgagcctgggcgggtcttccgcgctcgaatgccatcgggttcttcccttctcaggttgttccgctgcgagcgtcatgccggccggatgaggccgccatgcacctttggaaaccgcgtgatgcttaccagaattacttcgatgtcaaagagataggctttggcatgcaaatccagatgagtcgcgttcaattctcgtctcatgggttgaacatccgatgaggaatcctcaatgtcaacgacaaaactattgagagttattcatcaaactgtcatgcaggctgtctaatcgtgctggcagcggcgggccgagctcatcttcagccccgatcaggagacctctttatgaagatcgccatcatcaccgatatccatcacggccccctctcccataccaaggacgagagctgggatggacttgcccatgttcgctcgttcgttgctcgcgctgtggccgagaaagcggatctgctgctcgatctcggagaccgcatttccgatacgaaccatgagaccgaccaccgcgtcgcatcggaattggccgatatcttcaagacctatccaggcaagcggatccacatcctcggcaatcacgacgtcgacaacctcaccgtcgccgaaaacgagaacatcttcggccagtcgatggcgagtagcgtgcacgatctcggcgacatccgcctgatcgcctggcagccaggtgtcaagatagagatggggatcggtctgcccaaggcagagccggcactggagtggctggtggaagccctgaatgccgacgagcgtccggcaatcatcgcgacgcatgttcccttgtcgggacattcgcagaccggcaactattatttcgagcgcaacccccactactccagctatcccgaccatgccgtggtgcgccgcgctgtcgaggcgaccggcaaggccgccctctggctgtccggccatgtccactggaacacggtcaccaatgtcggcaacgtccagcacatcaccatccagtcggtcagcgagcggttcaccacgcatccaatcacggctgccgcctatgccgacgtcgagatcaagggcggccagttcacggtcgacgtcttcggcaacgatcccttccatgttcgactgccgttccgcaaatccggcgatcgtccgtggatggcgccgtgtggcccgttcacggaagcggacagccagcgcgagatacgccagcgcgaatgggaattgagcctagcttgattatctcggccggcgcacctctgtcgagcatgcataaatggccgcagtcgcggccgttttgcggccggcgtgaccggtctcgatcaacgcaagaccggcgtcttaaaacgtcacgataaactttccactcacaccctgatcgacagcatccccggacaaggccgcattgtaggacaggcccaccttcatggtgtcggaaacaagcgcgtcgaaacccagttcgatcagcgccgcatttctggttgcagccagcccggtcacgccaaagggcgaaccaccggaaaaggcgacgtcggtgaccggcgaaacatcaccgaatgcataccgccaaccgatcattcctctggcttcgaccacgaggtcgtcgatggaaaaggcagacgtggcgcgcaatccaagggtggtggtcccgacgctgtcgttgccatcgtccaccttgagtgccgcgctccctccggtttcggtgaacccatcagaatttacattgacgtatgcggcgccgaggaatggttccagcgttgcttcgcgcagctcgatcttgtacccggcttcgccgaatatctgcgccgtcgccgccgaatagccgcccgagagacgctcactgaaccctgcgaacacgacatcgcgtgtcgtgtcgacgttatgccaggcataggcgatgccacctcttatagtgaccttgccaagatcgacccccgcatagcccgcaatggaccagtcgtcactgcttgcgcgggcgccacggccatcatcgtcgaaagacgatctgctatagccgccggcgaggccgatcctgacggtatcgctcatttcgccatcgccaccgaggaagaagccgccgatggaacggtctagcgcggatgcctccgaagttgcgtcacgggtggcccatgagcccacgccttgaagccagaagccgtttgcgacctcatcgttccgcgccgtctggccggccccatagagccggtcgttgatcgcatcacgcacgaagcggctgtcgtcgatcatcgaggagcggatcgacgcgtagctctggcccgagagctgatcgagggccgtgtcgatattcgtcggagagacctgccccacgatggcgtcgaaaacagaattgcccgagcccaatgactgcacgccggctcccgtaccgatccttgcaaaggtctgcgccgcgatggcggacacaatgggctctccgttataggtcacgtcgagatagccgctggcggcatcgtaggcgaaggcgaggtcggccagcgggagctgttgcggcgtattggcgaagagaccggcgacaccgccggtggctgtgatcagcgtatagcgggccggacgaaagaaggaaccgaccagatcgagcgacgagccgctgatcgtggccacgccggtgacatcgagaagatcgcttgtgcccgtgaggccgagatagcctatgtccgcgcggtaggtcgagccgggcgccagcagcagattgcccgcgatggcgagcacgccgatatcgtggcctgaactgccgggggagatgaagccgccagcgttcaccgtcgtcgacggcaacgtgctgtcaaagccggcgatcgtgccgctcgaattgaccgtaagcgaactcgagctcgacaggtccatgccgttgatcgccagaaccccaccattgacgattgtcgcgccggtgtaggccgccgttccggaaaagatctgtgtgccggcgccggtcttgacgatgcccagcggaccggcggagaagctgccaagaaacgcgacctgccgccacgccgccgtatcgatggtcagtgtcgtcgccccgcccgacgtgccaacgcttccggcacccgcgagcgagccgatcgtcgccacatgtcccagcaggtcgaggtttccgtcaacggtaaagccactcgttggagacagcacgttatctgcgccggcctgcaaggtggcggcggacctgatcgtcgtatctccggtatatgtgtttattccgccaagggtgagcacgccgctttgcagcgtcagcgcgccgctccccctgatcgcacctgacacggtcgtgctgctcgctgcgattgccagttcaccgtctgaaatcagcacgccgccgagcaatgtcgcgccggtcgaaaatcccagaaaggttgagccaccggtctgcaaagcatccgcgcgcacggcgccatcgccgctcaagccgccgatgatcgcaccaccgttcgcgatcgacagatcacggccgataatgccggcgccacccgcgcccgctggcccaggcgtaccaagagcgccgcccgatccaccggctccgcccgcaccgccggtcacggtcgcccccgcgccgatcgtgaccgcggtcggaacagacgcaatcagccccgcgccgccctcaccaccggcgccgcccacggaccccacaccaccgccagccgcaccaccgacgccgcctgccccgcccgagagcgtggtgccaggtgcgacgtcgtaagggatgcgctgctcctgcgctcgcggataggccggcacgaaaaatgaggtggtgcaaagcacgagggctatctgtatgtggaggcaacggcgcgggtgcgccccgtcgacatcctcgccgtggccagccttgcgatgacgaaataagcgccaacgactgataatggacttgttccctctgcccagaatctcagcgtatgcaagtatttgcgaattgtctaatgaatttggactgaaatcgctgtcggcgtccgtgcaactcggcgcgggtgccagcccaatgcggttcgagccctccccgcgatgctcccaagttaatccgacttgatgctgagatcggtccgcatctgatcgagcagcacggcaatcttctccctcagttcgggggtaccaaggctcgccggataggagatcgccacaccgaatatctcgaacgtatcggggtcgcgcatcgcaatgccttgagatgacacgccctcgacgatctcgttcgaggcataggagcggcccgtggcgcggattttgccaattcgttccagcagttcggcgtgattcctaggagaattcggcgagacatagggaagcggctcgggaaccctctgtctccagacatggtcttccagcatcgccagcatggcacggccgttcgaggtggcgtaggcgggcgacttgtatcccggcgtcgatgcgatcgccaagggactggaaccgcgcacgacacgcagcaccatcaggtcggcaccgtcgaaaaccgtgatgtagccggtatgtccgcccaaatcgcagacctgcttcacccgctggtacaccatgtcgagaaaatgatggcgcgagcggaagatctgcccgagttcgaagagccgcattcccggcgcatagagccgggtcgggtgatcatattcgagcagaccagcagcgacgaggctcttcagagctcgatgcaccgtcgccttcgggcggccaagtctccgcacgaactcagactgcccgatcgccggctctccgagcgagaagcacgcgaaaattgcaacagcatcatcaagaacgcccattaagctactcctaatagcagtattgcccttatttgttccactattgaaattcagtgtcaactttgaaactgatgctggactcgctaatagagatcgcctacgctttgcccaatgacaagagaagctgaattttgaggcaatcgtccgacgtggcgatatttgctcaaagcacggctcgggaacatcgggtacggaccagaacggccggctcaactcgcgtgatctaggattgacatatgcaagctactggccagacgaccggtaagcgcctgcgtgcaggcgtggatatcggcggtaccttcaccgacttcatcctcttcgacgagagcgcgaccgcgatccgtctgcacaagtgcctgaccactcccaaggatccctcccagggcgcattgggcggtctcggagaactggtcgcggctgccggcatcggcatttccgatctttccgagatcgtccatggcaccacgctggtcaccaatgccgtcatcgagcgcaagggtgcctccgtcggcctgatcaccaccgagggttttcgcgacattctcgaaatcggcaccgagcaacgctacgacatctatgacctgacgctggcattcccggcgccgctggtcgagcgctcgcgccgcatggaagtgtccgagcgtatcgatgccgatggcaatgtcattctcgagctcgacgaagtcgcggttctgcgcgccgccgaagccttgaagaaggatggcgtcgaggcgatcgccatctgcttcatgcattcctaccgcaatccggcgcatgagcgccgcgcccgcgatatcatcgccaaggcaatgcccgagctttcgatctccatttcgtcggaagtggttgcggaaatctccgaataccagcgcttcgtcaccacctgcgccaatgcctatgtgcagccgctgatggaccgctacctgcgccgtttcgaaggcgaactcgcgaaaatgggttttgccggcgatttccgtctgatgcattccgcaggcggcctcgtttcgctggaaaccgcccgcgccttcccgatccgccttcttgaatccggcccggccggtggcgcgcttgccaccgcatggttcggcaagaatgccggtcatgacaatgtcatcgccttcgacatgggcgggaccacggcaaaagcctgcctgatcgaggacggcaagatcgacatcgcctcctatctggaagccggccgcgaacaccgttttaagaacggctccggcctgccgatcaagtcgcccgtcgtcgacatgatcgagattggtgccggtggtggctcgatcgcatcgatcgacggcgtcggcctcctgcaggtcggcccgcattcggccggctccgagcccggccccgcctgctacggccgcggcggcctgaggccgaccgttaccgacgcctcggtcgcgctcggttattacgacccgtccttcttcctcggcggacgtatgacgctggatctggatgccgcggaaaaggcgctcggaaccatcgccaagccgctcaacatttcgtccgtggaagcagcctggggcatccatcaggtcgtcagtgaaagcatggcgagtgccgcccgaatccacctcgtggaaaagggcaaggacccgcgcggctactcgatgatcggtttcggcggtgccggcccggcattcgccgccaaggtggcccgcattctcggtgtatcggaagtcatcattcctccggcaagcggtgccgcctccgcgttcggcttcctgactgccccgctctccttcgacatcgtccgctcgcacccgatcgcactgtcgaagaatctcgaagcggacaagctcaacgccattctcgatgaaatctccgaggacggccgcgtgcagttgcgcagcgccggcgttgccaatgcagacattctggtcgagcgctccgccgacatgcgcctcgtcggccagttgcatgaaatcaacgtgccgctgccggcgggcaagctcgatgccggcgcctatgccgacatccgcaaggcgttcgaagccgtctacagcgcgcgttacacgcgcgtgccgtccgaggcgaggctagaaattctctccttccgcatccgtgccagcggtgctgtaccgcaattgaccgtccgtcaggccgggatcgagggcggagcggccgaggcgaagaagagcacgcgcaagacctatttcggaaacggctgggtcgatgccggcatctacgatcgctacgcgatgcgtccgggcattctggtcgaaggtcctgcgatcatcgaggaacgcgaatccaccaccatcatcccgccgggcgacaaggtcacggtcgacgagaccggcaacctgcgcatccagatcgccgagaccgccaagggcgcaaccattgtcgacgaaagcatgtcgctggaagaggccggccgccgcatccagtccgatccgatcgcgctggaagtcatgtggagccgcctcgtcaacgtcgcggaggagatgtggtcgacggtgtgccgcaccgcgttttcgctgatcatctccgaaagccaggattttggctgcgccattctcgatcctgacggcgagacgctcgcccactcggcgcgtgtcatgccggtcttcaatcttacgctgccgatggcggtgaaggccattatcgaacgctatccggtcgattcgatgaagccgggcgatgtctatatcaccaacgatccgtggctctgcgccggtcacctgttcgacctcgcaatcgtcacgccggtcttccatcgcgaccgcgtcgtggcgctgatgggcacggtcggccatgtcggcgatatcggcggcagtcgtgacggcctcaatgtcaccgagctttacgaagaaggcatccagataccggccatgaagctggtgcgcgagggtgtcgaaaacgaagacctgttccgtcttatggcggacaatatccgcgacagcgatcaggttctcggcgacgtccgctccttcatttcggccaatgagaccggctcggcccgcatgcgttccttcatggaagagtatggcatgcacgacctgaaggcgttgtcgcatgtcgtgcagtcgctgtccgaaaaggccatgcgcgatgccgtcaccaagctcacggacggcatctaccattcggaaatttccaacaatccgatgggctcgaccatgaccttcccgctgacggtgacggtcaagggcgacgagatcgaactcgatttcgaaggcgcaccgccgcagacggtcaagggcggcatcaactgcacgctctcctacacgacggcgcatgccacctacccgatcaagtgcatgctgacgccaggcattcgcggcaatgcgggttgctaccgcccattcaccgtaaaggcaccgaagggctcgatcctcaactgcgaaaagccggcgccggtctcacttagaacccgcaccggctggtatctggcaccgaacgtcttccgcgccctgtcggaagcggcgccgcaaacgacacaatccttttccggcttgccgagcctgatgagcttctacggcaagtcggtggaaaccggcgcgctcttctacgagctgctgctgctgggcggcggtcagggtgcatcgcagaccaaggacggcaaatcctcgctgctgtggccgacctcggcggcaacctcatcgctggaaatgttcgagacccgctcgccgatcgtcatctgggagaagagcctgttgaccgacagcggcggcgccggcgaaaaccgcggcggccttggtgtgcgcgtccgcatctcgcgccgcaacgccgaaggcaacccgatcaaggcgatcgtttcgcccgagggcgtcgacttgcctgtggagggcctgttcggcggccggccgggcaagacggcaaccggcaagatcctgtcgaagtccaatggcgaaatgctgcaagactgcggaacaggcgcgatcgtcgatctcgtcgacacgaacgcgatggtcgagctgacactcgccggcggctccggcttcggcgatccaaagaagcgcgacctggacaagctcgatgacgacgtccgccaggggtatgtcagtgccgaggcggccgacacgatctatggccgtgccgctcgcggcggggaacgaaagaagtccgacaccgcagcctgatctttcgaaaatcccggccatcttaggggagatggccggttcttaaaaactaggagaccattcgcatgcagatgaccagacgtacgttcatggggtcggcgatctccgccgccgcgctcgcttcgatgccgctcgagagctttgcggccggccgcaagatcctgatcatggccagcagcgtggatattccgaacttcgacccgcatgtcgccaccggctacggtcccgcgatgcttttgcgcaacacctatgacgcactggtgcgcgtcgtcggcacgccgccggaggtcaagcccggcctcgccgccagctggactgtgtccgacgatcgcaagcgctatgaattcaagcttgatccggccgcgaagttccaggacgggtcgccggtcacggctgaagcggtggtttattccttccagcgcatcatccgactgaagcgtggcccctcgtggatgatatcgggcgtcgttgacgccgacagcgtcaaggccatcgacgcccagacggtcgccatcgacctcaaggcaccgttcgcgccattcctgcaagtcctcccctggatgttcatcgtcaataacgccgtggtcgaggcaaatatcggcagcgacgatggccagacctacctgatgaagaacaccgcgggctccggtccgttcaagatgggccgtgtcgcacccggcaatctctacgagttcgtccgcgtcaaggacgattggcaccagggtggcggcaacctggaaggcgcgatctggaagatcgttcgcgagacgtccaccgaacgcatgatgcttgtgcgcaaggaagcgcatatcgccctcgagctcaacgccgaggatatggaagcgatcaagggcaatcccgcggttgtcagtgtcatcgagccggaataccgcacgttctcgatcaagatgaataccgccaaggggccgctggccgacaagaacttgcgcaaggcgatctcctatgcgttcaactaccagagcatgctggattccgcaggccccgccgaactgatggttggaccgctgcccaccgggatcttcggccaggatccaagcctgaccgtgtatcgccaggacatggccaaggcgaaggagtacctcgccaagtcggagtacaaggacgggggcttcaagctctccgtcatgcacgccaccggctatgaaaaccagcgccgctggtcgctgcttttgcttgaggccctgaaatcgctcaacatcgacctcgatattcgcccggcgacctggccggatacggtagcggcggctcagtcgccggataccatgccgaacttcatgtgcctgttccagacagcaaactatgcggaccccgacaatatcgccttcgcggcctatcattcctcgcgcaatggccagtggcagaacccggtctacaagaatgcggaggtcgacaagctgatcgaggcggctcgcgtcgaaaccgatgagaccaagcgggcgaagctttacaaggcgtttcaggaactggtcgtcgatgatgcgcccgatattttcggtgtgctcgaaaaacgcaagctgggcttcggggccaatgtgaagaactttgtcttcaccccagtcgcggccaacgccatcgagcttctgccgctgtcgctcgactgataaggacgatcgcatagaggaaaagcctcggcataaagtcctcctctggcctgccggccatctcccccacaaggggggagaagacttgcagcactcacttcgccctacgagaggctcggcaggtgcagctgggttaagccctcccccttgtggggagggttgggaggggtctttcatcctcatgcgatcggccaaaactagtgaccaccggaagcgcccatgatcttttatactctgagacgcctcgtcctgttgatcccgatgctgatcgggctgacgatgatcgttttcgccatcgcccgccttctgcccggcgaccctgtcgcgcttgccgccggccccaacgccacgcccgacgtgatcgaaagcgttcggcaggaattcgggctcgataagtcgctgcccctgcaatactgggactatgtgacggggctggtgcaaggcgactggggcgtttccatcttcacgcggcggccagtcttcgaagacatcatgacattcctgccggcaacgctggaactggtggcagccgccatgctgatcgccatcgtgctcggcattccgcttgggcttgcagccgccgtctaccgcaatggtatcgtcgattatctcacccggactgtcgcgcttggcggcatcgccatgccgcgcttctttctcggccttctattgcagctgatgttcgtgtcctggcttgacctgctgccgttgtcaggccgtttcccgctgatcgagatccctccggaaggcccgacaggtttctatacgattgattccatactcgccggtgactggtactcgctgtcgatctccctgcagcacctcgcgctccccgccttcgccatgtcgttgtcccctctggccaccatcatgcgcatgatgcgtgcatcgacgatcgaggttctgcagcaggattttgtcatgaccgaaagggcacttggcatttccagccgcaagatcctgttcaagtacgtcctgaagaacgccatgacctcgacgctgaccgtcattggtctttatgtctcatggttgctcggcggcacggttctggtcgaaaccgtgttcgactggccgggcctcggtctttacgccacgcaggcgatcctttcgcaagatttcatgcccgtgataggcgttaccttggtcattgccatgatctatctcgtcaccatgctgatcgtcgatctgctctacggtgtctttaatccgagggttcgttacacatgaccgacactcagaacaccctcgccccaacctccccgccgaagcgtgaccagtcggcacgcctggaaaactgggcccgcgctttctaccgctttcgccagagctggctgtccgtcatcggcctcgccatcgtcgtggtgctggtgctgctggcatttctggcgccgctcatcgtgccgtatcccgagcatgttgccggtggcaccaataccgctgcacgcttcctgccgcctggcgctgaatactggttcggcaccaatgcgctgggacaggacatgttttcgctggttctggtcggctcgcaagtgtcgctgttttccggcttggcggtcgtggtcattgccatcatcgtcggaggtatcgtgggggcgatcgccgggtatttcggcggctggatcgacgaaatcctgatgcgcatcaccgatcttctcctgacgatcccgagcctgatcctcgccatggcggtggccgccgcgctcggcaccggcgtcaacaacatgatcatcgccatcgccataacctggtggccggcctatgcccggctggtgcgcggtgaagtgatcggcaagaaggaagagcagttcataaccgcgtcgcgcgcgctcggcgctggctggccgcgcatccttggccgccacatcctgcccaacatcatgtcgccgatcatcgtcaaggcatcgctcgacatgggctttgccgttctgaccgtcgcctcgctcggtttcgtcggtatcggcgtgaaggcgccgacgccggaatggggcacgcttctttccgtcgctcgcgccgacatgccggattactggtggacggcggtcttcccgggctgcgccatcttcctggcggttcttgccttcaacctccttggcgacggtctgcgcgacgtcatggaccccaaggcacggcggtgaggtgaagacatgacactccttgacatcaagaacctcaatctctccatgcgcagcttcgagggcgagacgcagatcctccacggcatcgacctcaaggtcgaacgcggcgagatctggggcatggtcggcgagaccggctccggcaaatcgctcaccggcctctccgtttcgcgcctcattccgccggcaaccggccgctatctcgccggctcgatcgagttcgaaggccgcgatgtgctgaaggccggcgaaaaggaaatgcgcgcgctgcgcggccgcaagatcggcatgatcttccaggacccgacaaccaacctcaacccggtcttccgtatcggcacgcagctggtcgatgtggcgctgcatgctggccaggccgacccgaccgcgctcggccttgaacagggtgcctcgtcccgtgatctgaagaaggcggcaaagcgggtggcggtggacatgctcgacaaggtcggcatcccgaaagccgccgagcgcatccacgattacccgcaccagttttccggcggcatgcgccagcgcgtcctgatcgccatggcgatgatcggcaagccggacttgctgatcgccgacgagccgacgaccgcgctcgacgtgtcggtgcaggcgcagatcctgaagctgatccatgatctcgtcgacgagcgcaacatcggcgtgctgatgatcactcataatctaggcgtcgtggcgcagatttgctcccatgtcgcggtgatgtatcgcggccgtatcctggagcgcgggtcggtgacggaagtgctgaaacggcccgctcacgtctatacccaggccctcctcaattccattccgacagcccataccaagcgcggcgagctgcgcggccttggcggcgtcatgccggaggttcagtaatgcttgagatcaacaatgtctcgaagatctttccgggccagcgcaagggcctgtttggtcataccgaaggttttcgcgcgcttgatgatgtcagcttgcgggtgcgcaagggaacaagcttcggcctggtcggcgaatccggctccggcaagacgacgctgacgcgctgtatcctgcggctggaagcactgacatccggcactatcctttatgacggcgccgatatcgcgaagctgacgcagacggagatgcgccgcctgcgcgcccgtctccagatcgtctttcaggacccctacgcctcgctcgacccgcgcatgacgatccacgacatcgtcgccgaaccgctggtcattcatcgtgacatcatgccgatgacctcccgtcaacgcaccgaacgggtgctggaattgctcttgcaggtagggctgcgagcagaacacctgttccgctacccacacgaattttccggcggccagcgtcagcgtatcggtattgcccgggctttggccgtcaaaccggaattcctcatccttgacgaacctacctcggcgctcgacgtttccgtgcaggcggacgtcctcaatctcctgcacggattgcagcaagagttggggctgacctatttcttcatcagccacgatctcggcgtcatccgctatatttgcgacgacgtcgctgtgatctaccgcgggaagctggttgaaagcggaccggtcgaggacatcttcgagcggccgacgaacgaatatacacgcatgctgctggatgcgatgccggatcccgatcctgaccgctcaccattccggcaaaaggtaaccgcctgagttatcaggcatccggatgatgtttttcggttcccttcctctccgcgctaaccgacgcagctaagagaatcctctcatgtcttcagcctggagggagcgacatatcccctgctcccgtcaagcagcgtctttgtgtaggaatgccggacgctgccctccaggagttgctgacgcgtggcgatctctacaaacacgccgtcctgcatgaccgcgacgcggttgcagaggtgcgcgatgacagccatgtcgtgactgacgagaatataagtcaacttcgaccgttcacgcagatccttcaggagattgaggatttcggcctggatcgaaacgtcgagcgccgatgtcggttcgtcaagcagaaggatcttcggctcaaggatgagcgcgcgggcaatcgccacgcgttgccgttgcccgccggagagctgatgtgggaagcgatgccggaaacccggcggcaggccgacgtcacgcaatatttgctcgacacgctcctgcctccgatccagcccatggatttcaaggggctccaacagcgtgcgtccgatcgtgtggcgcggatgcagggagccgaacgggtcctgaaacaccatctgctgctttgcgagttgcgcgcgggaccgcttcgggccgaccacgtcgccatcgatcgaaaccgacccgttccattccttgatgcgtcccgccagcgcgccgagcaccgtcgacttgccgcacccgctctcgccgacgagaccgaaggtctcgccggatgcgacctcgaaggcgacacttttgaccacctgcttgaagtcattgccgctgccgaaggatacggcgagatcgtttaccgatatgatcgacatctcacgcctccgcccagcttgcctgacgcttcagcacttccagtcgatccctgggatggtcgagacttggcagtgcctcaagaaggccgcgtgtatagggatgagttgcgtcgtcgagcctggcggcttcgatcgtttccacgatccggcccgcatacatgatgacgacgcggtcgcagaagctctttacaaggttgagatcgtgcgaaatgaagatcaggccgatattgcgttcggtgatcaggtcatcgaggatcgacagcacctgctggcgcacggtcacatcgagcgccgacgtcggctcgtcggcaatgatcagcgagggcgacgagatcagcatcatcgagatcatgatgcgctggcccatgccgcccgacacctcgtgcgggtagagattgaagacgcgctgcgggtcgcggatattcaccctctccagcatggcaagcgtgcgctcccgagcggccttctttccaaggcgctcatgcaggatgacggtctcggcgatctgctcgccgaccgtcatcacaggattgagcgaatatttcgggtcctgcaggatcatcgagatccggcggccgcggatcgcgcgcatatcggcttcgctggcggccagaagatcaacgtcctcgaagcgcagttcatcggcaacgacgcgggcggagcccggctgcagccgcatgatcgcgcgcccggtcgtgctcttgccggagccggattcgccgatgatgccgaccttctcgcggccaacatcgaagctcacattcttgacggcgttcaccacgccggacagcgtcggaaactgcaccgacatgttgttgaccgaaaggatcggctttgactgttcaagcattgcggggatccatgatgtcgcgcagcccatcgccgagcaggttgaaggcgagactgaccagaagaatggcgatgcctggaaccgtcgtcagccaccaggcgtcgagaagatattgccggccggaggcagccatggcgccccattcgggcattggcggctgcgcgcccagcccgaggaagccgagaccggcggccgtcaggatcacgctcgacatgttgagtgtcaggcgaacgatgatcgacggcgcgcagagcggcacgatatgtcgaaacaggatgcgtcccattccggcgccctgcagctccgccgcgacgacgaaatcggcggcgcggaatgtcagcgtttcggcgcgcgccaggcgtgcgatcggcggccagacagtgagcgcgatggcgatcaccgcgttctcgatccccgggccgagtgccgcggaaaaggcgagcgccagcacaaggctcggaaacgacaggaagatgtcggtgatgcgcatcaggatgacatcgacccagccgccgagataaccggcggtcgcgccgatcgcgaagccgatgggcgcgacgatgaccgtgaccaggatgctgatatagagcgttgtgcgcgcgccgtagataaggcgcgaatagacgtcgcggccgaattcgtcggtgccgaaccaattgaccgatgacggcggtttcagcgccatcgtcagatcctggacaatcggatcgtgattggcgagcagcggcgcgaagacggcgatcagaaccagcatcagcacgaccagaaagccggcgaatgccaatggattggcgagcaggttcagccagaggacatatgccttgtggaggcgtgcctggcgtgtcgaggagaactcctcgttgatcagccaattgtgcagatcgttgaagtaacgtgtcgccatgatgtcaccgggtgcgcggatcgaggaaccgataggtcagatccgacaagaggttgatggcaatcgatatgatgccgatgaggagtacgctgccaagcaccgcgttcatgtcggcgaaaaacagcgccgatgtcagatactggccgaggccgggccatgcgaagaccgtctcgatcagaaccgtgccgtcaagcaggccgcaataggcgagagccacgatcgtcagcagctgcacgcggatattgcggaaggcatggcgccagacgatcgcctgctgtccaaggcccttggccttggcggtgagcacatactcctgccgcagttgctccagcatgaagctgcggctcatgcggctgagataggccatcgcggcataaccgaggatcaacgccggagccgccacatgctgtagcgcatcccagaagacttcccactcgccggcgaggatcgcatcgacgaggatcgaattggtcggcccttcgaccagtccctcgttatagacgctaagacggccgctaccgggtatgaggccgaacttggcataaaagacgaggatgacgatcgttcccagccagaagatcggcgtcgaatacccgagcagaccgacaacacgcgcaaggtgatcgacccatgtgcctttgcggacagcggagatgataccgagcggaatgccgaatcccgctccgatgatggttgccagcgtggcgagctccagcgtggccggaaagacgcgggcaagatcactggcgaccgggttcttcgtcacatgcgactggccgaaatccagctgcgcgacgttgccgagataggtgccgaactgcacataaagcggctgatccagccccatctccttgtagacgcgctcatacgtctcctgatcggcctggtcgccaatcacggcaatgaccggatcggcgggcaccatgcggccgacaacaaacgtgatcacgagcaggccaagcagcgttgtcagaatgacggcaaaggatgccgtcaccttgcgcagcgcgccgagcgcggcatgtccgcctgtcggcgcttttgcggatgtctgtgagatactcacgtcattctcctcgacaggaagggcttactcgcccttcgagacggtgtcccaacgggtgagccaggtcgaatgtccgacatagcccttgacttccttccgcaccgccttcgcgtccgtccgctggaaggaggtgatcagggccggcgaagcgtcgagataggccttgttgatcttggcgtagagatcggcgcgcttctgctggtcggtctcatgcgccgccgccgtgaccatgtcctggatgtccctcggaacctcccaggcggagcgccatgcgatcaggccggagagcttcgcatcgtcggcattgttcgcgttcgtcgcataggacgccagtaccgcgtgcgggtcgggcagacgttcgccggtgcgcgccgagaagatctcgaattcgcggttgcggaacttgccgatgtggtcgccgccctgaaggtcgagcttgatgccggccttggccgcgttcgcctgcagcgactgggcaacttcgtattccggcgtaacgggcgttgcgtaatagaccttggagaagccatccggatagccggcttccgccaggagctgcttggccttgtcgatatcgagcttgtagggattatcggtgctggcacccggcaggccacctggaatgatcgtctgctgcttgatgccataatatttcatgaccgtgttggcgaggccgtcatagtcgatcagatagcggaacgcctcgcggaccttgggcttggagaggatttcgtccttctggttgagcgccaggtagtagaagccgaagcccggcgttttctggacatcggccttgccgccggcctcgatcgccgccagatcggtggaggagagacgcgtagcgacatcgacgtcgccggcctccagctgaagacgctggcctgacgattccggcatgtggcgaaggaccacccggcgcatcttcggcgcgccctgccagtaatccgtgaaggcatcggcgatcaggaggtcgttgacgcgccaggttctcagcgaataggggccggaacccgcgtcgttggtctgcaggaactcgcgacccatgtcgccgttcttctcgttcttggcgagaagctggctgtcaaggatcgaggtggagaagctggcgagcgaaaagaggatcagattggggttccagacctccggcgtctgcaggacgacggtcgaatcgtcggtcgccttgatcagatcatcgacgttcttgtcggtgatcccccattggcgaagatcgaccgagggcgccaggccgagctttaccaggcgacgcagcgaccactccacatccttggcggtcagtgtatttccggaatggaaggtgacgccggagcggatcttgaaggtgaaggtcttgccgtcgtcggacactgtccagctttcggcgatgcccggctgcggcttggtgatctcgtcggccgacaggacgatcagtcgctcatagaggttggcgacgatttccgccgactccagctgattgagttcgttgggatcgagaccgcgcatggaggacatgttggtggcgatcaccaactggtccttgggcgttgccgcctcgacggtaagcggcatggcgaacgtcgatgccaccatggccgaggccatcagaaaactgcgtcttttcatcgtcctattctcctccctggtgcgccggacctcgccccgaacgcgaattttcatatcgacatcgatctgaaatctggtatatcagatctcacaaaacgattttgccgtcaacgggggaattttcgggacatgcaaaaagaggcatcgacggaggctggcgcggaccgcatcgagaagatcgacccgcggtttttgacgaccttgcgcgaccatgcgcacaagagcctgcggacggcgatcctctccgggcgcttcgcggcgggcgagcgcgtcaacgaacgccagctcgccgagcagctcggcgtcagcaccacccccatcaaggaggctctgcgtcagctcgaggcggaagggctggtcgaaacgcttccgcgtcgcggggtcttgatccgtttcaacgcgggttgggccgaagagatgatcctggcgcgcgcagccctggaatcgatgatcgcccaccttgcggccaagcgcatcgaaaaggccgaggccggcaagctggacgacatcgtcgccctcatgcgcaaggcgaccgaggacggcgtggccgacgacctgatttcgctcaacgagacctttcacgagcagatccacatcgcctcgcggtgccagtatctctcgcgcatgatcgaacggcagcagttttacgacggcagcatccgccgcgtcatccattccgatccgctcgagcgcggcaaggcgctggccgaacatgccgccatcgccgccgcgatcatctccagcgacagcgacaaggccgaacgcgtgatgcgcgaccatgtcgtccgttccggcgaaacctacctcaacatcgtgttcaagaagaaggaggacatctgacgtgaccgaggcaatggaaaagatccgcaaggccctgacgggcatatcgggcgtgcccgtgaccccctacaaagcggatggcagtgtcgatatcgccaagctctcggctctgatcacccgcctcgccaatgcgcgggtccacaatctcatggccgccggcaataccggtgagttcttcaccctgaccatggacgaagtgcgcgctgtccacgccgcgacgatcaaggccgctggcggcaagtcgttggtgagcgctgcagtcggtcgatcgctgaccgaagccaaggcacttgcccgcgatgccatcgccgagggcgccgatgcgatcatgggccatcatccgatggacccctttgccggcccaagctaccaggcgcgctacttcctcgagcttgccgaggccagcaccgttcccgtcatcgcctatgtgcgtagcgacaccttttccgtcgccgacttccgcaagctggcgctgcacccgaatatcgccggcatcaagttcgcatcaggcaatctcatgctgcttgccgaagtcattcgcgcgaacaaggacgcgccggcgatctgggtctgcggccttgccgagggttgggcgccggccttttatgccatgggtgctcgcggcttcacctccggcctcgtcaatgtcttccctgagcgctcgcacgccatccatcaggcgctggaaaagggtgactacgcaacggctcgcgcgctcatcgatgacatcgccggcttcgaggcactgcgcaccaaatatctcaacggcgccaatgtcaccgtcgtcaaggaagcgctcggcatgcttggaaccgaggttggccccgtccgcgtccccggtgtcgagagcctgaccgaagccgaacgcgcggacctgcgcgccatcgtcgacaatgtcgccgaaaagagccgcgcggcctgaggaagatcccatgcatatcacaggcatcaagacctacatgcagcgcgtggacgaccgccctcgcctgcttctcaaaattgaaaccagcgaaggcatttccgggtggggcgagtgctacaaccacggcccggactgggcgctgccgccccttctcgattacctctttcaccagatcgagggcgaagatccacgccgcgtggaatttctcgttctcaagctcaatcagcaatgccgctttccgccaggcgcactcggcctcgcggcgatttcagcgatcgatcacgcgctctgggacatcgcaggcaaggccgccgggctgcctgtctacatgctgctcggcggcaatgtgcgcgaccgcgtcaaggtctactgcggcgtctataccgcgccggacccggaagccgcacgcgaccagtcgctcgaactgaacgagaaatatggctacaccgccttcaagctcagcccctatcgccgcgatctgcatgtcggccgctggggtgaactcgtcaaggagactggcgactggttcggcaagatccgcgagatcacgccgtcgcatttcgattatgccttcgacgctcatgcgaagatcttcgaaccctatcaagctgtccagctcgccgccgccatcgcgccaaacgatccgctattttacgaggagcctatccgtccggaacacatcccggcctgggcggaattgaagtcgaaggtcaccgtcccgctcgcaaccggtgaatcgctctattcgcgcttcgaattcctatccttgctgtctgcccgcggcgccgacatcatccagccggatatctgtgtcgtcggcggcgtcagcgaaatgcggcgcatcgcagccatcgcagaggcgcattacgtgaccgtcgcgccgcataaccccatggggccgctggcaaccgcggtaaacatccacttctgcgcggcccagccgaacttcaaggtgcttgagttcaagccgcacgtgcacgctccttgggcggcggatccctacatgcccgtcgacggccacatggaactgcggcccgatcggcccggctggggcctggagatcgacgagaaggcgctgcagagcgaggactacatccactgggagcggaagatcacccgcaaaccggatggtgcgacggcctatccatgagaagtttcgcatctggctgcggcgcgcgaacgcgctgcagccgaggctcgatccggaatggttgcccgtgcccgattttggtctcgaatttatcgagatcagacatatccccggctcaattctcgctgtaaatccccagaaatccagtcatttccgtttagcttttggcgcaacgcagatgagatcgacgtggtatcgaacggtgcggccacccgtttggaggcgatgtagccgtcaaggcccgctaccgcgacatcagggcgcatgtggccgttgtgcatctcctgtaaaaaacgatgcgattgtgtagagaaaacagcagttttcgcttgaagctaaacccactagagctcttagcaatagcgcgatcgaaatttcgcatttggacatcccgttggacgattcttcagcacatttgccagctccgctttccactgccggcttgtatcaagttgcagaagaagagatccaatacggccgcctgcgcataatttcgatgagcggttttcattggccgtatcccatggagtgacgaacggggttttccacgagaaagccgagttttctgacggccggagacggcttgtcgctcacgaaatccagatcctacagggttccactttgatcatgaacgaaaaatctctcatcactcgccgcggcctgctgctcggcatgacgacggttcctctcgccctgtcaggctgcaccagcgtgcctgcgcaagccccgatccccgcggctcagccgcgaccggttggccctcccagcgaagccgaactcgcgacccgctacgccgccatggaagacggcggtttccagcttccggccattccctacaagcagatcgagccgcgcctctacaggcagcgcgtggagaacacgaccggcgaacagcctggaactgtaatcgtggatgtgccatcccgttacctctacgtcgtggagccgggcggcaccgcgatgcggtatggcgttggcctgggccgcgccggtttcgcgtggagcggtgaaggcgtgatccaatggcgccagaagtggccgcgctggaagccgccggcggaaatgatcgcgcgccagccggaactcgccaagttctcggtcgaaaacggcggccaggagccgggtcccgacaatgcgctcggtgctcgtgcgctttacatcttccagaacggacaggacactctctatcgtcttcacggcaccaaggagtggtcttcgatcggcaaggcggtttcttccggctgcgttcgcctgctcaaccaggacgtcatcgacctctacacccgggttccgtacaaggcgaagatcatcgttcgccagtgatcaagatcgtctgccgatctccggcagaccatcggcaatatcgtgtcagcgtcgtctggccggatgttgtgcgcggcgctcgcctgacaaatttcaggtgagtctgacgccacggtcgcggtcgaccgataatcagaccaaagccggcacgggctctacccgtgccggcgcttctttttccggcagcgtcataaagcaagaaaacggcgatctttcagattagcctggcactttagccgtctgcatctgaacgtcgcacttgaagcctgcggcaatcgcggcgcggttccttcaggtgtttctcgcccacggtatggcgtcaatgcgccgcggagacctcgggatcacgttcgggagacaacgtctcgataatccggcattcagcgacagttccgcaggaacacatcgccaacatccggtcgagttcggtttgcaatgctctcagatcagagatcttgcgttgaacctccacgagatgttctctcgtaatcgcgtcgacggcttcgcaggagcggtccttctcgtcggacaaatcaagcagagcccggacctgatcgagcgaaaagccgagatctcgggcccttcgaatgaagcttaaacggttgaggtccgatcgcccataagagcgatagtttcccgcggttcgctccggcactggcaagagaccgctcttttcataaaatcggatcgtctcgacttttgtccccgtcattttggccaaggcgccgatggcaagcgaacggttcttcatcttcatatccctgtagctgatacatggttgtaccgctgaagagagccttgggcaatccggccgatcagaagatttccatagccacttcgggatatgcgccgctcaacgcaacatgcggcgcgccgagtaccggcgcgccgcatgtccaatcgatccttaactacttctgtttgatcaagcgggacgaattggccagaatgccgatatctggcaccgcctgaagcgacgcggcgacgatcggcgggatgacgccggtggccgccagcgaaagaccggcgagattgtaaagcgcggtgaaggcgatattcatcttgaccacgcccatcgtccggcgagcgatgcggaagacatcggcgatcaggccccagtcttcgcgcatcagcacgatatgggcggcctccatcgcgacatcagtgccgccgcccatggcaatgccgacttccgcctgcgcaagagccggcgcgtcgttgacgccatcgccgaccatgaccacgcggtgacccttcgcctggttttcccggaccacgcggatcttgtcctcgggcaggagattggcctggaagccgatgccgagcgggccggcaatcgctgcggccgtacgctcgttgtcgccggtcagcaactcgatccgcgtgatgccgagcttgcggatttcgtcgatcgccttgccgacttccggacgcaccgtgtccatggccgcgagtatgccggcgggacgaccgtcgatcgacatgatcagcagcgtttttccttccgattcaaggcgcgcgaccgcgctatcctcgtcggacatcggaacgaggcggcgattgccgatctcgatcgtccggccggcgatgacggcacggatgcccttgcctggaatggcctcgaagcgttccggttcacccgggcgcagccccttgtcgcgggcatgcgcacgaacggcctccgccaggggatgttccgaatgccgctcggccgtcgccgcgagctgcaacagttcgctttccgtggtgccgtcgagcgaaacgatatcggtgacgttaggcttgcccgtggtcagcgttcccgtcttgtcgacgagaacgacgtcggccgacttgatcgcctcgatatacttgccacccttgatcaggaggccgcgcttcgcggccgcgccgatggacgccatcatggcgatcggtgtcgcaagcgcgaacgagcacgagcacgcaacgacgagcaccgcaaccacggccatgacattgccgctgatcacgtaggtgagcgcagcgatcgccgcgacgatcggcaggtaccagccactgaacttgtcggcgatgcgctgtacttcgccgcgattggcttcagcctcctcgaccagcttgaccgtgcggccgaaggtggtgtcacggccgacgccctcagcgcgcagcttgacatagccgagcttggctatggtcgcggcaaacaccttgtcgcccgtttcggcttccactggcatgctttcgccggtaatcgcggcctgatcgagagtcgcctgaccttcgaggatgataccatcgaccggaacacgctcaccgggacgcacgataacgatgtcgccgaccacaacctggtcgatggtcacctcgacttcgtcgccattccgctcgacgcgcgccttggtcggcgccatggcctgcagttcacgcaacaggccacgcgccttttcgctggtgaaccgctcgatatagacgccgacccgcatcaggaagacgacaacggcagcggtatcccactgcccggtcaccagcgcggcggtggccccgaccgtcatcagcgtatgagccgtgatctcgaagcgcatcaacgatttgatgacgtcaaaaaagatcgtcgctccgaacgcgagtacgatcagggtacccacccagagcggcaccatttccgtcacggcctcgaagatgcccagcgcctcgccgccgacgaccagcagcaggatgacgccgaacaggatgccaagcgcaatgaagagctgtttctggaggttgttgccctccttcacgtagtagggaacgtccgcggatttcggcgcgggaacggtgaagccgaccttcaggaccgtttccttcagcttgtcacggctgacaagtttcgggtcgagatcgatgatcgccttctccgcattgaggagcacctcgacgttctcgacgccggggagtttcttgagcgctctctggaccttcttcgcgcaggcggcgcaatccatgccgccgatggggagctcgagcgtactcatcgtggcacatcaaagccggcatcttcgaccgcttcgaagattgtgccctcggaaatctgctccgggtggagggtgacgctggcgctgttggtcgcaagcgaaaccttgatcgcttcaaccccaggcaagccaccgacagcggcctcgatctgcttgacgcaatggccgcagtccatgccttcgattttgaattcgatcgtcttggtcgttccggacaccatatttctccttttacatcagctcacttcgagcttgtgaaggcaatgtggtgtctgtagtaactacagagtcaaggggctttgattttttctttgcagaatttccgggcgatggtctctttggcggcttcgcaattgaagcactcaacgcgtggcggcctgaacgagcctcgccggacggcttccgcacccttccccggccgggagaatccgagatatctccgtccctccgcctcgtagagcgagctacccattatattgatgtgaaggatgttaggtatgagcttgggatgtggacacgtcttgtcgcgctccgtctgctgcccgatgaggattgcttcacatgttgccgcagtggcgtagagcttccccaggatcacggcgcaatgcggtgatcaaatcaagcggcgccgtaaatgtcttccaatttacggcgcctgacgtgtgtttgaccttagatcgacaacgacagcgcccgaaacggcgctgtcgttcgacgactatatttctaacttccctttgacttgtcgacctcgctcttgacgaggtccatcaggccttgcggtccaaaattgacgagtggcttgccgttcacgaagaaggtcggcgtctgctggacgttattcgacttgacatcggcgacatctgcctggagcacctgctcgacctctggcttgacgctgtagaggcgagcccccatcagttccaagcccgcatcacccgcgatcgcccacgccttcttcaaatcaggctggccgtccacggcccactccggctgcctttgcatcaaggcggccaagacaggttcgaacttgttctgattgcgagcagcctcgagtattcgcactgcttcgtcggacccttcatgaaacggcgtatatcgcagaacgacccgaacgtcatcggggtaggtggcgagaatatttttcacgagcggaaagaacgctctgcaggcttcgcaggacgggtcgaagaattccacgatggtgaccggcgcttccaccttgcccaggacaggcgaatgggggcggacaagtgtatccgccggcgcgacgacagccgccgcgacctcctgttgcgtggcggaataatagtaggcaccgcctccaaatagagcgagcgcgctaagcgccgtagcggtgacgacaagcaggcgtttcatcgaacggtttcccttcggccaataaggagaagaattgaaattgcggaaaatgcgaacagtgacagcaccggtagcggcaccacattgaagattgtcatcttcgcgtcactgcaagacgggcccttgccacagggaacgatagcctcgggaatgaagccatagtagagaagcacatggtagacagcgaccagcaggcctgcgccgctgagaggcaatgcgtaacgccagacattccggtcggcctgtatcacggcaaccgccaaaaccagtgccagcggaaacatgaatgcgcgctggtaccagcacagaatgcacggcgcctggcccatgatctcaccgatgaaaagcgcgccgagggtcgctgcaagtgcaattgcccatgcgaagaaaagcgtcgaccacccgccctcttcttgtcgttctgtcgaaatgctcatgaaatgtccgaataatgcatactcttcaatcatgcaccctcaaccaactaaagggtcaagtgggcattttcccgaatagcgacgcatcgaaggaaaacagcatattttgatgcttttccacagacagtgtggagcctacctcgcgcttgaatggctgttgaaagcacaccagcgatcgaaccgcacatttaagcggggaatctgcggtaaacctgttaaagaccgcccccgtaacgccatggtcacatcacggtcgatgcgacaactacaggacgttactggaggtcggcatcatccggctcgggagtgttcgagcatatcgatctccgccgagatttcgtctattcttgagcgcaactcacggtccgtgccgtcgttgacatcctcgtcgccgaagcaatctcgtgcatcatagagttcaagcttggcttcaagctccgcccgtttggcatacaggcgatggagataaatgtgattcatcgtctcgctcaaccgtgtttccacatctggttgaaaacgagctcccctcactaaagttccaagcttcggagcccgcgctcaagcgaaggcggcgacagcggcgttgcaggctttggaaaaatggccacaacagttgtccttgcccatcgactgacgggtgacgcgggcgccttccagaagcagggtcaaggtgtcggccagcagctgcggttcgcgcgcgccggcggcgagacagagcgcttccagcctgtcgcgctcctccgccttatggcgctcgataacgccataggcggggtgcccctcccctttgagctcgatcgccgcattggccaggtcgcagccgacgtgatcgccacaaaggctctgtgtcctgagctcgatccaagcgagcagctgtgcgcgtgcgtcatcgggatgcgtggcttccagctcgcgccagatcgcctcggccttctcggaggcgcggcgcagggtttcgcataccagttcgtccttcgacccgaagtgccgatagagcgtcatcttgttcgtgagagcaccttcggcaatcgcatcgacaccgatgccgcgaatcccgtgctcacggaaaagctccgccgcggtcgagacgatgcgctcccggggagggattttttcatcggtacccgctggcagcagagctgtcgaagtttttgatttttctgcggacaatgtccttgacatccatgtgaccgatcggtaacaaatgcattgttacttaccggtaacaccacttatcgcggaagtcaatgccgagagggcagcgaagccggagtggaacacgggcgaccgcccacgaaaggaggactgagccatgagaaagaccagagacgacctgacgatatccgaagcccttcgcgaccccctgatcgccatggtgatgcgcgccgacggcgtgaagcttgaagatttcaagcgacttctggagactgcggcggtgaaacgcgaacagcgcgtcaacccggtcaagaaattcatcgacgtcatcaagaccaatcctgctgccgtttgcagctactgctgacgccttgggcttccctgccccccccgaaagccgtcgccttaatggcggcggctttttttgtcttgtcgtgatcgatgtgattgggcgcggaacgggccgtgcatcaggagaagcggagcccgctgggctccgtttccaggcgatccggatcagaactcagaccattcaggctcttgcttgaccgcggcgttacctcggaacgcgttggtcagcctctggccgagctgtcgcgccggcgatgcgacgggaccgtggttgcccgtcatcgccgtcggcttggcaaggctcggccgcgcctggtcggcaacggtgcctccgtccagcttgaactgggacattagctgggacagcgccgtggcttcctgcgcaaggctgtggctggccgcggtcgtttcctcgaccatagcggcgttcttctgcgtgccttcgtccatggcattcacagcggtgttgatttcctgcaggccaagcgactgctcgcgcgacgcttcggcgatcgcgtgaacatggcggttgatctcctggacttcggcgacgatcgcatccagcgccttgccggcctggccgacgagttccacaccggactccacctgggaacccgaagcggtgatcaatgccttgatctccttggcggcgcgcgccgagcgctgcgcgagctcgcgcacttcctgagcaacgacggcgaaacccttgccggcgtcgccggcacgggcggcttcaacgccggcgttcagtgcgaggagattggtctggaatgcgatatcatcgatcacgccgatgatgttgctgatctcgttcgaggattgttcgataagatgcatcgcggttacagcgttgcgaaccacctcgccggagcgttcggcggcctcgcgcgttttggcgacaagctggctggcatcgttcgcgcgtccggccgcgtccttgactgtcgtcgtgatctcctccagcgccgcggccgtttcctcaacggaagcagcctgctgctcggtacgcctggaaaggtcatcggcggaggcgcggatctggctcgaccccgcgctgatggcgctcgcgttggcgccgaccgcctggagcgcgttgttgagcttggagaccgcggcgttgaagtcctgacgaagcgtgtcgaggtcaccggtaaacggcgtatcgatctgacagttgaggtcgccattggcgagatcgcccagcgcgccgccaagggccttgaccgcccgatgcaggttggctgcttccgctgccttctcggcctcgcgctcaaggcgctcgctatcgctcatcgaacgggtggcctcggcctgctgttcgatacgcatccggtcgattgcgttggtgcggaacacggcgacggcggcggccatctggccgatctcgtcgcggcggtcgaggccatgcacgtcttcgccggtctctccggaagcaagtgtttccatgcgttgacgaagcttcgccatcggtgtcgtgacacccttctgggcgatgatcattgcaagcgcaatggccgcgacgacgccaagggtaaggccgacaagggtacgaaggatggtcgatgaaacggacgccgacagcccgctgccgccctcggccagcagatcggccattgccttgttgttcgcgccgaacttgggtgacaggccgacgatcatgtcgtcgagcttcgcggcgagttgctgcgtctcggctgcattgccggcggcgcgtgctgcaagaagctgatcgccgagcgacttcagggcgtccgcgccggcaagcaactcatcgatcgcggccttgcggctcggaaccaactcgggaacctgtgcaaggcgttggcgggcgccggcgaattcggtcgcgaagcgcttggagatgtcgttgaaggcagcagagccaggctcctgcgcgacggcgcggctcagccatgtcgtggatgtccagatgccagctgccgcgcgggcgctgaaggtcgcagcctgactctcgttctgaagaaagccggtatactgctgattggcggcgctgaatctatcggtgagatagagcaggcccgccatggaaacgaggccgagcatggcgatagcaataaggaacttggtttttatcttaaggtttttcaacatgatgcaccttgtaaatcgtgatgagactgcacggcgacgcctgcgaatgagtgcaggtcaaacgcaagtgaaatgaattctgaaactttgggacaacgcatcatgcgcggtggatcgactgctcatctcgacccggcgacctcaacctaggcgcttactcttaaggaaatctgacttttgaaaacacatccggatagaatcgactgcggatttgaattttgtcaaagtcttccgacgacatctcgtaagtatatatttattcaatctaatttttcgattcatgttgttcacaagcaagcgacgcgggctgtggctttacggtgaccgctggttaaccagttgggcaagtgcctgaagagtattgttgcggcacacgcataggtcaccctacatgggcgcgatcattaccttgatcgcgagccgccaccctggcgagccgatttgaaacaagtcatattgaggatgcttagtggtttacacacgccgtaacatcattgccatgtccggagccgcgctggccggggccgttctgccgaaggccgcggccggacaatcgatcgatttcaagccgaacgcgcgctatcccgatccggccatcgaaatcctggatccaagcttcaccaaatacaggctgggaagcagctcggtggaacagctcgccaccggatgtcgctggttggaggggcccgtctggtttggcgatggccgctacctgctcgtcagcgacatcccgaacaaccgcatcatgcgctacgacgaagccaccggcgcatggggcgttttccgcagcccgtccaatttctcaaacggcaatgcgcgcgaccgacaggggcgcctgctgacatgcgaacatctgacacgccgcgtgacccgcaccgaatacgatggaacgattacggtgctggccgacaactacaagggcaagaagctgaattcgcccaacgatatcgtttgcaagtctgacggctccatctggttcaccgacccgcctttcggcatctccggcgaatgggaaggcgagaaggcgacgccggaattgccgcactcggtctaccgcatcgcgccggacggctcgctcgggctggtgacggatgagctcaagggtccaaacggactggcattttcgccagacgagaagaagctctatatcgtcgagggccgtgcgcagccgtaccgtatcatctggagctatgatgtcggcaaggacggcttcacgctcagcaacaagacggcgctcgtcaccgctgatgacaatggtggcctcgatggcttccgggtggacgtcgacggcaatctgtggtgcggatggggaagcaacggcaccgccgccgccaagccggaacagctggatggcgtaaaggtcttcaattcggcgggcaaggccatcggcttcatccgcctaccggagcggtgcccgaacctcgcattcggcggattgaagaagaaccgcctgttcatggcaagcagccattcgctctacgcgctctacgtcgagacgcgcggcgcggtgtgattgaaatgcgagccgtcgcggctatcgcgacggctcgatcaagcttctgacctcagacgatgccgccgctgccgccgaccgatgccgggcgctcggcgacgaccttcttgcggtatccgctggcgcggtatgtcgcgatcggatcgatggcgccaccagcacggcgacgggcttcggcgaggatcggctcgacatcggtgcgataaccgcgcttcagggtttcggtcgccatgagcgcgtcgttctcgtcctggaagccggaaagcgccttgcggtcgacgatcagcgcctgcgcgtaggcgcggcggatttcgttggcgctgttgatcaggctttcgatcggatcggtgacattgtgcgactggtcgatcatgtgggccggattgaagtcgttgacgccgcgctgctcggcctcgaccagttcgttgaacacgaggaacaggcggtaaggctcgatcgaaccggcatcgagatcgtcgtcaccatacttcgaatcgttgaaatggaagccgccgagcttgccgaactggatcagccgggccacgatcatctcgatattggtgttcggcgcgtggtggccgaggtcgacaaggcaatgcgccttcgggccgagcgtctgggcgatcaggtagttggtgccccagtcctgcacgaccgtcgaatagaaggccggctcgtacatcttgtgctcggaaaacagcttccagtcgtcgggcagcgctttgtagatgtcggccatcgaggtgaggtagcgctcaaaggccctcgtgaagttgctctggcccgggaagttggaaccgtcgccgacccacacggtcagcgccttggagccgatcgcctggccgatctcgatgcactcgatgttgtgctcgaccgcctgcgcgcgggttgccgcgtcggtgtggctgagcgatccatacttgtaggagtgggcctggccgggcgcgtcggaaaaggtgttggagtttatcgcgtcgaagccgaggccgagctgatcgcccttcgcctttaattccctgacgtcggtcttgtcccacggaatgtgaagcgagacgttcggcgtggcgcgggtcaactcgttgatgacggagcaatcgtccagcttgtcgaagatcccgcgtggttcgccggtgccgggaaaacgggcaaagcgcgttccgccggtgccgacaccccacgacggaacggcgacgaagaattcggagacgcggcgcgtgatcgcttcaatgtcgacgccacggcgcgaaagattggcgcccagcgcctcgtaatcggatttgagcgcggatgcgcgcttgtcgttttcctgcgcaatcacatcatgcgcgattttaggctcggccatcggttcctccctcttcgcatcgaaccaaacggctcctgtccgcgtttcgatgcgtgaaatgctaaatcaatgacgaggcgaccttggacatcatacgcattcttttcgcgatcatcctgccacctgtcggcgtattcctgcaggtcggaatcggcctgcatttctggctaaacatactgctgacgctgtgcggatacgttccggggatcatccatgcgatatgggtgatcctgcggaagtaacggtcagcgcgggaagctatgcgcgttgccggcatcgacgttgatgatgttgccggtggacttggccgagagatcggacgccaggaagtagatcgcttcggcgatatcctccgggaagacgttgagcttcagcatggagcgcttgcggtagtgctcctccagctcgttgatctcgatcttcgacgaagccgcacgctgttcgcgccactcgccgttccagatcttcgatccgcgcaggaccgcatccgggttgacggtattgacgcgaatgccggcttccgcgccttcaagcgccaggcaacgcgcgagatggatctcggcagcctttgccgtgcaataggccgcggcgttcggagacgatgccagtccgttcttggaggcgacgaacacgacgttgccgccgaggttctgcttgcggaacaggcggaaggcttcgcgtgagacgaggaaatagccggtcgctagaatgtctatgttcttgttccacatcgaaagctcggtgctctcgatcggcgcggacgacgcgataccagcattcgagacgaggatgtcgacgccgccgaattcgacgcaggcttccgcgaaggacgagatcacgccgtcttccttggtgacatccagcttgacgccacgaacggcatcggcgccgaactgcttggcgaaatcggtcttcgtgctgtcgagcgcttcctggtcgatatcggccagcaccacgcaggcaccctcgccgatcaggcgcgcggccgtcgcgcggccgatgccgccggcgccgccggtgacgaaggcaaccttgccggccaggctcttcggcttcggcatgcgctgaagcttggcttcctcgagcagccagtattcgatgtcgaaagcttcctgctccggcaggccctgatattccgaaacggtcgatgcaccgcgcatgacgttgatggcgttgacgtagaactcgctggcgatacgcgccgttgccttgtcgcgggcaaaggacagcatgccgacgccgggaacgaggaagatgaccgggttcgcatcgcgcatggcgggcgaattgtcatgcttgcattcgttgtagtagcgcgcgtaatcggcgcggtagtcttcgagcgccttgtcgagaccggcgacgatcgcatccacatccggcttcgccggatcgaaatcgacgatcagcgggcgaatcttggtgcgcaggaagtggtcggggcagctggtgccgagcgcgccgagcggtgccaagttcttcgagttgacgaattcgagaacggcgtcctgatcgtcgaaatggccgagcttgcgctccgacttgccgatgcggccgcggatttcgggcatcaggcgcgcggcgatggcccgacgctgttcagcggcgaggctctgggttgcggcgccgccaaagatcgtcttgccttcggtcttttcggcgaaccagacgatcgccttgttgatgatctccagcgtcagctcgtagcaagccttcgcatcgttggcccaggtgaagagaccatggctttcgagcacgacgcccttggaattcgggtttgccttgacgaaggcttcgaggtcgaggccgagctggaagcccgggcgacgccacggcagccaaccgatttcgtcaccgaagatctgcttggtcaattccttcgagttcttcgcggcggcgatcgcgatgatcgcatcgggatgcatgtgatcgacatgcgtgaagggcacgaaaccatgcagcggcgtatcgatcgaagcggcacggccgttgagattataggtgcaatgcggaaggaagccgaccatgcggtcttcgtcctcgacgcccttgtagatgcctttcagcgagtccagcttgtcctggtagagggtggcgaagccgtcgagcttgatggtgccgacgtcgccgcccgaacccttgacccagagaaccttgaccttctcgccggtcaaggggtcggtttccatgaccttggccgacgtattgccgccgccatagttggtgatgcgcttgtcggcgcccagcaggttagagcgataaagcagctttccaggctcatccagccctgcagcgtacgagtcatcccaacggttatccagaagccggacggttgccgccatgtcatcctcccatgtaaattcgtcagggcgcgaaatgagtcatacgccctttgcggtgacggtatcgctcatcaaaagcggcattgtcaatcgaaaacgatcaaaaacgattatgttgcagcgcagtatgaaaaaatatgatcgtttgtgattgacacattatcacaactgcggaataaacgatgcaggaggaacccatgcacgaacgcgaacgccatcgcatcatattgagcgccgtacaggaaaagtcggtcgtgacagttcaggatatttccgagctgaccgaggcttccgaggcgacgatccggcgcgatattgcggcccttcatgtgcagggaaagatccggcgcgtgcgcggcggagcggaagcggtgcatccgccgcagctcggcaatctcgccggcaggcctttccgggtttcggaatcagtcaactccgataagaagcgcgcaattgcgcgcgcggccgtcgatctctgcgatcctggcgacgccatcatcatcaacggtggaacgaccaccttccagatggtgcatttcatggcggcgcatcgcatgcaggtgatgaccaattcgttcgcgatcgccgagcatctggtcaagcactcgaagaacacggtgacggttcccggcggcgtgatctatcgcgagcagagcctgatcctgtcgcccttcgacaatgatgcgatccgcaatttctatgcgcggcgctttttcatcggcgctcagggcgtcggcccgctcggcatcatggaggcggatgcgcagatcatccagagcgagcagaagctgatgcatcaagccgacgaactgatcgtcatggtcgattccagcaagtttcatcgccgctcgagcctcattctgtgcccgctcgatcgcgtcacgacggtgatcacggacgagggcgtttccgacgaggcggtgcggatgatcgaggatgcgggcgtcaagctcgtcgttgcgagcatggtctcgcaggcaagggaggattcctcgtcggtcgcctgagcggtgccggcaggatgtagtcaagtcaatcaacgtgggaggaagagagcatgaaattcgcaaagacactggcggtgggcgtcgcctttgcagtcgcattgatggccggcgcagccagcgccaaggacatcaagattggcctcgtggtcaagtcgctcggcaacggcttctttgaagccgccaacaagggtgcccaggaagcagccaaggaactcggcggcgtggaagtgatctacaccggcccgacctcgacgacggccgaaggccagatcgaagtcatcaactcgctgatcgcgcagggcgtcgacgccatcgcgatctccgccaacgatcccgacgctgtcgtaccggccctgaagaaggccaagcagcgcggcatcaaggtgatctcctgggattccggcgtcaacaaggacggccgtatcctgcagctgaacccatcgtcgaacgaactgatcggcaagatgtgcctgacgctcgtcaaggaccacctggaaggcggcaagggcgacttcgcgatcctgtcggcgaccaccacctcgacgaaccagaatatctggatcgaccagatgaagaagcagctcaaggacttccccggcctgaacctcgtcaccaccgtctacggcgacgacctctccgacaagtcctatcgcgaagctgaaggcctgctgaagtcgaacccgaacgtcaaggtcatcgtcgctccgacgacggtcggcgttctggccgcttccaaggttgtcgaagacaagggtctcgtcggcaaggtctacgtgacgggtctcggcctgccgtcggaaatggccggcgcgatcaaatccggcgccacgaaggagttcgcgatctggaacccgatcgacctcggttactccgccacgcagatcgcctatcgcctcgtcaaggatgaagcgaccggcaagccgggcacggaaatcgaagccggccgcatgggcaagatcaaggtcgatgaaaacggcgaagccgccatggcggatcccttcgtctacaacgcgtcgaacatcgaccagttctcgaaggttttctaagcctttcgtggacggaccaaacccggcggcacagccgccgggcctttcccaatgaacactggtaagcgctgatgaacaacgcccttcaacaccctgttgcaagcgtcgcgacaaacgacgtacccgcaattctcgagatgcgcggcatttcgcagatctttcccggcgtgaaggcgctcgataacgtcagcatcgcgctctatcccggcaaggtcaccgcgttgatcggcgaaaacggcgccggcaagtcgaccctcgtcaagatcctgaccggcatctaccgtccgaacgagggcgaaatcctcgtcgacggcaagccgacgacgttcgccaacgcgcaggccgcgatcgatgctggtgtcacagcgatccatcaggaaaccgtgctcttcgacgagctgacggttgccgaaaacatcttcctcggccatgcgccacgcacacgctttcgcaccatcgactggaagctgacgaacagccgcgccaaggcgctgctcacatcgctcgaaagcaatatcgacccgacgatccgcctgaaggacctctcgatcgcgcagcgccacctcgtggcgatctcgcgcgcgctgtcgatcgaggcccgcatcgtcatcatggacgagccgacagccgccctgtcacgcaaggagatcgacgatctcttccgcatcgtcgaaggcctgaaggctcagggcaaggcgatcctcttcatcagccacaagttcgacgaactctacgagatcgccgataacttcgcggtcttccgcgacgggcgcgccgtcggccacggcaacctcaaggccacaccgcaggacgagatcgtgcgcatgatggtcggccgagacgtcgagaacgcgttcccgaagatcgatgtcgcgatcggcggaccggtgctgcaggtcgacaaatactgccaccagaccgaattccgcgatatttcgctgacgctgcgcaaaggcgagatcctcggcatctacggcctgatcggcgccggtcgctccgagctctgtcagtccctgttcggcatcaccaagccgctatcgggcaagctcacgcttgacggccgggaaatcaacatccattcgccgctcgacgccatccgggccggcatcgtctacgtgccggaagagcgcggccgccatggcctggcgctccccatgccgatctaccagaacatgacgctgccctcgctggggcgcacctcgcgcaagggcttcctcaaggcggccaacgaattcgcgcttgcccgcaagtacgccgagcgcctcgacctgcgcgcagcggcgctttcggttccagtcggaacgctgtcgggcggcaaccagcagaaggtcgtgatcggcaagtggctggcgaccatgcccaaggtcatcattctcgacgagccgaccaagggcatcgatatcggctcgaaggcggcggtccatggcttcatcagcgagctcgccgccgagggcctctccatcatcatgatctcatcggaactgccggagatcatcggaatgtccgaccgggttcttgtcatgaaggaaggcctgtcggccggcctcttcgatcgcaaggacctgacgccggaaacgctggtgcgcgccgccaccggcaatgcttgaggatagctcatgtccagactcttgagaaaacgcgaaacgctgctcttcatcatcatcgccgtgatgatcgccgccttttcgacccgtgccgacggctttgcgacgcctggaaatctcgccggcatcttcaacgacacgtcgatcctgatcatcctggcgctggcgcagatgaccgtcatcctgacgaagtcgatcgatctatcggttgccgccaatctggctttcaccggtatggcgatcgcgatgctcaacgccgcctacccggatctgccgctgatcgtgctcatcctcaccgcgatcctgatcggcgcctcgcttggcgccatcaatggcttcctggtgtgggcgctcgagatcccgccgatcgtcgtgacgcttggtacgctcaccatctatcgcggcatggccttcgtcctctcgggcggcgagtgggtcaacgcgcaccagatgacaccgaccttcctcaatgttccccgaaccgtcgtgcttggcatgccggtgctgagctgggcggcgatcatcatcgtccttctgatctatatcgtgctgaagtatacacagttcggccgttccacctatgccgccggcggcaatccgaccgcggccgtctatgccggtgtcgatgtcggttggaccaagttccttgccttcgtgctgtcgggcgcgcttgcaggtcttgccagctatctctgggtttcgcgctatgcggtcgcctatgtcgatatcgccaacggcttcgagctcgacagcgtcgcggcctgcgtcatcggcggcatctcgattgccggcggcgtcggatcggtgcttggcaccgtgctcggcgcgcttttcctcggcgtgatcaagaacgcgcttcccgtcatcggcatttcgcccttcacgcagatggcgatctcgggcaccgtcatcattctcgccgtcgtcttcaacgcaaggcgcgagcgcaaccgcggccgcatcatcctgcgcgacaaggccgccgcggaaactcaaaccgggacccaggcagaggtgtcagcatgagcaccgtcgtttcctcgcccaccgaaaagcgagttatcccaaatcgcctcggcacgccattcaagcggatcatgtccagctgggaagtgctgctcttcggcgtggccgtcctgatcttcatcttcaattcgctggcgtcaccctactttctcgatgcctggaacctctcggacgcgacgttcaatttcaccgaaaaggcgatgatcgcgtttgccatggcgctgctcgtcatctcgggcgaaatcgacctgtcggtcgccgccatcatcgcgctggcctccaccgccatgggcgccgcggcgcaagccggtgtcggcgcgcctggtctcgttgccatcggcgttggggtcggcctgctttgcggcatgttcaacggcttcctcgtctctgtgatgaagcttccgtcgattgtcgtcaccatcggcacgatgagcctgtttcgcggcatttcgtacatcgtgctgggcgatcaggcatacggcaattatccggaggatttcgccttcttcgggcagggatacgtcgtctgggtcttctccttcgagttcgtgctgttcatcgtgctggcgatcctcttcgccatcctgctgcacgccaccaacttcggccgccagatctacacgatcggcaacaatgatttcgccgcgcgcttctcgggcatcccagtcgagcgggtgaagttcatcctcttcatgctgacgggcgtgatgagcggcatcgcggccgtgtgcctgacctcgcggcttggctcgacgcgcccgtcgatcgcgcaaggctgggaactcgaagtcgtcaccatggtcgttctcggcggcgtctcgatcctcggcggctccggcaagatcggcggcgtggtcatcgcggccttcgtcatgggccttgtcaccttcggtctcggcctgctcaacgttcccggcatcgtcatgtcgatcttcatcggcctgctgctgatcatcaccatcgcgatcccgatcatcgcgcgccgcatcaaagccatgagctcgaaatgacgctggaaaaacacgccttcaagatgacgctcaatcccggcatggaagccgaatacatcaagcgccatgacgaaatctggccggaactggtagaactgctgcaccagtccggcgccagcgactattcgatccatctcgaccgcgagaccaacacgttgttcggtgtgctgacgcggacaagcgacaatacgctgtcgagcctgccggagcaccccgtgatgaagcgctggtgggcgcatatgcgcgatatcatggccaccaatcctgataattcgcctgttcagaccgacctcgtcaccgtcttccatatgccatgacgtcaagcaagagctacgcccgcattgcggttctcgatatcggcaagacgaatgccaaggttgtcgtgctcgacagcgccaccggcgcagaggtggcggtcgtcaagaccccgaacgtggtgatcaaatcgcgcccctatccgcattacgatgtggacgcgctttgggccttcgcgctcgacgcactgaagagatttgcgctgtcgcccggtttcgatgcgatttcgatcaccacgcatggcgcgagcgccgctctgctcgatgcggatggagcgctcgccatgccggtgctcgattacgagcacgaatatccccaagagatcatcgacgcctacacggcgctgcgcccgtcattcaacgaaacctactcgccgcgccagtccatgggtttgaacatcggagcccagttgcattatcagcagacggcttttccggagacgttcgccggtgtcgccaccatcgttacctatgcgcaatactgggcggcccgcctgacgggtgtcgcggccaacgaggtgacgtcgctcggatgccatacggatctgtggaacccgcgtgcctcgagctattccagtctggtcgacacgcttgatataaggccgctgatggcgccgatccggccggctttcgatgcgcttggcccggttctgcctgagatcgccgaggagatcgggctttcgacatccgttccagtttattgcggcatccacgattccaatgcgtcgctgctgccgcatctggtcagccgccaagctccgttcgccgtcgtctccaccggaacgtgggttgtcaacttcggtgtcggcggcgatctcgaccatctcgatccgaagcgcgatacgctcgccaatgtcgatgcctacggacgtgctgtcccatcgtcgcggttcatgggcgggcgcgaattcgagattctgtccgccgaaatcggccccgtgccgatcgatgacgcggttgcggccatgcccggggtcatcgagaagggcatgatgctgttgcccaacgtggcgcccgggtcgggcccattcccgggcaaggagcggcgctgggtcaacgcggacgcggcgagcgcggctgaacgccacgcctctgcctgcctctatctggcgctgatgaccgaagcgtgcctggccttgatcggcgccggcgggcctgtcgtcgtcgaggggccgttctcgttgaacgagacctatctcgatctggttgcggcgctgaccggtcgggatgtgatcgccgttcccggctcgacaggtacgagcgcgggcgccgcgctgctggcgggaattgcgccgatcgcgggcaaggagaagcattttccgccacgcgaaatccttcacctggccgagtaccggcggcgctggtacgtcgcgcttgcatagcactctttccggatcggctctttgctccatctatgaatgccgatagagttgcggcgcatttgataccaggtgaggaaagcacgacatgacagtttcatccggcgagggtttcgatccgcgggcgctggccgcgcgtttgagtggccttgaaaaatcgggggaaagagcgcagacggcggatttcgtattgcccgcgacattgcgcgaagcaatggatgcgcagaattttctggcagccgaagagcgcatatccacccatgcgtggaaggtggccatgtcgccggctggcgaggctgtgctcgcgcccttgcacccttatttggaagccgtgtccggcgcatcgatttcatggcgtccgggcatgaaattcgaggcagaagtcgcggtgcgtctgggacaggatattccggttcgtcagaacggtgagtatacgcgcgaggagatcatagatgcgatcgccgaatgccatctcggtgccgagctcctggccagcagcatccaggagagcgggcaggtttccttcctgctctatctggccgaacgcatcggcaacaagggctatgttctcggcccggcgcttccgaaaagcgttgtcgataccatcggcgacaccacgctcaaggtgacccatggcggacaggtgatctatgatgccctggcgcgtcatccgaaggacgacgtgctggtatggctgctggcctacgccaatgacaggctgcgcccgcacacctcgctgaagaagggtgcactgatcaccaccggcacgctgtgcggagcgatcgaactgacgtcgcgcggtcctatcgacatcgtcctcgggaacgaagcgcgtctcagcctttcgatcgtctgatcgagctcgatttcgtttcccgtcgtcatcgcggaacattgacgcgcctcacgcattctcccggattgaacgtcgggaggatgtgatggggagctatcgtctcgccttgtgcgtgctcgttgtctgcgcggccggaggtgcctccgcgagcgaggcgcctttcctgaagtcacttgcgggcagttggaccggtgccggcatgatgaagcgaacgacggcttcgtcgccaatcgatctaagctgcagtttccagtcgaaggccaacggcgaagccctgtcgatgaacggaaagtgtacgggcctgctcgttgtttcgcgcgacgtttcggcgcagctgaccgcgaccggcggcaattacgccggccgctacatcggtccatcaggcagggtttcggcgctcaaaggcgcgagacgtggagatgcgatcgaactcgccgtcacctggtccagggtggtcaacggtgaccgcgccgcgacaatgacgatccggcgttccggcgcgaatgagctgcgtatcaggacggtcgacaaagatcccgcatccggcaggcaggtcgtgaccagcgagatcaatctgcgacgaaactgatgctcatgcgccggtcggttcacgcttttcttgtttggcgacacccacgcccgcctgcggaccggggatcgtgccgttgacagcgaaatcaccgacgatccgatcgtgatagatgcgtggattgtgtgacgcgatggtgcgggcattgcgccaatggcggtcgagaccatgcccgcgcttggccgcggatgcccccaaggcgtcgaacagcacggtgctggcatcgagaatcagcgaggtgacggtggtgacggactggctgacctccagctctgcattgcgacccgccaaagtgatccggtcatgatcgccgctccggttggcctcataggcgcgctgcagcgcctttgccgcctggagaacgatcgcgccggcgctataagccgcgcccctcaccctgcccaccacttcctgaacctgggcgtcctcagccgatcgggacgcgttgccgcggctgtaaacccttttgcgcgccgccacatgtcgcgccagatcgttcgccgctgcgcggccgatgcccgctagcgaagcgagatggaccagttggaagaatccaccggaatagctgaaacgtaccgcgctcggcttgatcaactcgtcggcgatctcgacatcgcgaaagcgggccgtgccgctggcggtcagcgattgcccgaaaccgtcccaatcgtcgatgatctcgacacctggcgccgacgtcggcaccagcgccccgatcggctgcccgtccccgtcgatcgcgccaagtgttatccagtccgcataaagcgagccggtggtgtagaacttctcgccgtcgagcctccagctggcgccattgcggaccagccgcgtcgaatagctgccgagcggtgtgtcgccgagctcggagaagccgctgccgacagtttcgccccgcccaagccttttcagccaggtatcacgccaggcgctgtcgggcgcgttcagcaggtcctcggtgaagccgaagtggctgcggaaggcgtttgtgaggttcggatcggccgcggcgagttcgatgatgaggccgaaaagttccggcaaggctgcacccaggcctccatgtgcgacgggcagccgcagtcgcggaaagccggatacccgcagccagctgtaagcgtcgaaaggcaactcgtgcgcaaggtcccgctccacggcgcgttctccgatacgggcgaagaccggccggaaggattgtgcgagacgatcgaagccctcgctgggcggagcgccccacacctcattgatatcagtcatcttgttcttcctgtccttaggccgccgcgcgctcccgcgcctcgaaatcgcaaagcaagatcgcgatctcgaagccccgccgggcgagccaatgggcgacgatgcgggcgcgcgaaccaaggggatcgtcgatcaggacgacgcgggcgccacggacagcgatcgtccggtaggacacgccgagcaattgcccgccctccgaggagatcgatcccgggacgttggcccgcgcgatttcctccggcgtacgaacatcgagcaggtaggtcgtgcgcgccggatcggcattccatctctccgcagtccgcggatcgatgaaggtcaacgcgtccttcgccgaaaggctttcaccgcgctcgcttgcaaaagcgcgcgcctcttcggacggctcgccgtaagacgccgtgcgtccgctctccagttcaaaacccgcatcggtccagccacgcgtcccgtcgtccagataggagacggcattcgccacaccggcgtcgatcagcgtctgggcgccaaggatggcgcgtggcaggccggcacaggaaacgacgaccttcgtgtccgcactggggacaatatccttgaagcgcagcagcagctcagccccaggcacaccgacggcacccggcacatgcgccttctcatattcggcgagcgtgcgcgtatcgagcacgatcacatcctggccctgatcacgccacgcgttcaattcgaccgccgagaccaccggcgtacctttctcgtcccgaaccttggtgacgaagggaacgccgggaagatcgaaggtcggtagctcctcgcctccttccacccaggctggaatgccgccccgcagaaaatggacatcggaccagccggcttgccgcagtcggtcgacagccgcggcggctgggccgtcgccgccgtcgaccagaacggtccggaccacgcgacgcggcacgaaacggtcgagttccacgtccaagcgttccgccggcaggtttgtcgcaaacagcggtgaggcgtaaccgacctcttcggttgaccggatatcaagcaccgccagttccaacccgtcacccaaccaatcgatcagggtgctcttgcctatcgaatactccgtcatcgtcctgctccccgatttcaagcgtttggatcgagccagaggtcgccgaagctccagttgatcccctgcgatcccgtcacgtagtttttcacacgcctgttggcgacgatctgggcgccggcggcgacgagatcgacggaggccacctcgtcgtggatgagacgctggaacttgctccagatctgccagcgcttcttttcatccggctcgatcgcggcagcctcgagcagcgcgtccgcctcggcgttcgaatagcggctggcattcgagaacggcaggccgatcttgaagttcttgctccaataggcgcgctggatgccgagcgatggatcgaaggtattagaaagcgattccaccaccagatcgaaggcacggtcggtatagaccgtcttcaggaaggtcggcaggtcgtatttcttgatctcgatgccgacaccgatcttttccagctggctcttcagcacatcggcatagccttgaggcagataggaattgtaggtgagcctcagatcgaaacgcttgccgtcggccttgcgcggatagcccgcgtcgtccagaagcttttcggcagcggccgtgtcatagggatgggccacgacgctcttgtcgtaccactgcggcaaggccgtgctgaccgggctcggcgatacctgcgcatagccatagagcgcgacatcgacgatctcctgcaggtttatggcctgagcgatggcaagtctgacctcacgcttggcgaacagcggattgtcgtagttgaagaacaactgctgctgcggtcccgaataggcataggtcgtggtatcgacgatgaggttcggaacctgcttcagcctgtcgagatcggcaagcggcaccgggttgtcgccgatgtcggcttcgcccgtctcgagtgccgcggaccgggcggccggatcggtgacgacgcgcaggataatgcggtcgatatagggcttgcccgcgtcccaatagtcgggattgcgctcgaagatcagatggctgccgggcacccattgcgtcagcttgaagggcccggtgccgatcgccgtctgcagcgtctgtccgtcaccgggggccagtttctcgaagatgtgcttcggcacgatcggcgattccgagctcgactgcgccgcaagcaggaagggagccggcttcgacaacacgatgaccgcggtgagcgggtcgggcgtctcgaccgccaccacgttctgataggtgatgcggccgcgcggatgcgcttccttcagccggaagatcgagaaggcgacatcctcggaggtgaaatccttgccgtcatgccacttcacgcccttgcgaagcttaaatgtgtagcgaagattgtcatcggaaaccgaccactccgttgccagaagcggctgcggcctgacgtcgaaatcgaacgtcagcaggccttcgactatcttcgggccgatcgcctggccagtgcccgacgacgtgttgatggcaaacagcgcatttcccgggtccacccgatagagccagttcaaggtgccgccggtcgccggcgccgcgccttggccaaaagagatcgacgggagcaaggtgctggcgcttgcaagcaacatcagctggttgaaactgcgacggttgatggacacgcgaagtgctcctctctggttggattgtggtccgctgagggggagcttcggcgctgaacccgaaaaggcgaagtcatcgtttcttctcgtgaaagaaaagaaaagttgcatcggaaacagcgttcacagtcagcctgatgcgaaggaaaagctgctcaatttccgtgttttgacaggatgccgtttcgttgactggaaaacagacgaaacgcgaagtccaatcgccccggcgaaagaatttctttccgagaaaccaagcagatatttctggacttgaacggccagccggccaaccgttggcgcgagatattggggtgcaccaaccccattagcgtcattcccgggaggcacgatgccgttcgaaaaggctgccgacgacacgcttccgcgccacgtcaggacccacacgccccaaaatcccgccgaatacgagaagcgcgctgccggctcatggctaccggcacgcgaactgcccgtgccggccatctatcgttgaaaggaaccgcaatggcgaaacgcaaggacaagatcaagctcggcgcatttctgctttttaccgggcaccacgtcgccgcatggcgccatcccgccgcctccgtcggcaccgagttcgagaactatgtggaactcgccaagctcgcggaagcagcgaagttcgacgcgatcttcttcgccgacggtgttgccgcacgcatcaaggatatcgaggcggcaagccgcaaggcacacagcggcgtctatccgtttgagccaatcactctgctgtccgcgctttcatccgtcacccgcaacatcgggctgatcgccaccgcctccaccagctactccgatccttataatctggccaggcagttcggttcgctcgaccggctgagcggcgggcgggccgggtggaacctggtgacttcctcagaccccgacgccgccttcaacttcgggcacgagacgcagattctccattccgaccgctacgagcgggcggaggaattcgccaatgtcgtgctcggtctgtgggacagctgggaggacgatgcctttctgcgcgaccgcgaaagcggccgctacttcgatcacgccaagctgcaccggatcaaccatagcggccggcatttcaaggtgcgcgggccgctcaacattccgcgttcaccgcagggccggccggttgtcgtccaggcgggcgcctcagagcccggcaaggaactcgccgcacgcaccgccgaagcgatcttcgccgcccagatcacgctcgatgaagcgacagccttttacgccgacgtaaagggacggcttgcgaaatacggccgctcgcatgacgatctgaagatcctgcccggcattttccccgtcgtcggccgcacgcgatcggaggccgaggagaagttccagtcgctgcaggatctcatccagccggaggtcggcctgaacctgatctcacagctgtcgggcgtcgatcttcgtgactacccgctcgatggtcccgtgccggacgatccgcccgcgaccaatgccggcaagagccgccaggcgctggttctggatctcgcccgccgcgagaacctgacgatccgccagctctatctgcgtattgccggcgcgcgcggccactggcaagtcgtcggcacgcctgatgatatcgccgatcaactcgaggagcgtttcgagaactacggcgccgatggcttcaacatcatgtcgccgatcatgccgggcgggctttccgacttcatcgagctcgtggttccggaactgcgccggcgcggcctcttccgtcacgaatatgaaggcacaacgctgcgcgagaaccttggtctcaagcgccccggaaacagcctcgccgcccgcagcggcgctgtcgctgccgagtgagggaaacacatgagccgcgacacgctcttcctgatagcccccggattctcggatccgaaacacgccggccagacattcgtctgcccccattgcaacgcgatcgaaggactgcttgcaagcttcccggagctcgcgagccggctcgacattcaccgcgttcccttcccccgtccgcgcgcacgcgtgatcgacgctgtgggtgaggacaaccagtccctgccggtgctgctgctcggctccaacccaccgaccgacgcagaaagttggaaaggcaagagcttcgtctccgggaccagccgtattctcgatcttctggccgaacgacatggcttcccgcgactgcacgattgacggacgagcgacgacagctcaatccggccgaacaaaggaccccacatgtctgtgcatggttcctgcccggtgcagatctcgagccgtgtgcgttgaagtgagcctacgcggcggcttcactctgccgcgatcatgtctgcggtcggcgagattcggcgcgtgatgatttcgtccatcgtccgcagtgcgcgcgcctcggcaagcaaccactcgcgaaacagatcgacgcgcataagccgcgccgtgtgcgccgtactggcgaagaaataggacgaactgaccgggtgcggcacgccgaagggactgaccagccgtcccgagcggatttcggcttccgccagcctgatcttgccgagacccagcccttgcccggccagcgcggcatcgagaacaagcgacgattggttgaggcgaaatccgccctgcgacagacgatgggccagcccggcgctgcggagccagccactccaatcagggcaggagtgatcgtgctcggcaccctcctcatgcagcaacggcacatcttcgatcgccttcggattgccccacaagccgtaggtatcggcaaattccgggctgcagacgggcaagacggcttcggagaacagatgattgacgacaaggccggggtaaggcccgcttccgtagcggatgacgcaatcggcgtcgccggcgtcaaggttgacgagccgggtcgatgcatcgaccagcacctgcagcccgggcgcagcgcgacgtagcgcatcgagccgggggatcaaccatttgcttgcgaaggacggggcgaccgaaatgcggatcggctcgtcatgatcgttctgaacgaactgcgccatcgcggcgagaacggcgtcgaaggcgccggtcaatccgggcaccagagcgagcccggccggtgtcagatgcagctggccgcgcacgcggttgaaaagcggctggccgagataatcctccagcaggcgaatctgttggcccacggctgccgaggtcacgtgcagctcttcggcggcgcgaatgaaattcagatgccgcgctgtcgcgacgaaggcccgcaacgaagtcaaaggcggcagccgcgcaagcgtcggctggagtgcttttctgcgagagtcggtgaaggtgctcatgagttgattgcaccacaaactcgcacacgaagacgagaaccgcctttccttcccgcccggacggaggaacattttcttgcgccgtgacggtcgatctgagatgcaaaaactcattttcataaattgtctatatttttagtagattaaaccgatgcccgcctgccagcgcgaagttttcctttgccggacagggagaaaaacattcttccggtttcacgcaacgctgcccgatgatggcgaagacgacgcttccgatagaggcgtccatcgcaattcaggggatcatcatggatatcagccgacgccaactcaacaagctcctcgccacaaccgggctcatctcgctcctgcctctcagagctttcgccgagaccacgacgccggcaaagggcggcaccttgaacttcatcgtcgagccggagccgccgacgatcctggcgctcgcccataccgccggcggcacgcaaaaggtcagccccaagatcaccgagggcctcctcacctacgatttcgacctgacgccgaagccgcaactcgccaccgaatggtcgatcagcgacgacgggctgagctacaccttcaagcttcggccgaacgtcaaatggcatgatggcaagccatttacatcggatgacgtcgcctactccatcgaactcctgaagcaggtccacccgcgcggccgtggcaccttcgcaaatgtcaccacggtcgaaacgccggacccgctaaccgccgtgatccggctttccaagccggccccctatctcctcagcgcgctctacgcggccgagtcgccgatcgtacccaagcacgtctatgacggggtgaagattgccgacgtcccgaccaatcccaacggcggcgcgccgatcggcaccggaccctttgtcttcaaggagtgggtgcgcggatcgcacatcatcctcgagcgtaaccccgactattgggacgccggcaaaccctatctcgaccaggtcatcgtgcgcttcgtgccggacggcgcggcgcgcgcggccggtttcgagaccggcgaattcgatatcggcggcgacaatccgatcccgttgagcgatctcgaacgcgtgaaggcgttgccgaacatcgcggtcgaatcccgcggttacgagaccaggggcgaccagacgcagctgatcctcaatctcgacaacgtgtacctgaaagacgttcgtgtccgccgcgccatcgcccacgcgatcgacctcaacgtcatcctgaataccgtgtggtacggctatggccagatctcgccgagcccgatcagcaccttgctaccacgctatcgcgacccttcgatcaaaccttacgccttcgacctcaatgcagccgaaaagctgctcgacgaagcgggatacaagcgcggtgccaacggagtgcgtttcgacctgcgtctcacccacaattcctacaatgaaggcttcaagcgggtcgccgaatatctgaggcagaacctgacgcgcattggcatcaacgccacgatcgattcctacgacttctccacctacatcaagaaggtttacaccgaccgcgccttcgacgtgacggcggaatatctcggcaaccagttcgacccgacacttggcgtgcaacgcatttactggtcgaagaacttcaaggtcggcctgccgttttcgaacgccagccattataacaacccggtagtcgacagactgctcgaagccgcgtccgtcgaaatcgacgatgcgaagcgcaaggagcagttcttcgccttccagaagatcatcgccgatgaagtaccggtggtgaaccttattgctcttgagaacgtcaccgtcttcaacaagcgcgtcaaggaccacacgatcggggccgagggtgtgcagtccaacttcgcggatgtctacatcaaggatggcgaaggctgagtgcagcggcctgacctgaacgagaaaggggtgccatgaggcgccccttttttgcattcagagaaggatgtcaggcgatacggatcggcgtgaatttcgccaggatgcggtcggcaagcgcgatcgcctgggtgcgctgctcggtgatggagctcgattcccatgcaacgccgcgcaacgggtgcccgatggcgctcagattgcggtgaacaagaccatcctcgctgatgagatcgcccgcgggcgtcgcatcgatgccgtagccggtgctgtggggacgaacctcgccgcttgcgagcaggctcttcacgaagggatcggagatacggcgccagtcatgcaactgatgcccccgacaatcgatcacgccgtcgaacgagacagtctcgacgttcgtttccgtcttcaatctggcggtgatgtctccatgctcgacggcaaatgcgaggatgcgtgcgcggccatgccgtagccgctgctctgccttgacgcgctccacgatctgatggctctccggtgccgagcgatgcgcggttacgtcccagaaggccctgagatggcgagtgaaccgcagccgctccaggtcgctggcgccctgccacaacgagagaatgtgcggacggatcgccagcggcagaccttgccagtcagcgccaccagccgcgatcgcgcgccgttcagccttgacgcgcgacagcagttcgcgcgctgtcgccggcaaaggcccgtcggccaggaagtcccgcgccgcctcgacggtcctgcgcccttcgacgaactggccgcgacgcgatacgacgcggtagcgcccacgataccccctcgcctccatgctggcgatggcatcgaccatcgacaggctggaaccgatgagcagtatctcgtcgcagtcgacgagccgatcgagcgcgcgtgcttcccatggatttgccgcgaaacgcggatggccggcaagatgggattcggttgccgacagccgaggctggaaagcgccaagggccaatacggcttcgtctgcctccaccagcgtgccgtcggcggtcgtgatccgtatccggctcggcgccgccaccaatgcctcggccgacgaccgtacatgccgaagcgtcgagccgagccgcgcattggccacggcatgggcgagttggtcgcgaacatatgtcccatagaggtaacgtggaggactgctcgagcccacctcggcgggaggcgtccaaccgttggcgggaccgtgatcgacaagccagcgtgaaagatgatcggggtcttccggatagagcgaaaagatctcagcaggcccgttgacgagatggaccggctcaggcgtgctgtaggcaatgccgcgtccgagttcctcgcgccgctcgatgaccgtgatcgcaagaggcacttcggtccgatcaagcagcttgagcgcggtcagcgcgcccgcgaagccgcccccgacgatggcaacggagtgatgcggaatacgatcgatacgcaaataggtctcctttcccatcgatatcgatggggtaaatctctcattggaccgcaatgatatgcggcttggctgatcacgcggggattgcggatggatccggccgccgcctcagaagaccctgccttcctccagatgcgttgtggtcccgttgatgtagaaatcgcccaccacgcgggccttgtgcagcagcggattgtggttgagcaccgtgcggatgttgcgccagtgccggtcgagattgagatggcgcgaggtcgccgagccgccgccgagttcgaagacgttggtggcggccgccagcgcgatctgtgaggcgatgatttgcgtgcgcgccgtcgtgagcgcgctttcgatcagtgccggttcgagcgcctgcggatcccccgcgccgaacagttcggccgttctgtccagcgcgcgggcgctttcgcggatcagcgtgtcgacggcgaaggagccagcggcaatctcacccaggattttttgcacgaagggatcggcattggcggtttcggcggcgctgtgggcggccgagcgtgcctggcggcggacatactccgtcccttcggccagcgcgccgcgcacggcacccgccatcgaggccgcgaggtgcaactgccgcagggtcgatgtatggcgcccaaccagcgtgttgagcccgcgcgtggagatctcgtgcggcagcacctcgacatcttcgagcaagacgccgccgcttgcggtcaaccgctggcccatgccgtcccaatcgtcgaggatcgagatgccggggcgatcgacgggtagcagcacgctgacgaactcgccgtcatcgtttctggcgctgaaggaggcaaagtcagagaaggccgtacccgtcgcataccacttgcggccgctgaggcggtagtggtcacccgatttcgtcagccgtgtcgtcacttcacccggccgtttggtgccctgctcggtatgcgcgccgccgaagagcttgcccgacaggacccggccaagctgcgtgcgatcaatcgcagtatttggggtcagaataagggtttcggtgaagttgaaatgactgcgcagcgcatgcgcgacatttgaatcagccgcgccgatcgccatgatcatctcgatataatcggtgaccgatccgccggggccgccgagtgcgacgggaacgcgcagcgccccgaaccccgcctccttgaactgccggaaggcttcgaagggaagttcgcgctccaggtcacgcttggccgcctccttcgctatccctgctgtcagcgccggtattttcgcgagcagcgtcgagagttcaccatccgcctgcgcgggaggcgcaagcgtggcggacgatgatgcaggagcggtattcggcatgcgggacccttctcggccggggaaagaagttggaaggccccgcctcgacagcggggccctgtcttgtgatcaaaaggccacgatcaggcgacggcgcgcgccaacggcacgacgttgtctgcgccatcggcgccgctgcgcggcacgcgaccttcgaccggatggctcggatcgttgaagccggcggtagacggatggccggtcgtgaccagccggtcgaccagcacctcgtcctcggggtcgagcttgacgtcgagagcgcggatatagctatcccaatgctcctcggtgcgtggtccggtgatcgcggctgagaccagcttgttgttcagcacccaggcaagtgcgaactcggtcggcgaaattcccttgcgggcggcgtgcgcggcgatctcgctggcgattgcgatcgattcaggacgccattcggtctccaggatacgcttgtcgccgcggccggcgcgggtgtcggcggcaggttgctttcccggctcgtacttgccggtcagcacgccacgcgcgagcggcgaataggaaacgacgccaaggccgtagtgatgggcggccggaagctgttcggcttcggctgtgcggttgacgatgttgtaaagcggctggctcgccaccggacgatcgatcccgagttcatcggcaagctgcgcgatctcggcgatgcgccagccccggaaattggaaacgccgaaatagcgcagcttgccggcgcggatcaggtctgcgatggcgcgtaccggctcttccagcggcgcatcgaagacggcgcggtggaaatacaggatgtcgatatagtcggtgttgagacggcggagcgaattctcgacggtctcgatcacccacttgcgggaatggccaccaaggttcgggcccttcttgtgcgaattgacgaacttcgtggccagcacccagtgatcgcgatgcgccttgatgcccttgccgacaacctcttccgacttgccgtcgtgatagacgtcggccgtatcgatgaagttgatcccctgctcgcgcgccttgtcgatgatgcggaacgcgacgtcgtcgggcgtcggcccgccgaacatcatcgttcccaggctgagcggggaaaccttgagcgcgctgcgcccgagatagcgataatcgaccatagtcttctcctttttactgagcgtgatggcaggcggcggcgtggccgctgccgaactggcggaacgccgggtcttgcgcccggcagatatcggtggcgagcggacagcgcgtatggaaacggcagccggagggcgggttgtgcgggctcggcagatcacccgttatcggcgccgcctgcttgcgccgcgacggatcgggtacggcggcgagcagggcctgcgtgtagggatgcttggcgcccttccagagttcgctcgtcggtgcgctttcgacgatgcggccgagatacatgacgagcacgcggtcggcgaaatagcgcacgacggagaggtcgtgcgagatgaacagataggagagcgacagttccgtcttcatttcgaccaggaggttgaggatctgtgcctggatcgacaggtcgagcgccgaaacgggttcgtcgcagatgaccagttcgggttgcagaatgagtgctcgcgcgatgccgatacgctggcgctgaccgccggagaattcatgcgggtagcgatcgagcgaatccgcgggaaggccgacatgggccaccatctcggccgcgatcgcctcgcgctgcttgcgctcaccaatgccgtggaccgccagtggcgccgtcaggatggtgcggatcgtctgcctcgggttgagcgaagcgaagggatcctggaagatcatctggatgctacgccggaccgaccgcagttcacgcccggccatcgccgttacgtccctgcccttgaaggtgacgtttccggacgacggattgacgagccgaaccagcgacttgccgagcgtggacttgccgcagccagattccccgaccagcgccaccgtctcgccttcaccgatctccaaagaaacgccgtcgacggcgcgcacggtgccggcggcgccggcgtaatgggtcgagagccgatcaaccgacaaaagcgacatgagacttctccgcaatggctggaacataggggcacgccacctgtcggccggccggcaacgcgatcagttgcggcaccgcggaagcgcaggagggccgcgcgaccggacaacgcgggcgaaacgaacagcccttttcgcccgccgccgagacgatcgagcccggaatttccgaaagcgggccgtcgcggtagtggtaatcggccttcaggcgcggcgatgccgagagcaggccgttggtgtaggggtgatagggcttttcgaacacttcgcccggaagcccctcctcgatcttgcgcccggcatacatgacgacaacgcggtccgcccattgcgcgacgatgccaagatcatgcgtgatgaggatgaccgccatgttcagttgaacgcgaaggttatcgagcagctgcagcacctgcgcctggatcgtcacgtctagcgccgtcgtcgcttcgtcggcgatcagcagtttcggattgcaggcgaccgcaatcgcgatcatcacgcgctggcgcatcccgccggaaagctgatgcggatagtcgtcgatgcggcggcgcgcctcgggaatgctcacgaggtcgagcagcgcgatcgcccgctcccgcgcttgccgccggctcagatcttcatggatgcgcagcacctcgatgatctggtcaccaatcgtcagcacgggattgagcgatgtcatcggctcctgaaagatcatggcgatgtcgcgaccacggatgcggcgcaggtcccgttcggggagaccgacgaggtcgcgcccgtcgaaacggatctggccgcccgcccttgcatgccgcggtagcaggcccatcaggccgagcgccgtaagcgacttgccggatccggattctccgacgatcgcgagcatctcgcccggattggccgagaaacttacgcccttcaccggctcggcggacgcgaagcgcaccgagaagtcggaaacttccagaagcctagacatcagcgctcctccgaaaagcgcgggttcagcgcgtcgttgaggccatcgccgatcaggttgagcgagagcacggtgaaaacgatcgccagccccggcagcgcagtcaggtaccaggcggtgcggatgacatcgcggccggcgccgatcatcgagccccaggagacgcggttgggatcgccaaggcccatgaaggagagcgccgattccatcaggatcgcgcttgccaccatcaccgacgaggtgacgatcagcggtggaagcgcgttaggaaggatctcacggaagatgatgcgagtgtggccaaagccgaggctgcgggctgcctggacataatccttctcgcggatcgcccggaattccgcacgcgtcagccgcgccacggttggccaggaaacgatcgcgatggcgatcgtcacggttgccgtcgtcggctgtgcgatggcaacgagaacgacgagcagcacgaagcttgggatggtctggaatatctcgatgaacttgacgaggatatcgtcgatcaggacgacaaagtatccagccacggcgccgatggcgatccccgccgtcaatcccagcgcggtggccgcaagcccgacggtaagcgatatcctcgcgccgtgcacgataccggccagcacatcgcgccccatggaatcggtaccaagcggataggccgggttctgcccgggccagaggaagggccgcgccaccatttccagcggatcgcccgggaagagaagcggcgcgaacagcgcggagagggaaaccacgagcaggatcgccgttccgaacagcgcgttgtagttggcgaggaagattttcagttcgcgccgcacgccgcgccatgccgtgccggaaaccgaggcgcgcacgtcgggcgcgtggatatgcgtccagcgtggttgcttcgatgcttccgaggctggcggagccgtctcggcctttgcctgtggcgcgaaatcgatcgcccgacccgccaatgttccgaatttctgactgttcatcggcttgctccaattcggggatcgatccatgcctggataagatcgacggccgcgttggcgacgatcacgaggaaagacgaaagcagaaggatgccgaggagcacgctgaaatcgcgtgccatgacggcttcgaaggcaaggcgcccgaggcccggccagctgtacacggtctcgacaacgaccgcgccgccaagcatcccgccgaagtgcataccggccatggtggtgatcggaatgagagcgtttcgaagcacgtgccgcgtcgtcagcacgaaaggcgagacgcccttggcgcgcgcggtacgcacgaaatcctgcgacttgacctccagcatcgaggcgcgtgtcagccgggcatagatcgcgaggtagaagagcgcgagcgaggtcgccggcagcaccatgtatcgggccctgtcaagcagcgccgggagccccgtcagccgcgaaccgatggtgctgtctccgccactcggcagccagccgagcttgaccgagaacagaagaatcagcatcaggccgatccagaagcccggaatagaatagaagagcagcgatatcaccgagatgatgcgatccggcaggcgtccggagaaggccgccatcagcgagccgagcagcaatccgaccacgatcgcgatcgtcaacgcagcgagcatgagcagaagcgttcccggcaaccgctggccgatcagatcggcgaccgacatgccgtaacgtggcgagaagccgagactgaaatgggcgagattgttcaggtaacttccgagctgcaccaggatcgggttgtcgagcccgaagcgttcacgcagcgccgccatcgtctcgacagttgccgagccggattcggcggccatcacatcggcagcatcgccgggcgccagcttcagaaggaagaaattgaggatgacgatgccgaacatcgtaggcacagcctgaatgaccgtcttgctgaccgtgcgaccgatccgcctgtaagccgacatgtgccctacctcgcgatctaaaaagttttccttggtttgtcgcttagtagttgactaattctgtgggttttgtcaaatccatatcggtaaatatttctattccggatgacattttccgcacatttagaaatataatacctgattaatacgatctgtaggttttcgtcccacgccaaagcactgacggggcaaaaatccctaaagccggacagatctgcgcgatgacactgaagcgggccctggcggccctagatcacgagggttgaacacgatgtcactacttcccgaatccacacgccgcagtttcctgctggcctcggtcgcactcggcgtcaccgcgacaggtcggcttccagtctttgcggccacaccgacacgcggcggcacggcaacgcttctgctggctgccgagccgcccgtcctgacgacgatcgcccacacggcctacaatgcggtctatgtctcgccgaagaccacggaaggccttcttacctacgacttcgatctcaatccgaagccgctgctggccagggaatggaccatcagccccgatggcctgacctatacgttcaagctgcgcgacggcgtgaaatggcatgatgggcagccatttacctccgccgatgtcgcgttctcgatcaagacgctgaaggaggtccatccgcgcggccgcaacaccttcctcaatctcgtcgacatcgaaacgcccgacgtgcagacagccatcctcaagctctccaagccggcgccctatctgatcaccgcgctcgccgccgccgaaacgccgatcgtgccgcgccatatctatgaaggcaccaaggtcgcggaaaacccggccaacctggcgccgatcggaaccggccccttcaagttcaaggaatgggtacgcggcagccatgtcgtctacgagcgcaaccccgaatactgggaccagccccgcccctatctcgaccagctgatcatccgcttcatccctgatgccgccgcccgctcgatcgcgatcgagaccggtgaaatcgatctcgcgccctccacgcccgtgccgctcagcgatctcgaacgccttcaggccgtcgacacgctcgccttcgagaccaagggctatcaataccagaacggcgtcagccgcatcgagttcaacctcgagcgcccgttcttcaaggatgtccgcgtacgccgcgccttcgcgcatgtgatcgaccgcaacgtcatcctcaacaccatcaactacggctacggcaccgcgatcgccggtccaatcaatcccaaccttgccaaatggtacgtgccggatctcaagacctatccgattgatctggcaaccgccgaaaagcttcttgatgaggcgggctacccgcggggcgccgacggcatccgtgcccgcataagcctcgactacgtgccgagcggcgagacctatccgcgcggctccgagtatatccgtcaggcgttggccaaggtgggcatcgacgccaccgttcgcagccaggacttcgccacctataccaagcgcatttacaccgaccgtgacttcgacttcgccttcgagggcatgagcaacctcttcgatccaactgtcggcgttcagcgtctctactggagcaagaacttcaagccgggcgtacccttctcgaatggcgccgcctatagcaacgccaaggtcgacgagctgctcgaggcagccgccatcgaggtcgatccgacgaagcgcgtcgagcagtggcgccagatccagcagatcctcgtcgaggacgttccggcgatagacatcgtcagccaaccggaactgacaatctacaacaagcgcatttccgaccacacgaccggcggcgagggtatcgcgggcaacctcgcccatgcctacgtcgcagcgtcctgagccagatcaacgggagtacaatcatgtccattcaacatcgtcccggctcgatcgtcggcctgccgaaattcgcggccccgaccgacttcccggatagtcccctgtcaagagcgctgaagcagccggtgctgctcggcctcttcctgccgatccaggctggcggctggacgcagtcgacgctcgagcgatcgaccgactggcgcttcgactataacaaggcgctgacgctgaaggccgaggaactcggcttcgacctcgtgttcgcgctgtcgcaatggctgccgaagggtggctatggcggcgtcttcgacggccaggcgctggacagtttcgtctcgaccgcggcgcttgccggcctcaccaagaagatcatgctgatctcgaccatgcacgtactctacggcccttggcacccgctgcacctggcgaagttcggcgcgacgctcgaccatatcaccggcgggcgctggggcatcaatgtggtcaccggccacagggcggtcgagcacgaaatgttcggctggccacggatcgagcacgataagcgatacgagctggcggccgagttcctcgaagtcgtccagcgcctgtggagcgacaccgagaacttttcgttcgaaggcgagagcagctggaagctcgggggcggtttcgttacgccgaagcccaacttcggccgcccaatccttgtcaacgccacgggttcggatgccggaatcgcttttgccggccgttactcggacatcgtcttcatcaccagcccgacgggtgccgacatcgaaagcgcgctgcaatcgctgccggcacacaccaaacgcgtcaaggaggcggcgatcggcgttggccgcacggtgcgcaccctgctcaacccgatggtgatctgccggccgacggaaaaggaggcctgggagctcgcggaccgtatcgtcgctcatgccgaccagcgatcgccgcagggcttccagtcgctgaactcggatgcgcaggcatggaaaggccgcgatccccaggatccataccgcgccatcggcggcaacattcgcgtcatcggctcgcccgagcaggtggtcgatcagttcgtgaagctgaaggaggccggcgtcgacggcctgcagctcagcttcttcgacttccgcgacgatctcgaattcttcggctcggacgtcctgcccctgatgaagcaagccggcctgcgccactaggagaaacgccatgacacgcaatgccatttccgaaatctggtacacgcgctgcccggtgcccacgcctgtcggccttgccgcgcagctcggctacctggaggagaacttccgcaaggacggcgtggcgctgaagtcgatcatcgattcgcccgaccgcaacatccgccagagccacttcaaccacacgctcgactggtcgtttcgccatggcggcaacgttccgccgatccgtgcccgttccgagggtcgcaagacgcggctgatcggcatcacctggaccgacgagttccaggcgatcatcaccttgccggaaaccggcatcaaggccaccggggacctgaagggccgtcgcttcggcatcgcccgcaggcccgaaggcattgtcgacttcatgcgcgccaccgctctcaaggggttgatttccgccctctcgcttgaaggccttgctctcgacgacgtcgagatcgtcgacattgcgctgccggactccgtgctatcgacgcaagaaggcccatcactcttcggcctgaagcgtcggcaagcctatggcgaggaggtcgcggccctcattcgcggcgacgtcgatgccatctatgtgaagggcacggcgggcatcaatgtcgcaaacctcatcggcgccgttgaggtggccgagttcggctttcatcccgatcccaaaatccgcatcaattcgggctcgccacgggtgctgacggtggatgagcttttggccgacgagcggccggatcttgtcgcgcgcctgctggactcgatcttcagggcaagcgcctgggccgaagcgcaccccgatgaaacgagacgcttcgtcgcgcgcgaggcgggcgccacggaagaacaggttcttgccgccaatggccccgacatccacaagcacctcggccttggcctgcaaccggagctggtggacgcgattggccactacaaggactttctgcgcgatttcggcttcctcgccgccgatttcgagatcgccgactgggtcgaccgccgccatatagacgctttcgaccagcgcgccgtggcctgatcggagggagaaaaatcatgcttcaggaaaagatcgatccagtcgacaaggcgcgacgtctcgccgtcgatttcgccgaacgcgccgcgcattacgacaagacgggggatttccccttcgagaatttcgcccgcctcttcgaagccggcctgcttggactggtaacggcgctcgagcatggcggccacggcgcaggccttacggaggcgcacgcggtgatcagcgagatcgcgcgcggcgacccttcgaccgcgctcgtgctcgccatgcactacaacagtcactacagcctgcgccgcttcgccagctggccggcacaccttgccgagcgcgtgctctcggccaaccggcttggccctgccctgataaacgccgcccaggccgagccacgtatcggctctcccgcccacggcgcgctgccggaaaccatcgctcgccgcgacggcaacacttggcgcatcactggccacaagagctacgtcaccggcatacctatactcagatgggtatcgctgctggcgctgaccgaagaggacgaacctcggctcgcttccttcctcgttccgaccgacagccccggcctgcgcatcgaaaaggcgtggaacgccgccggcatgcatgcaaccgccagcgacgacatcatactcgacgacgtcgtcattccgctcgaagacatcatcgaagcccagcccgcttctgagccgctgcaccgggaggaacatgcaacggccttcttcttttcgctgatcggcgcggtttaccatggcgttgcgctttccgcgcgcgaccgggtgctcgcctttgccgcccaccacgtgccggcaagtcttggcgcgcccctctcgaccgtcccccgcatccaggatggcctgggagagatcgaggtgcgtcttgccaccaatgcccgattgctgcgctcgctcggcgaggacgtcgatggcggcaaggtcgtcgggatgggcggcatgcatgtccgccatgtcgtcatcgacaacgcagtctccatcaccagcctcgccctcgagcttgcagggaaccccggactcgaccgcgacttccagcttgagcgccatcaccgcgacgccatcacggcgcgctcccacgcgccgcagagccacatgatccggacaatcgccgcccgcaacgcgcttgctggtctggcgccgcgatagaatggcgatgacctcgacctccactgtttgatcacaagcgcaggccaaccatgagcaaagacagcgagttcctctggtacattcccaatgacacgaggcctggccatcgtggcgatacagtcgtcgacaatcacaacagccttgctagtctcatcgatcaggctagagcactcgagcagcacggctggaaaggtgcgctcattgggaccggctggggcaggccggataccttcaccattgcctcggcactcgcgacgaacaccaagacattcgagccgctgatcgcgatccgccccggctactggcggcctgcgaacttcgcctcggccgccgcgacgctcgaccatctcaccggtggccgcgttagggtcaatatcgtctccggcctcgacaacctctccgcctatggcgacaaggagggagatcaggcccagcgctatgcccgcaccagggaattcatgcgactggtccgtaggctctggatggaggaaaacgtcagctatgacggcgagcacttcggcgttacggaatcgaccgtagcgccgcggatagaggcgcatggcgatcgtcgccacccgaagctttatttcggcggcgcctccgcggctgccgaaagcgtcgcggctaccgaggccgatgtccagctcttctggggtgaaccactcgatggcatccgcgagcgcatcgcgcgcctgaaggcgctgagccgcgaactcgaccgggatctgccgccactggaattcggcctacggatcaccacgctggtgcgcgacacgacccggcaggcctgggccgacgcggaagcgaaagtgtcggaaatggccaacggcaatggcgccgggtggagcgatcatcgccgaacgatcgccgtcggccagcaacggctgttcgacctgaaccgtgcgggcgacgttctcgacgacaacctctacaccgcgcccggcaagtatggcggcggcggtgccggaacgacctggctggtcggctctgcggaagatgtcgcgagatcgctgcgcaagtacgaggacctggggatcacccatttcgtcctctccgacacgccttatctctcggagatcaagcgtcaggggaacgacttgctgccgcttttgcggggttagagcctttcctggttagactgaagcattctgttggctcaaacggagtcggatggtcgtccggccggcgcgcgtcgtagccaacgcatacggccaagccggccggacgatcagccggcccgtttcagccaacccccgctggtttacttcgcaaaccggctagggccgggcatctttccgccaggatcaaaggcgatcggctcgaccgtacctaggggtatgcccttcgccaatcgcctttgccctgacgaaaacctgctccggcagaatgcttcaatctaaccaggaaaggctctaagcggccgacgacctcacccggaaagcgtcggaactggattgttccatggatgattttcctgcggacggaagaaacggatttctcggcagacgagctgttacccgccttcggaaagaaggatgtgcccgtgctcgatgctcgccgcgacatcggggggcacattgtcggaaacgagaacgtcaacctgggaccagtcgcagacatgaacgagacctgctttcccaaatttgctggcatccatgagaacgatcgtctgatcggcgcgcgccatcatcgcgcgcttgaaatcggcttcgaacagatcgaaatccgtacatccgcggggagaggccgcgaccattgatgctacgaaataactgggggtgaactgcgacaagtattctatcgtgcctgcgccgacaatcgtcctgtcttcgatgcgcagttcgccgcttggaagtatcagccggtggcgatgacctgaacccgaaaagatttgcgcgacttcaagagaaatcgtcaggatggtcatcggctcccgatgcacgagctccctggcgagaaagcaggccgtggtgctgttgtcgagcaggatggttgcgccctcgcggatataggacgccgcccgaacgcctatcctactctttgcgtcaacctgttcgcgcaggcggcgatcgaagggcggttcggttcgcggcgtcgacatcctgacgccgccatgaaatttctccacaacgccgtccgctgacagaatcttgagatctcgccggatcgtctcgtcggaaacatcacaatgttccgccagctcagtgattgaggcacgaccgcgtatccccagaaggtcgagaatctgctgttgtcgtgcgttcatcgttcattcgctccgtaggtcagggcgcgagatcgagcaattgccccgttcgcgtgtcaaacagcctagcacgcgtcatatcgaaattcagcccgacctcagttccgggctctggtatgtccgtgacgccgattttcacggtcatcgtgtccttgccgagcgaaacgtcaacgagcgcctccgcgcctatgaactcgctgcgccctaccttgacgcggatatcgcttgcctgatcgaacttcgcttcctccgggcggatacccagcatgacttgtgacgggagcgcgttgcgagataggcggagcgggcgtgaaaaggctggatggtccacgtggccgcccgcctgcccggtgcaggagatcaaagccatttccggtgtgccgatgaaagaggcaacaaaagtgttggcgggcttcatgtaaacgtccatcggcgtcccgacctgctgcaattcaccttttgccatgaccgcaacccgggtggcgagcgtcattgcctcgagctgatcatgcgtcacgtaaatgaccgtgaggccgagttcctcatgcaggcgcttgagttcgccgcgcatcctgtttctgagcttggcgtcgaggttggatagtggttcatcgaacaagaacaccttcggctggcgcaccaatgccctgccaatcgccacacgctgccgctctccccccgacaactccttcggacggcgatcgagcaggtcggtaatatgcaggatttcggcggcctcgcgaacgcggccgtcgatctccgccttcgagaggctggtggtcttcatcaggccgaatgccatgtttcggtaggcagtcatgtgcgggtaaagcgcgtaggactgaaacaccatggcgatatcgcgcttctgcggcgcgacgtcggtgacatccttgccgtcgatcagcagttggcccgaggtaatatcctccaggcccgccaccatgcgcagcatcgtggacttgccgcaaccggagggcccgaccagaaccatgaactccttgtcggcaactgtaaggttcacgtcatgaacggtgcgccgttcgccataggatttgcagacatcgtgcaggttcacggttgccatgggatatctccgtttcggggcatcacttgacgccggtatgcatgaagctgtcgatgaagcggcgctggaagatgacaaaggccaggagcagcggcgccacgacgatgaaggttcccgccatcagccgtgtccagtccgcccccgatccggcctttgccaggagaccgagcccgatcggcagcgtgcggatgctgtcggaattggtgaccagcagcggccacatgtagtcgttccagtgcgtcacgacagagatgatgccgaaggcgatcaatgtcggcttcaccagcggcagatagacgtgccaaagaatggacagatgtccgcaaccatcgagccttgccgcatcggaaagctcgctcggcacctgccggaaggactggcgcagcatgaacgttccgtagcctgaagccacgaagggtacgatcatcgcgggaatggtattgacgatacccatatcatgcatcgtcacgaaattggtcaggaaggtcgcatagatcggaaacatgacctgcagcatgaagaaggtgaagagcagcttcttgcctggaaattccaggcgcgcaaaagcatatgccgccagtgtgatcgtgaccagctgacacgccaggatcgccccggtgacaatgaccgaattgaccatgtacatcgcgaacggcgcaacttccagggtttggaggtagttgtcgaacaccagtcgcttcggccagaaacccgcattcggatcgaagacttcatttctctccttcagcgacgtcacaacgatccagaccatcggcgcggcccagagagacgccagcgggatcatcacgagatgcagccagttgcggcgcagcactttcgaaaccgacgtcatcagcgttcacccagatagtgcacgcgccgaccgatcgtcaccgccaccaggccgatcagtcccagcatgaagaacagcaggctgttcgcgatggtcgaggcataacccacgtcctgatactggaaacccgtctggtagatgtagtaggtcaggacattggtactgtccgccggaccaccctgcgtcatgacatagacgtaatcgaagatctggtagctgtgcagaaccgcaatgatcaggacgaaatagagtgtcggcgagatcagcggcacggtgatatggatcagccgcgtccagctgcttataccttcgagacgcgccgcctcatagaggtctgaaggcaccagtttcaaagccgccagcagtatgagcatgaaatatccagcatatttccatatgctcataatcatgatggcgaacagggccgtgcgcgcgttgtagagccaatccagccgcggcaaaccaagggcctccatcccgttgttcaccggcccgaagcctggcgcatagagatagacccagaccatgccggcggctaccgatggtatcatcaccggatagaagaaggcggaacgatagatcgccatccccctgagcttgctgtcgagcgccacggccagaaggagcgccatgatgatcgaggcaggaatggtgatggccatgtagagcgcagtattcttcagcgccttccagaatagcggatcgccgataagccgcttgtaattttcgaacccgagccaatagatctgactgtcgcccagcatcacgtcatgcaggctgaaccacagcgaccgcaggattggccaataggtgaacgcggcaagaaagagaagcgacggaaacaacaggccgtaagccagcagcgcttcatttctcctcgcgacggcaagcgtcttcgacatgcgggggtcccggtatcaggtaaaacataaaggaaggcgcggcagcctctcggatgccgcgctaaaggggatctactcgatcagccggcctggcgacgcatgacgcgggtgatttcgcgattgatctcggcagtcaccgaggtcaatgcggccgccggcgcgacctctcccagcatggtgcggtcgattgccgatttcagcaggtcacgcgcacgcgagtaggctggaacctgaaggaacggaccggactcggttgcctgatcgagagcgactttcgcctgtggcaccttcttgacgtagtcctgcatcagcggcgtttcccaggacgacttgcgtacggcgagatagccggtcgccttgccccattcagcctgtacgtcggtcgaagtcatccagcgtgcgaaagtccaagcggcttccttctgggcatccgactgcttcttggcgatcatgatcggcccgccaccctgcgaggcgccccaggtcttcttcttcggcatgaaggctacgccgacttcgaagggcgacgtcttcatgaggtttgcgagcgagccggtcgagtgataaagcatggcggtcgcgccggccatgaagtcgttggccgaaccctgccatgtcgatgccgtcggcatgacgcggctatcaaccatcgtcttccagaattcgagtgcttcgacggcttccgggcgatcgaacagaaccttgtctttctgccacggcagcaggccgttctggcggcaatagcattcgaacatccaatcgtgccaaccgccaccgatgatcaggccccagcgcttcaacgtgtcgccttcgcgaagtgtcagagccttggcggtcgcgtgcagttcgtcccaggtttcgggagccttggcgatgcctgccgccttgaacgcatcggcattgtagtaaagcaccggcgtcgacggctggaaagacagaccccacaaacgatcgtctgacagggtggtattgaggaagcccgggatgaaatcctgatagatgtcatcggccttggcggccgcagtcagatcttcgacggcatcgaggccgcggaaggtctgcagcgcggaattgatcggcagccacagcgatggcggctcgcccacgccgagcgacgtaatgaccttttgctcggtattgtcgtagttgccggcgtagatcgcctcgacctcgatggccggatgctcggtgttgaagcgcttgatcaacccggagatgatcgcattcatgtcgccggaaacatcgacgggatacatgaactggattttgacgcggctttgtgcgcgagccgagccaatgacgcccggaattgcacttacgaaaggtgcggcaagagccatagccagcaggctgcggcgatttttgtcgaagtttgctgtgctcatctctgaaatcctcttactgatagaaattcaaccaatctgaaaccgtgggccgccacacgaccgcagcagcgccgagttgtaagtgcagccgtgaaaaagttatcggattggaaaagtgaaccgtggtgattttgttgaagtacacgcgcataatcatcaatttccgcaacgtttttgtgacaatcgcgaaaacattgccgtgatcataggatccggcccgaggacgcggtgacaatgtcactgacttgtggaaatgagttaggaggtggaaaacattcctgacttgctgccaaagatggcgcaaaggctatggttatgtttccaagacgatgtcttcgccaaacccgaacattgccaactcacatatcaatggcttcaatgccgaaatcgatttggccaaccaaatcatcgacttgcccgggcagcacgttccccgttatggcgatgccattggaacagatggtgcggacgccatctccgtgaaacatcaatatcggagaggtaagcttctgggacagcaagttcagcaggcgcgatgcaaccaataaggttgtcgccgacaggtgagccggacgcgcctgcccttacgagagatcaacgcctggagcttgccccagccggtcgcacaaggtcctactgcaaagccacgctatcgaaatcgcggtggcccattcctcatgtttgcgagaatctcgtgcctgggcgccagttctccgagcagcctcaccaactcctcatccgcgccgggaacggccaagccgtcatcggaggcgtagagtgcccgcgcaaatccggttgctgcaaacacatagtgtgcagctgacgcttgttcgatgtcaggcggccgttaaggttgcagcttgatgcacgtaggctcatgcttgagaaaccctcgcaaagcccaaccagcttcgccgaaatgagcgaatgctctgcgacccactccatattgccatcggcttcgatacccgatacacctatgataaaatgaataatatcggagatcatcgtgccgcagccaccttccagcgaaaccgtcgcggagagcagctatcgtcagatcaaggccgatatcatcttcgggcgtctcgctcccgggcacaagctgaaactcgacagtctcaaagctgcctatggcaccagcgtcagcaccctacgcgaaattctgaaccgcctgacctccgagggactggtgatcgccgagggacagcgtggctttgatgttgcaccggtttcagaggatgatctgcgggagatcgcggcgctcaggctgctgctggaggagcacgcgctcgaacagtctttcggccgcggcgatgtcgagtgggaggccgctctgatggctgctcattacaagctcgcgcgcatggaagaggtcatggccaccggagataccagcaaggctgaagactggaaacgctatgactgggagttccatcaggcgcttatcgcggcctgcggctcacgccttctcatggacatgcattcggcggtcttcgacaagtatcttcgctatcagatggtcgctctttcctatcgcggcaacgtggctgaggcggagcatcgccagcttctgcaggcagcgcttgcccgcgacagcgcgacggccaaggcgatcctgcagcgccacatccagggtggcgtcgaacacgcgctggcaaagaaacgcctttgatcaacaaccgtgatcacctgtcctcgaatgtcgatcaggaaatgccatgctgaagcccactaccgggatatccgagaccgtcagcgatatcgtcttccggaagatccgcgaagacatcatttcaggtacattggcgcccggcgcgaaaatcaagcttgagcaggcgaaggaacgctattcgatcagcgtttcctcgcttcgtgaaatcctcagccgcctgaccaccgagaatctggtgatggccgaagggcagcgtgggttcgaggtcagcccggcatcgcgcaaggaactggcggagcttgcggatctgcgccgcgttctggagactcacgcgatcgcgctttcgtttgcggcgggcaatctggaatgggaaggccggatcgtcgcggcacatcacaagctggcagctgccgaaaagaagctgttgtcaggagatgcgtcccgcaccgtcgattgggtgcgctacgattgggaattccaccaggcgatcgtctcggcctgcgattccgcgacgctgatgaccacgttatcttcggtcttcgaccgcttcctgcgctatcacatgcttgcccgcagcttccgcggtcaggccgtggtcgatgatcacaagctgctcttccagctcgcacttaagcgcgacatcgccggcgcccaggcggtggtcgtcagccacatccagagcggcgtcgaccatgtgctgaaaagtggtcgacttgcctagagcgcgtccttcggcaaaccctccggccgcatctgcttcttcagcgccgcaatccggaagatggcattcggggcgccgtagccgcgataaccgcgccgctcgacaatctcgaagaagaaaccctcgccgtaagtgccgctgtaaagctggaaatattccccttgctcgtcgcggtcatagagtatgttttctgccttgagccgctcgctgagatcaggatcgaggccgaaccgcgcctctgcgtcatcgtagtagttcggcgagatgtgaagcgccttgaagcctttttcgcgcagtgctttcgcggtggcgaagatatcgtccgtcgaaaaggccagatgctggataccggcgccgaatttctcggcgatgaagtgaccggcaagcgtacggcggttttcggcaccgttcatggtgatgcgaagcgaaccgtcggcattttcgatcacctggctgcgcacgacaccgccgggatcgatgatgtcgacgacgggcgttttgctggtctcgaagatcgaggtgtagaacagcagccaggtcagcatttcgtcatagccgacggtctgtgcgacgtgatcgatccgcagcagccccgcatcggagtccttttccgtttggacctgctcgaagtcgatctccgagaagtggccgagcggacttttgtgatcgatcaggtagatcaagcccccgccgacaccgcggatggcggggatttcaagctcgccctcggccaccgcctgctggaacggctctgcatccagcgccagagcccgtttgtaggcttgcgcggcatcatcaacggcaagtgccatcgcatatgcaaaggtgccatgaaccgcataggcggcactggcaaagcctgccggatcggcattgacgagaatgcggatgtcgcgttgctggtagaggctgacattcttggacttgtggacggccaccttgctgaaaccgagcgtacagagcagaccctcgagctcgacggcttcatcctcgtcggtcgcaaattccacaaatccgacaccttcggccgcagcccgaggcggcatgtcgagcccgattgcggtcttcaccctgcggcccacctggtcgccgagatagatcagcgaacgatggccatcggcggcgatctcgcgcgtggagccgccccggaactggtcgttgaagatctccagcgagtagtagccgtcatagccggtcgaagcgacggcctcggtaaactcggcgaccggcagatcgccctcacccggcatgttgcggaaatgccggctccagtagagcaggtccatatcgatcaggggcgcgtcggcgagctgaacgatgaatatcttctccggcgggatggaccggatcgagttgacgtcgatcttgcgcgacagcgaatgaaaactgtcgaggatcaggccgacatttggatgattggcgcggcggacgatttcccaggcatcgcgatgatcattgataaagcgaccccatgcgagggcctcataaccaacccgcaagccccggcgcgcggcgcgatcgccgagctcgtgaaagtccgcagcggcgcgatcgatcccgccgagcgcggcagacgagacattcgagcagacgagaacgagatccgttccaagttcctgcatcaaatcgaattttcgctctgcacgatcgaaggtccggcggcgtagcggctccggcataccctcgaagtcgcggaagggctggaacagcgtgatcgccagcccgagatcgcgcgccatctttccaacctccgccgggctgcggtcgaaggccaggaaatcattctcgaagatctcgaccccgtcaaaccctgctctcgcgatcgcctcaagcttgtccggcaattctccgctgatgctgacagtcgcaatcgaagtcttcatgtccgtatcctcccgatctcgccagtcgatgatggcaaagcccgcagcttcggcaccttctgtgcaggcattatgcagaatgcctgccgcatttcaattcacgtgtgaaattgattatcatcatagatttttcaaaaaatatgttgctgctagaactgatctctgacaattatgctcgcacacggtcgggagaggatgactgtggaggcccagcggccacccaacggaggaggaaaacaatgttcaaatcgatgctaacccgccgcaatgcgatgctcggcgccgcggctgtcgtcgccgctatcgggctcgcccagcccgccgctgccgtgacacccgaggaaatcaaggctcgcggcaagctgatcgtcggcatccaaggcgacaacccgccatggggcttcgtgacgtcggccggcaagcaggatggcttcgacgcggacatgggcactctcttcgccaaggaacttggcgtcgaggtcgagttcgtaccactcgaagtcaacaaccgcattccggcgctgacgaccggccgtgtcgatgtgctgttcgcgaccatggccatgctgccggatcgcgccaaggccgtgcagttcagcaagccctacaacgcgaacgccatcgtgctcatcggccccaagaacaagtcgatcaagacgaatgaagacatggcgaacctgaccatctcggtcgccaagggcgcggcgcaggatacccaggtcaccaagaacgcgccgccgaccgccaccatccgccgcttcgacggcgatgcggcgagcgtccaggctctcgtttccggtcaggtcgatgcgctcggcggcaacatcttctacatggaccgtgtcgagaaagcccgtcccggcgagttcgaaaacaagctcgaattccagaagctctataacggcgcctgcacccgcctcggcgaaaaggaactgaacgccgcgctcaacaccttcatcgacaagatcaagggcaatggcgagctgaagaccatctacgacaagtggatgaaagtgccggttccggaattcccggaaaagctcgacggtattccgttcacggctggctgagcggagcgctcatggaatccaaatccgagacgggcatcgcgatgcccgtccacccgaccctgtgcatgaatctgcttgtttgagatgcgcgccatgaccaagaccatcttcgtcctcaacggaccgaacctcaacctgctcggcgagcgcgagcccagcatctacggttcgacgacccttgccgatatcaggcagatgtgcgtcgtcaaagctggcagcctcggcttcgaggtcgatttccgccagacgaatttcgaaggcgaactggtggagagcatccatcaggcgcgcgcgcaagcctgcgggatcatcatcaatcccgccgcctataccttcacatcgatcgcgcttctcgacgccctgaagaccttcgatccgccgaagatcgagctgcacatttccaatgtccatgcccgcgaggacatctatcataaatccctcgtgtcacgcatcgccaccgccatcatgatcggctttggtgcgcgcggctatgaactcgccatcgaggcgatggcgggcatggtgggggcaacgaaagcatgaactatcagctggatttcacgcctgtcatagatgggctgccgagccttctcatgggggtactcgggacattcctcctggcgatctgcggcatgctggtggcgatcgtcatcggtatcggcggcgttgcactgcgggactcgccgatcaaggccgtgcgctggctggtgatctgtttcgtcgagctgatccgaaatacgcccttcctggtgcaaatcttcttcctgttcttcgccttgccgcttatcggcatccgtcttgccccgacgccgacggcaatcatcgcgctcggcatcaatggcggcgcctatgcgatcgagatcatcaggggtggcgtccagtccatcccgaaagggcagatggaagcgggcctggcgctcggcctccacaaggtgcaggtattccggctgatcatcctcaagccggcgctgagagcgatctatccgtcgctgaccagccagttcgtgcttctgacgttatcgaccagcatcgcctcggcgatctccgcctacgagctgacatcggtgtcacagcgcatcgaatccgaaagctttcgcagcttcgaggtctatttcacggtgacgatcttctacctcgtcatatcctggctgatgatgcgcctcttcgcgttcttctcggcccgttatttcacctatccagtcaagtgagggtgcagacatgggcagcgaagaattcgtcttccttttgatcggcctgaaatggacagtgcttctgtcggccgtcggcttcgtctgcggctgcctcgccgggcttgccgtggcgctgtcgcgcacgtcgggcatttcgctcctggagcggatcacggctatctatatcggcatttttcagggtacgccgctcttgatgcagctcttcgtcacctattacggactggcgctgatcgggttgaagctcgatgcctgggtggccgttgcgatcggcctgaccttgcacgccagcgcctatctcggtgagatctggcgcggctcgatcgaggccgttccgcgcggccagaccgaggcggcgaaagcgctgagcctcaaatacgtctcgcgcatgaaggatgtgatcctgccgcaggcgatccgcatctcgctgccggcgacgatcggctttctcgtccagctcatcaagggcacgtctctcgcctcgatcgtcggcttcaccgagctgacacgtgccggcaacatcatctccaaccagatattccagccgctgacagtcttcggcattgtcggcgccctttatttcctcatgtgctgcccgctgacgatcatcggcgcgcgcctggagcggcgcttcaatgccgcgcatgcgcgataagacagccacagagatcgatggaaaccacgccatgaccacagcaaccgcctccatccaaagcccgctcgccggcgaagccgtcatcacgatgagccatgtcgagaagtggtacggcgccttccaggcgctgcacgacatcaacatgtccgtccgcaggggcgagaggatcgtgctttgcggcccgtcgggcagcggcaagtcgacactgatccgctgcatcaatcacctcgaaagctacgaaaagggcgaaatccgcgtcggcggcattctgctcggcaatcaggccaaggcgatcgatgcgatccgccgcgaagtcggcatggtgttccagcagttcaatctctttccgcatctgaccgtgctcgaaaactgcatgctggcgccgatgcgcgcgcttggggtcagtaaagcggaagcagttgagcgcgctcgcgcgctgctcgcccgcgtgaagatcctcgagcaggcggagaaatatccgatccagctgtcaggcggccagcagcagcgcgtcgcgattgcccgggcgctgtgcatgcgccccaagatcatgctgttcgatgaaccgacctcggcactggaccccgagatggtcaaggaagtgctcgatacgatgatcagccttgccgaagaaggcatgacgatgatctgcgtgacccatgaaatgggcttcgcccgccaggttgccgaccgggtgatcttcatggcgagcggctcgattgtcgaggaggcgtcgccggccgaattcttcacaaatccgcgctacgagcgaacccgcaagttcctcggcgaaatcctgcggaactaggtgcgggcaagtcgatggcaacgcatcaacaggcagccagcttgaacatcgccgtcatgggcgcggatccgatcggcaagcgtcatatcgaggcactttcctcagaacggcgcacgacgctcgcagcggacaccaggctgctcgtcagcgggcgggcaggcacggaaacatcgcgcgctgccgaagcgatcaagtcatccgcccgttcgggcacgactggtcacttccgggctccggcgcaggacacggagcgatcgtcatgatcagcggcacgacccgattgattgcccatcttggctacccgacggaaaccttcaaggctccgctgatctacaatccctatttcgagaagcatgacatcgacgccgtcgtcgtcccgatgggctgcaagacggaggattaccccacatttctgaagctcgtcttccggctctccaatattcacggcgctctcgttaccatgccgcacaagatcaccacgatgacgttgctcgatgaaatctcgacgaatgcgaaggtcgccgggtcctgcaacgcggttaagctcggcgcggacgggcagttgatcggcgacatgttcgacggcgaaggcttcgtgcgcgggctgctgcgcaaggggcagatcgtcaggggagccgacgtcctgatcattggcgccggtggcgtcggctctgcgattgccgcctcgttggccgcggcaagcgtgcgccgcatcgcgcttcacgacgccaacgagacaacgctgaacggcttgcagggccgcttgaacacgcactatccgcagactgaagtaatctccggatccgccgatcctgccggcttcgacatcgtcgtcaacgcaacgccgctcgggatgcgcaagggtgatcccctccccgtcgacgtctcccggctttcgcccaagaccttcgtcggcgaagtcgtcatgaagagcgagataacgccctttcttgccgccgcacgcgaccgggggtgcgccttccaagttggcaccgacatgcttttcgagcagatcccggcctacctggagttcttcggctttccgcccacgacagccgaggaattgcgcgcggtcgcgaggatttgaaagcccgagatcatcagaataccggctgcaaccagcggcttcgcgtgcactcctttcctaagaagctgttctcggcgacggccgccgtcgcaatgacgccgacatcgacgttcctgtcgccggcgagagcccaacggctctttccggcggcacccgcagtcaccgaacctgccgctcctttcacgatggaccacgcgccggttcgcacgatgatcggcaatccctcggcttcactctcggcatgacattccggtcagtgcttcgggcgaagcgctgctctccgagcggctgtgcaagacttatgagcgcaacagcgtcatcttcaccgccaacctccctttgcgcgttctcctcagagagccttctgcagttccggcagtgcgtcgaagagatcggcgacgaggccgaaatcggcgacctggaagatcggtgcttcctcgtccttgttgatcgcgacgatgaccttcgaatccttcatgccggccaggtgctggatggcgccggagatgccgcaggcgatgtagagctgcggcgccacgaccttgccggtctggccgacctgccagtcgttcggcgcgtagccggcatcgaccgccgcgcggctcgcgcccaccgcggctccgagcttgtcggcaacgggaaggatcacctcctggaacttctccgaggaacccagtgcgcggccgccggagatgatgatcttggccgatgtcagctccggacggtcggaggtcgacagcgcatccttgacgaaggtcgacagacccggatcggacacggcggggatcgcctcgaccgaagcggaaccaccctcggcggcggcggcgaaggacgcggtacggacggtgatgaccttcttggcgtcggtcgactgcaccgtctggatggcgttgccggcatagatcggacgcttgaaggtatcagcggagacgacttcgatgatctcggagacctgggcgacgtcgagcagggctgcgacgcgcggcagcacgttcttgccgaccgaggtggcggccgagataatggtgtcgtagcttgccgccatcgagacgatcaggtcggccagcggctcggccagattgttggcaagctcgtcgctttcggcgagcaggaccttggagacgcccgacagcttggcggcggcatcggccgcgggcttggcgcccttgcctgcgacgagaacatgcacgtcgccgccaatttttgcggctgccgcgagcgtcttggcggtctggtcggaaaggcttgcgttgtcgtgatcagccagaagaagaatggccatgatgtaatctccctttccagatcttagaggacgccggcggatttgagcttttcgacgagctcggcgaccgatgcgaccttgacgcccgccttgcggccggagggctcctcggtcttcagcaccttgagcttcggcgcggtggaaacgccgaaatcagcggggctcttcttgtcgagcggcttcttcttggccttcatgatgttgggaagcgaagcgtagcgcggctcgttgaggcgcaggtcggtggtgacgaccgcgggcaacttgacgtcgatcgtctgcaggccgccgtcgacttcgcgggtcacggttgccttgttgtcaccgatctcgatcttcgaggcgaaggtggcctgcgcggtgcccaagagcgccgccagcatctggccggtctggttgctgtcgtcatcgatcgcctgcttgccgacgatcacgagaccgggctgttcggcgtcggcgacgcccttgaggatcttggcgacggcgagcggctcgacggcatcgtcggtctccaccaggatggcgcggtcggcacccatggcgagcgcggtgcgcagcgtctcttcggccttggccggaccgatcgagaccacgatcacttcctcggccttgccggcttccttcaggcgaagcgcctcttccaccgaaatctcgtcgaaggggttcatcgacatcttgatgttggccagttcgacgcccgtgccatccggcttcacccggatcttcacgttgtagtcaaccacccgcttgacggggacgagaatcttcatggggtcctccaaaggaatggcgcggcattcgattgccgcgaccgatgtcaggcattagcaaaagtgtcgcggcccagtatcctcttcagcgaaccgatcgccgaagcaggcgtgtaggagccggtaacgccgccaagcgactgcgagctcacggaaatctcccactccaatcccttgccggaaaccacgatatggtggcgcatcgccttcgtatcgggatcggcaacgacgatactgcgtgtgcgatcaaaaccgatgcctgcgaatgcgattgcggcgtgaacgttgacgttgcgagggaagcgcacgcacgcttcgcgggtcgtcccttcgaagagcacaccccgtgcatccgcggcctgcccgaggctcgtgccgctcttcgtcgtcgtaatcaccacctcttcgatctgctcgcggccgtcacgcaggccatcgaggccgagaaccgcaccatgcggcacgaagaagcggcggccgcttctgtttgccgcggcatgcatcgcctcctcaaccgcactgtcggccagcgccgagcagctgaatccgcacaggtccgaatgagcgaggatatccggcccaagttggctcaagagcgcgggcgtggcggattcgaggaccagatccgctcgacgctccaatgcctgcacggcatcgtcaatgacgaagggggccagcaccgtatcgccggcatatttctcccggtcggagaccaggacgtaagcgacctcggttccgtccaggccgttcacgtaatcgaacagcttcctgccaattacgccagcgccgataattccaatagtcttgtacgtcatcattccacctgcataattctgatagaacctgccaccgcaaagccagcgagacctcctgctaccgggaggcagctcgcggcaacagcagctctacgtcgcccggagttctcgcaccaagcagcgacaacgtaatgtctatctccgttttcaacatctcgaacaaggcatgtgcgcccgcttctccaccacaaaccagaccccagatcggcaatcgtccaagcatcaccgacctggcgccaagagccaggtatttcaggatgtcgctaccccgcttcacaccgctgtcggccagaacctcgatatgtttgccgacagcgtccgcgatcggagggaggatctgcgccgtcgggggcgcactatcgatattgcgcccgccatgggatgagaccacaacgccatctgcgccgatctcccagcacttgcgcgcatcctcaacgctgaaaatgcctttgacgaccagcttcccctgccaccattggcgcagatcgcgcaggtcgtcccagttcagcaggttttcgagcttgaccgcgttcgcaacggacggtctggtcatcgcggcacggaactctttcggatagtgaccgtagaccggcataccgctgctcagaagatagcgcagcagaacaccgaacagccagcgcggatgcatcatgacatcggcggtcgcgcgcggcgtgatcttcatgggaatggagaagccgttacgggcgttatattcacggttcgggacgacgggcgtatcgacggtgaggacaagcgtcgtcgcgccggctgcagcggctcgctccatgagccgcctggtcaggctcctgtccttccacacatagagctgaaaccagagcatcgcctccggcgccccggccctgatttcctcgatcgtcgtgatcgactgggtcgagatacagacgggaatacctgcctttgcggccgcccttgccatcttgatctccccattatgcgatgcgaaccccgcaagcgcggtgggcgccacgatgatcggcaattccgctctttggccgagaacggtggtggagaggtcgcgagtgggatgtccggtcagcattcgtggcatgaactggatttcgtcgagacttcggcgcagagcgcccagagcaagctcgtcctcagcaccacgatcgatatattcgaacagcagacgcgggaggcgtcgccgcgccgcctcccgaaaatcatccgcattccgcaatccgccaaccatcccggttatgcctcccgccctatttgcgatagttgaaggccacgaattcgggggagaacttgccgctttcaacgtcgtccgcaagcatatccggtctgcgttcccgcggctcgccatagccgccagcacctggggtctcgatgacagctgccatcgccggcgtcaaccggatgcgatttgccttggagggcagactttcttcgccgcctgcgccgtccagccgcaggaaccggccaggcaggccggcagtgccgccgaaaatgccccatggccgattgcggaagcgttcgccgacaccattgaactcacagtcatggtcgaccgggcggatagtgcggcggatgccgagaccgccacggaagcggcctgcaccgccggaatcctccaccagcgcatactcgtcgacgcgcaacggatattcgatctcgatcgcttccaccggcaggttggacgtgttggtgatattgacctgaacgccgtccttgccatccttcgtcgcgcgagcgcccatgcccccgccaagcgtttccagatagatatactgcttgccgctgcgaggatcgatgccggcaaagacggcgctggtattggctccattggcggcaccgatcgcctgatcgggaagagcctcggccaatgcgccgatgacaatatcgacgacgcgctggcaagtattggcgcgcaatgcgactgaagccggagcgacgcagttcatgaacgagccaagcggcgccctgatctcgatcgcatcgaaaattccatgattgttgggcacttcaggatcaagcagcgccttcagcgaaaagcagaccgcagactgcgttgcgttgaacgtcaggttgaagttgccgggaacctgcctgtccgttccctcgaagtcgaacaggatcttctcgcccgacttgcggataaggagattgatcttgatgtcttccgtgccggcgccgtcgtcatccattacgtcgcagaatgtgtattcgccgtccggcagcttggcgatggcagcccgcatacgcagattggtgcggcgaatgatgtcttcgaacaccgcctccatgtaggcggcgctgtggcgcgagatgaactcctgcaggcggcgctcgccgagacgggccgctgcgatctgcgcgttgagatcgcccttgcgctcttcgggaaggcgcatgttgaggaggaggacacgcatcatgtcatcctgaagcacacccttgctgaacagacgcacgatggggatacgcaggccttccttgtagatctcgtccagtccacccgacatcgagccgacggccgcgccaccgacatcggcgtggtggacgatattggcaacgaagccaaccagacgcccttcgccgaataccggcatagcgagattgatatccggcagatgagtgccgccggcgacatgcggatcgttgccgataaagacatcacccggcgcgatcgtatcgccgtactggtcgagaatatgcgtcatcaggccggccatcgaggcgaggtggatcggcaacgcgtgttccgcctgcaccacgaggcgcccctgggcgtcggcaatcgcggtggaatggtcgtgacgttccttgatattggtcgagaacgcgctgcgcatgatcgtcaggaagcactcgtcggtaatcgacttcaggccgttccagctgatctcgagtgcgattgggtcaaggcctaccttattgagcatcgtcgatctccagaatgaggctaagcgcagggtcgaccgtcaggctggcccatggcggcactacggttgtggtgtcaaattgggtgatgatggcaggcccctgcaggcggatgccgggttgcagcgtgctgcgtggatagatcggggtagaaaccgacgcatgttcgtcgaaccagacatcatgatattccgaagccttggcgggcccggcgggcttttccgcaagagggaccacctggctcagccgcgcgaccgccttcatccgcacgttcatgatttcgatcggcgcttcacggtcgacatgaccgtagctgcgctgatgggcttcgaagaacgcttccttcagtgccgcgatatgcggcaggttgggctcttcgccaggctggccaagcgtgaccggcaattcgtaattctgaccgacataccgcatgtcgagcgtcaacaggcgatatgccccctcggcgccccgtgcctcgatcgcaatccaggccttagcctgttcatcaagttgatccacggcggtttcgattgcagccagcgaaccgtcgagcggcgtacggcaggtgaagacgaagttttcctggagatcggcctcgatcaggccttcggcacaaagaatgcccggcgcgatgggaacaatgatgcgtctgatgccgagcgatttcgccacatcggcggcatgaaggccaccggcgccaccgaaaggcataagcgcgaagtcgcgcggatcgtggcccttctgcgtcgagacggcgcggattgcgcgcgtcatgttcgacgagacgatgccgcaaatgccgagcgccgccttgatcaccggaatgccgagcggttcggcaatcgtcctgatcgcctcgaccgccttctcgcgatcgatcatcagcccgccgccggcaagcgaggccggaaggcggccgagcacgacattcgcatccgatacggtcggcttggtgccgcccttgcaatagcaggcaggcccgggaacggcgcctgcactttcagggccgaccttcatcagaccgtctggaccgatatgggcaatggagcccccgcctgcaccgaccgtatgaatatcgaccatcggcaggcgaatacggaagcccgcaatgtcgcggacatgagcgatttcggtctcgccgtctctgatcaggcagacgtcggtgctggtgccaccgatatcgagagtgatgatatcgccgatcgacgattttccgccggctgccgccgctccaacagcacccgcagccgggccggaaagcgccgtccggacgggaaattcaagagccttgtcgacggacatcagaccgccgctcgactggaaaataccgaacttggcattcggtgcgacctgattgatcgctcccttcagtcgttccatgtagcggccaacctccggctgcaggaacgcgttgatcagcgtcgtcgaaaagcgttcaaattcgcgaaactccggctgaacctcgcttgaaatcgacacgtagacatccggtattgcagcgcggattgccgccgcgatgcgctgctcatgaaccggattgaggaaggaaaagagcaggcagacagcaatgctttcgaccttcggtgccgccttcaattcggcgaccagtcgcgcaatttccgcatccgtcaattcaaccacgatctcgccgcgcgaaccaatacgttcggtcacttccagacggttgctgcgcgaaacgagcggcgccggcgcatcttcctgaaggtcgtaaatcagcggacgcacctgacgcccgatctcgaccagatcgcgaaagccctttgtggtgatgagacggatggcagcgccgcgacgctgcagcaatgcgttcgtggcaacggtcgtgccgtgggcaaagcgcacgatgtcctcgcccggtatgcccgtcttttgctgaagctcgcccagaccttccagaatcgcccgcgagggatcatccggcgttgatgggcgcttgtgaatatgaacggcgcctgtgcgaaggtcccgtgcagaaaaatccgtgaacgttccgccgacgtccacaccgacgatccagtcagccatgctgtctctcgcttccgactttataacccttgagggtaaatttcaatttcagcatccacattgaataccgaatggcaaatagaagagaagaccgtctctgactttcggcggagaaacccgctttcgatcatggtgtctgccttttctccgaattctcagttcgcggccgcgatagcgcccgtcagccctgcaagaaaccgccggcagcgttgcgtctcgggctcgaacagaaccttgctcgaagcgccctgttcaacgatctggccggcttccatgaagatggtccgatcggaagcatggcgtgcgaaatccatttcgtgcgtggctatcaacatcgtcatgccggaatcccgaacctcgcgtatgacgttcagcacttcctgtacggtctctggatcgagcgccgatgtcggctcgtcgaaaagcatgatcttcggctccatggcgagtgccctggcaatagcgacgcgctgctgctggccgccggaaagctgacgtggaaaattgcctgccttgtcagccagcccgacacgcgccagcaattccatgccttgtctgcgagcgcgctcgtcatcctgtccgcgaacgaaccgcggacccgacatcacattgtccagcgccgtcatgtgtggaaagagattgaagctttggaacaccatgccgatgtcctcccgctggcgggccagcaccttctccccaagtttgcggcgaccggatgatgtcgtccgcgcgccgatctcctctgcaccgaccttgatcgtgccggaggaaatcgtctcaagcgtattgatgcatcgcagaagcgtgctctttccggatccgctggggccgatcagggcgatggcctggcccttttcaacagagacggagacgttattcagggccacgtaatgaccgtaggttttgaccacgtcgcgaagctgcaggaaaggatgggaattgttgactgctgttgccattatcataccgccgcagccgtcttcagtgtttcggccttgggcgcgccggcgtcggcgaaccacttagaattccgtctttcgaatgcgttctgaagcaaggtccatatggccgtcactccgaggtagtagatcgtcgcgacggagagggcttcgagtacccgaaagttcgtctgggtcagattgtcggtcgctcggaacaattccgtcatcgaaatcaccgataccagcgaggtgttcttcaactgccggacgaattcgtttccaagcggcggaaccgcgatcctcagcgcctgcggaaagatgatccaccgcatgatcgacagcggtcgcatgccgatcgccttggaagcttcccattgcgccgtgggtacggcagacagcgacgaacgaacaatctccgccacatatgggctttccgacagcatgagaccgatgatcgccgcctcgatcaccgacaggcgaatgcccatctgcggcaacgcgctgtagagaaacacaagctgcaccagaagcggtgttgcccggaagaaggcgacatatccttggtagaagccccgcgccagaaaactgtcgatccggccgaccagcgcgacgacggttccgagcacgatggccagaagcagcgtcagcaatgtcagccagatcgtcgtccacaagcccgtcaggatggccggatgcaccagattattgaagaatacggaccagtcccaaacgtgcattgcctcccctccttatgccgccagcggaagagacgtgacgccggaagcctccagcacgaccttcaggcgctcgcgaagttcgacaggagatggcgcaagcggttcacgcggattgccgagcgacaggccacggatttccgaaccggccttggcaagcgccacgtaaccgttgagcagcatgaagttcaggatcggccacagcctatcccaaaccttcagtgccgcattccagtccttgtcgacggaaatacggtcgtagagttcgacgcaaagttcgggaatgaaggtcgatgccccgatgatcgagccgggcgcgccatgcgcaagcacggcaagaagcgccggatcggacccagccagaacggtgggtgcgtcagggttggagagcatgcgcatcgtacgggtgaaattctgcgggctgtccttgatatgggatacgaggccgtcgcgcttcagcgtcaccatctggtcttcggtgatgtcgagacgggtgatcgagggggtgtcgtaatagatgatcgggccgccggaaatcttgacgatcttgtcgagaaagcgctgcacatccgtgaatttcaagctatcgaagtaaggcgtaaccaccagcatctgatcgacgccgaccttgcgggcatgctctgcaaggtccagcgcatcgcggacattgttggacccgacatgcgcgaccacgtccatcttgtcgccggacgcttcgacggcaatctcgtaaaggcgcttgcgctctgcgaccgtcagagacggatgctcgccagtcgagccgcttgcgacgacggcatggatgccggcatcgcgctgcgagcggatcaaccggccataggcggcttcgtcgatcgccacgccgtccttggtgaacggcgtgagaacggcgctgataatacccttgagttcgcttttcatgaaccaaacctttcttgctggaacgagcgggccgatgacccgccgtcatcggccgatctgtgatgtcggattacttgagcgcggcgctttcgatgccccattgcttcaagaccgcgtcataggaaccgtcggccttcatcgcggtcagggcatcggcgaccagtttcgccaaggccttgttgttcgtctggaagccgatgccgagctttgtcgggctgatgcctgtcgcaaccttcttcaggctgtcgttcttgctcatgtaataggaaatgaggctatcggtggcgatgaagccttcgacgctgtcattctcaagcgcacggatggcgacgggctgggtgtcgaaagcctggatcgtaacggcgggcttgccggctgcttcgcatttcgagctggcttcctgcagcaccttcagcgagcccgatccctgcagcacgctgaccgaacggccgcaaagcccctccagtccctcgatatctgccgtcttcttggtgacgacagtctggcttgcctggatgtaaggcaccatcgcaatggcctgttcacgctcgggcgtgatgtacatagcggcgcataccatgtcgaaacggtccgcctggagagccgggataagacccttgaaatcgaggctgatgaattcggcgttcgaccccagctgcttggcgatggcgccgcagagcgcgacatcaacgccggtcggcttctggttatcatcgtagaagccccagggcatctgggtcagcgaggttccgatcctcaggcttttcggtgcttcctgcgcgtaagctgctcccgtcagagaggcagtcataaggatggaggtggcgatgacatcaagcattttcatggcattccccgtttctgattatttcagtatcctatttgtatacttaaaaacttgtcaactgacttcctggcgcgaattgaagaaatttcattcgacaactgctgtaattgactgatcttcgggcctttcgcggacggccgaaccctgctccgcctgacgacaggcgaagatgcatgatgctgaactcgtgatcggtcggatgatgtgaggcggatcacgccgcctgtcgcatccggcagccctgcctcaggcgggcggcgtcattccggcagtattcgacccggattcatgatgttgtgaggatcgaacagcgacttcacccccttcatcatttccagttcgatttcggatttgtaggtcttcatttccgccacgtgcagcgccccgatcccgtgttcggcgctgaacgtaccgttcatgcctgcggcaatgtcgtagatgaccttgtagacgtctttgcgcatcttcgattgatcgggaatggcagcccagcgggacttttcgaagatcacgttgtagtgcaggttgccgtcgccgacatggccgacaatcgctatgtcggcctgcgggaaagcgtcgtcgaccttcgccttggcgatctgaatgaagcgcggaatatcgccgatcggcacggcgacgtcatgcgacatgcccatgccgtatttcttgtgagactcggtgaccgagtgccgaagtttccagatcgccgctcgctgcgcctcgttggcggagatcagcacatctgtgatatggccgtcctccatcgctccgccgagaacatcctggaggcggtcggcaatatcgccctgcccgtcggaaacgatatccaccagcaggaaccagccgacattctgatcgtagggaatgctcagatccggcatcatcgccttcacgatgcggacctcgctgccggaaatcagctccatggcgatgatcgatgtgtcaaatgtcttccgcagcggttccgtgaaggctgtcaggttggcaatatcctcgaacgagatcagcgccgaagtcagatggggaaggctcgggaagatcttcagagaaaccttcgtgatgatgcccaacgatccttccgcaccaatgaacagatgcttgaggtcgtagcccgtattgttcttgcgaagcgtccgcatgccgtcccatatgcggccgtccggcagcacgacttccatgccgagcacgagatcgcgggtattgccgtagcgcaggacgctggtgccgccggcattggtcgaaacattgccgccgatctggcagcttccttctgccccgaggctgagcgggaagaacttgtcgaccttgacggcggcctcctgaatgtcggcaagaatgcagcctgcctcggcggtgatcgatgcatcgagcggatcgaccgataggatgcggttcatccgcaacagcgaaagaacgattgaacggcccgacgcatccggcacggcaccaaggcacgtgctcgtattaccgccttgcggaaagaccgcgatcttgtggtgaaagcagatggaaaggacgtcggagacctcctgcgtgctggcaggcagagcgacacacagtgtcttgccgcgcgcgcgtccccagaagtcttcgaggaacccctcggcgtcggctccggtcctgatattcttcgcacccaaccgtgcttcgatttcggcgacgatctgcttgtcgatgtccatgtttcacttccagttggcaatctgccgggcacacgtcttgtcgaatatgggcggcttgcgagcgacggcagccgatagccaccgtcccccagtattaaagagacgcttccagcgcctgcatttccggaagcatcttgaccagttgcgcttccgtttccgcgctcgcgctcagaagcggcagcatggcttcgccgcagggcctgccgagtatgcgtagcgcagccttgagcgggatcggattgtgttcggaaaagatgagcttcaggaacggcctgatcctggagtgcagttccagcgcctccttggtcctgttttcctgaccaagttcggtaatcctgttccagaccttggggatgatgcatgacgaggcgaagaggccacccttggcgccggctgccagatgcaacggatagacgtcctcgtcaccggagaggatcgcaatcttgtcacccgccgcctcaaggacgcgcatctgcaggccggcatcggcattgcatgccttcatcgcgacgatgcgggtggtttcgcccagagcttggaccgtttccgccgtgagggagacccccgtgcggtaggggaattcgtagaggacgaggtccgtatcgagcgtgtcggaaatcgccttgaaatagtcgatcacgccctgttgggtcggacgaacgtagaagggcgtggtgacgagaaggccgtcggcgccggcatcgaggattcgcttgccggaatcgaagacttcaccgagacccggcgcgatcagaccggcaatcgtcgggatggcgccatcggctgcctcgacggtcgcgcgaaccatgtcgaccttttgctgttcgctcagcgagatatattcgccggtaccgccgatcggcgcgaggccggtggcaccatttgccaggaggtagcgtgcaagctccttgacggaagaaacgtcaacgtttccgtccctaatcggggtcggtgtcgccgtgacgatgccggaaagattgctgatatccatgatatgtctccaaaattccaattatcgtcacgagagcgatgtgcgggcgcgctggtgcgccctcaaccccattaggcttcatcctgcagaacgacgagatcctctgcgtcccagcacaattcgattgcgtcgccgaccttgtaacggctctgcagcggcagggaggtgagcttcagcttgaggaccgtgcggtccggcagctccaccgcaagcgtcgtcatgctgccgataaaggttacgccctcgacgcgcccggcgaccgtctgcacggtcgcggacgaagccgcttcgccggcagcgacggttctgatacgttcagggcgcagcatcacctgacaggactggccagcggcaaccttggcattcgacgacagggtaagcgcgtagccggtagagagcttcagccgtccgccggcctccacagttccggttagcagattggactcaccgatgaactgggctgcgaacttgttgaccggacgaaaatagaggtcgtcgggcgtgcccagctgcacgatgccgccatggttcatgagacaaatacgatcggacatgttcagggcttcttcctgatcatgcgttacgtagatgaaggtcgtgccgatctcgcgatgcagcgtcttgatttcgtcctgcatctgctcgcgcaggttcttgtcgagtgcgccgagcggctcgtccatcatgatgatcgatggcgagtagacgatgcagcgggcgataccgacacgctgctgctggccacccgatagttgctttggcttgcgatgttcgaaaccggcaaggccgacacgtttcagggcgtccgttaccttgtccttgatctcggccttggaaactccgcgcaccttgaggggataggcgacgttttcgaaggctgtcatatgcggcatgagcgcatagttctggaacaccatgccgatgccgcgcttgcgcggcggcgcattggtaatatccaccccattgaggagaatctttccggtagtcgaggcaaaagcgcccgaaatcatattgagaagcgtgctcttgccggaaccagacgggccgagaagagtgagaaattcgcccttcttgacctggagcgtcgtggcgtgcagggcgagaaacgtgccgaattccttcgaaaccccctgcaattcaatcatattctgttcggtatcggtcatggtttcttccttggcgcggaaagagcctcggctctggcgcaaatctgtttgttcggtcgatggcctgcctcacgctgcaacgtcggctttcttctgaagcatcacattgaccaggcagacgacgagcgagatggccgtaagaatggtcgatacggccgcgatcaccggtgaaatctcccactggatcgcgctgaacatcttgaccgagagcgtggtcgtgctgggcccggccaggaaccacgaaatgacgacttcgtcgaacgagacgaggaaggcgaacagcgctcccgccccgatcgaaggataaagctgcggcagaaccaccgtcatcatcatccggaaacggcccgctcccatcagcatcgcgccgaactccaggttcgggtcgagcttctgcacccctgcactgatgatcaccagcgcatagggaagcacgaacatggtgtgagcgacgacgagtcctgccgtggttccagtcagcctgagataggagaaatagagatagacgccgagcgcaaagaccactgatggaatgaccagcgggctcatgatcagtccgatcagcaacttcttgccgaaaaagctgaaacgaacaatcgcataggcggcaggcacggcgatgattgtcgagatgatggtcgtcatgaaagcgacccgcaggctgaggaacagcggctgcatccaggaagcgctggagaagaagatgcgatagagatcgagagaatattgccgcggcggaaagttgagttcgtactgcgaaccgaacgagaccgggatgacgatgatgctcggtgcgagcaggaagatgtagacgcagacggcgagagccgtgccgatccagcggtaggtgacctttcgacgatcgttgatatgaccagccatcagtgccctccctgctgtttgctgcgcagaagcgttgcgggcaccgcaaaaatggcgaccagcgcgaataggatcacgcccaccgcagaagcgatgttccagtccagaacctcgcgggtgtagaaatcgacgagattcgcgagcatcagatcctgcttaccgcccattagtgccggcacgatgaagaagccgagcgacatgactgccgcgctgagagcgccggcgagaacaccgggaacactgagcggaagcgtgacggtcaggaagatgcgggcaggtttcgcacccatgatctcggccgcgcgataaagtgccgggtcgatcgccagaagactggcaagaaccggaaacaccacgagcggcgtcagataattggtcatgccgaccatgaccccgacgcggttaaagatcagcggcagggccacatcgatacccgtcgcccaggacagaaagccgttgatgatgccttcacggccgaggataatcgtaaaggcgtagctcttcacgaggatgctggtccagaacggcagcaggaccagaaccatcagcgcggctcgccgccgcgccgactgccgcgccagatgaagtgcgacgacataacccaggaccacgctgataagacttgcgaggagagacacctccatcgtcgtccgcatcgcgcgcaggaacagattgctttcgacaatgctggcgaaggcctccgcggatgttccacccgccgtgctgttgtagaaaatgaagatgagtgggaccagggctaccagcagcgaaagaatcgctgctggagcaatgaaaggtccggcacccttggatgcgatgactgtcacggaaatgtcctctaggcttcaaccaacgatatgaaatcgtgactgttaaccgagcagccattccttgaagcggcgttccgtcgcctcaagcttcgtcgaccaccattcgtcgttgatataggcgttgttcttgttgtcgagtttcggcagccatccaagcgattccggcttcagcagcgaataggccttgcggctgatcggagccccgcccttcgcttccatgcaagacgcctgatattccggtttcatcgcgaaagagaggaacttgaacgcattttccttgttcggtgctcccttcagaacggcaaggtattccacgccgttgaggttctggtcgaaggagaagccgagcttcacgccctggtcacggttgcttgcctggatgcggttcgcataggtgaagctgaaatccgcttccttggtctgtagcagcgtcaccgtctggggagtggcttcaacccacttggcgacgtgcggcttgatcttctcgagcaccttgaatgcacggtcgatatcgagcggataaagatcggccggcgcgacgccatcgccgagaagggcgatttcaagcgtctccatcgcacgcgttctcagcgtgcggcggccgggaaaggcctctgcattgaaatagtcagcgaaggtattgggatgcttgccgtccggaaaacgagccgggtcgaaggcgataccacctgcaaaagtaaagaagggcacaagcacttccttggatggcagggtcaggtcggcttcgtcgaagaggccggagggaagcttttcccaatagccgttggcagcgccactggcgcccatcgaaccgggcgcatcaaaaacgtcccactgtacgttaccggtcatgacctgagccttgaccttggccatgtcgggcgtatcgagaaccgtcacgttgatgccggtttccttcatgaacggcttgaccaggccgtcctccataccctggcgataattcccaccccaggtaacaagaaccagttccttggtagccgcgtagctggtgctgacgtagggcgcggctagcacgccaaccgttgcgagacccgccttggctaaaaagttacgacgattgatcatgggcagattcatgcgacgacgagtcattgtgttcccctttttctctatcgttgaatgtattcgctactggcagcgttgacgattttcaccgctgcgattggatcgcttgcaaaccctttcaatacgggtgcagcccttggctaaaggcgcacctcggcattcacagcgccgctcacgccgcgccgctttcaacttcacttccgtcgccgaatctccctggcaggcggatttatggtcggatgcagtccacagtctttgatgacgcaccactcgatttcagtggaggaggtgcaaggcagcttgttggtttcagtcgccattcagaatactttacgtataccgaaaccgctgtcaatggccatcgtgagcaaatccttttttttacgacaatcatgtttcagaggctgaaaggcgcgacggcagcgtgatctgcgcgcaatttttcccaatgatcataattagttggaaaagctccgaagcaggcgcgcaggaaagaagcgcttagcaagcctcgttcaaaccttcgaaatcgcttcacacgcctccacaaaagcgcgaatggcggcgatgcgcggaccggaattggcccagagcacccccatattgcgaagctcgccatcctccatccgatgtttctgcagtcgaagaccttcgggccatggtggagcccaatcgggaaccagggcgacgcccagaccgcgatcgacgagtgccgcgatggcatccaacgcgtcgagctctgcccattcccttacagtgatggaatgacggcgcagataccggtcgacgatctggcctccccattgattgcggtcatagcgaatgaacggctgctctgtgagcaccagacggaaatcgttgacttcgagatcagcgggcgcgagcaggagcaaaggttcctgccggatggtggaccagccaaaagcctttggaatcggaaattgcggctcgatcagaatagccgcatccagttcgcccgacaggaccgcatggtagaggttcacggatgaaccaggctgcaggaaatactcgatctgctgaaagcgttcgctgaggttggccgtaatctgtggaatgaggccggtcatcgcagtcgcggtcgcaccaagccgaagttgaccgctcggaagatctccggccgcgattgcactcaggtctcttgccgcgcgcacgagagccggcccgtggcgctgcacggcaagaccggcagccgtcggacggaccgtgcgcccaacccgtgagaccagttcctgaccaagctcggcctccagcgcccttatgcgctgcgccacagcagccgatgtcatattgaggcgtcgtgcagcctctgcgacggagccacattctgcgacgatcaggaaactctccagaaacttcgtatccataagatatattttctatcttttgaagaaactagcaagcatattttattgctttaaaacccggctatcattgcttcaacgtggccttcgggccgatgaagggagtttcaatgactattcaagctaagttcgaacgcatgggcacagatgctgcgcctggtcaggaagtccgccagcaggcgggagatatccaggcgctcctgcgcggagaaaagatcgagggccgccccgtggacttttcccacggcgacgttgacgcgtttacgccgacacccggctccttcgaggttttcagcgcgggcgtggaagcaggcggcaagcaggcctacacggaatatcgtggtgatatttcgatccgcgaacagctcgccccaagcattgcagcctttaccggcgcgcccgtcgacgcagctgacggcatgatcttgacccccggtacgcagggagcgcttttcctggccgtcgcgtccaccgtcgcgcatggcgataaggtcgcagtggttcagcccgactatttcgccaaccgcaagctggtcgaattctgtgaagggcagatgctgcccatccagatggattatcagaatgtcgagggccgcgccggcctcgagctcggtcaactggaagacgccttcaagtcgggcgcgaaagttttcctgttctccaacccgaacaatccggcaggcgtggtttattcgcgcgaagagatcaagacgatcgccgccttggccagccgctacggtgcgaccgtcatcgtcgaccagctttattcgcgcctgctctattccggtgtggactacgcacatctgcgtgcggaagcgatcgatgccgagaatgtcatcaccatcatgggaccgtccaagaccgagtcgctgagcggctatcgccttggcgtcgccttcggttcgaaagcaatcgtcacccggatggaaaagctgcaggcgatcgtatcgttgcgcgccggcggatacagtcaggccgtgttccgcacatggttcaacgagccggcggggtggatggatcagcgtgtacgtgaacatgaagccatccgcgacgacctcctgaaggtgttccgctccagcgaaggcgtgagggtccgcaccacggaagccggcagctacatcttcccgcagctgccaaagctgtccgtcagcggcaaggatttcgttcgcatcctgaggcttcaggcaagcgtgatcgtgacgcccggcaccgagttcagcccctattgcgacagcagcgtgcgcctgaacttctcgcaggaccatgtagcggcagtggccgcggcagagcgcctcattacgctcgccgaccgatatcgcgcatgaacccggaccagtccggaaatggcaagccgatcccgcaggggctttacgtccctgcgattcgtcgtggagacatgatcttcacggcaggaatgactccgcgccggaatggcgttctgcaattcacgggcatccttcccgcctcggccgatccggcgcagcatggcgacgcggtcatcctctcctgcggcaacgctctgtcggcggcacagtctcaacttggtgccgacgaacggctttccgcgatcctcagcctcacggtctatatcgctgccgagccgggctttacggcccactcgaaacttgccgactacgcctcgcagttcctgaaagatcaactcggcgacatcgccatcggatgccgcgccgcaatcggcgtggccaccctgccgggcaatgcgccggtcgaaatccagctggtcgcctgcgtataagcatatgaaaaagccctgcccgccatttctcaagaatggcgggcagggctttttgcgttcctgttttcagcccatgcgttccgaggcgaacgaacccggtgacgccgggaagacgatcgtgcggtttccgttgaggaatacacggcgatggatatgagcatggatcgcccgcgccagaacctggctctccacatcgcgaccgagcgaaacgtagtcgttcgggctttgcgcgtgcgtcacgcggatcgtgtcctgctcgatgatcggaccttcgtcgagatccgccgtcacgtaatgcgaggtggcgccgatcagcttcacgccgcgctcataagcctgcttgtaggggttcgcacccttgaaacttggcaggaaggagtggtgaatgttgatgatacgccccgacatcctgcggcacatctcatccgacagaacctgcatgtaacgtgcaagcaccaccagatcggcattcgtttcatcgatgatggccagctgacgcgcttccgactccgccttgttggcctttgtcacgttgatgtagtggaagggaatgtcatggttcaccacgaccttctggtattccatgtgattggagatgacggcaacgatctcgatcggcagcgcgccgatccgccagcgatagagcaggtcgttgaggcaatggccgaagcgcgagaccatgatgacgaccttcatcttctcggtctcgtcatggaatgaataggtcatgccgaatgccttagccggatcagcgaaaccctcgcgcagtgtagcaaggtcggttccagtctcggagcgaaaactgatccgcatgaagaaattgccggtctcgctgtcgtcgaactgcgaactgtcggtgatgttgcagcctttctcggcaaggtaggtggtgattgccgcaacgatgccccgcgtcgaggggcaggtcactgtcaagtagaactggttcatggaagctcctggaggatgggcggacgtcagccggttcggctggcggatgtttcaatcaggccgtgaggctggatggttcggaaaggccttttgcgcggcagcacgccgtcagcgtatttgccaagaggcaggcgatggtcatggggccgacaccgccgggcacgggtgttatggcaccggccatatcggcggcactgtcgaaatgcacgtcgcccaccagttttgtcttaccgtcgcgttcgatgcggttgatgccgacgtctatcacggtcgcgcctggtctgatccagtcacccgtcacgatttccggccgcccgacggcgacgataacaatatccgcggatcgcacgatgctttcgagatcgcgactgcggctatgggcgatggtcacggtacagttgtcgcgcagtagaagctgcgccatcggcttgccaacgatattggagcggccgagcacgaccgcgttcagcccatccagcttgccgtgatgatggcgaagcagcatcaggcaaccgagcggtgtgcaaggcaccatagccttctgtcctgtccccagcaaaccgacattcgagatgtggaacccatcgacatccttggcgggatcgatcgcatttaggatcttgttgctctctatgtgcgacggcagggggagctgaacgagtattccgtgaacggacgggtcggcattgagcctgtcgatcaggccaagcaactcggcttcggacgtggcggcatccagcttgtgctcgaaactcgccatgccgcattcgcgcgtctgcttgcctttgttgcggacatagacttcggacgccggatcttcgccgacgagcacgactgccagacctggcgtgacgccatgatccgaccggagttgcgcaacatgccgggccacgtcctggcggacggtttcagcaaaggcccttccatcgatcttcgtcgcgaccatgcgcattcaatcctttactggccctcatcggaacacgcgtcatcgtacgcgggtctgaacaccacgcagaaagcgatccgtgttggcttgtggttttagaaattccgcactcaggcgacagcgcgcaacgccgccagctgaaagcccgcatccagttcctgcgcggtttcggtcaggacatccagagcgaatttcgccgaggcgatgtcgagaaagatatcgtaggaaactgcgccgaaacgatcttcgcgggcaacgacgacatccagatgcaatgcgcgcgtctgtgcgatctcgttgaccttcagggtgttcggcccgagatccgccatcgaactgcggcgcatcagcaccggtgcgtcgggaccggagacgacgaaccaggcccaaccttcctcgcgataggcatcgtaacctttcgcgggaagcgtgctctcgttccatgccgaacgcagttcgcgcagccgctgtccatcgtcaccgacaggagcggtcagcagaacttcctgctgaccgagacgcatgaccgtcgtcccgcagggcgaaatcgcggatgtgttgaccgctggcggcacagccagtccctgcgccgcgacccagtcgatggttcccggcccgcgaacgccgaaacgttctgtcggcgtgcattcgataacgacattctcggcgcctgtcggcacggtcgcgcggcgggtaaggcgcgcaccgagaagatcgttgcgcagagcaaggtcgggctgcgatgccgtcgcggcagtattgatatgtccagtcgtgctcatctcacatctcctgccgcttgctttccggatcgtagaatggaaccttcaccaccttggccgagatatcctgaccgccgaagctcttgatgctgaggcttgatcccggctggacatcgcgcggatcggcataagcgaggcctacccattttccgagcgtcggcgaataacaggccgaagtcacgaagccagcaggacggccatcgcggaagacgaggttggattcggccagatgcttgccatcgtcacccgagatttcgaaaccacacagcttgcgcgtggtttcaagcttcgcgcgcgcctccacgccggctttaccaacatatcgggccttggtcttggaaatggcccattccatcgagagctcttccggtgtcgaaagcgcatccgtatcctggccgatgatgatatggcccttttcgagacgcagaatacgcgaggcttccaggccgtagggacgcagaccgtgaggagcgcccacttcgagcagcttgcgccagagggcggcaccgtaggactgcggtacgtgtagttcgtagctgagctcgccggtgaagccgatacgcatgatgcgaacggggcatccgccgatgacgccgacgcgaccgttgagatagggaaatccttccgccgaaagatcgatatcgccgccgagtgcttccagaacctgacgagcggcagggccggtgacattgatcgcggcgaaagcggcggtgatattctggatatcgacctgcatgccccatttggcattgaggaacatcatctcgctaaagacgcgcgcgacggcgccggtcgtggccgtgacgtagaattcgttctcggagatgcggaacgcgacgccgtcatcgatcacggatcccatgtcgttcaacatcaggcagtaacgcacgcggcctatcggctgcttggcatgtgccatcgtatagatgcgatcgagaaaagcagcggcatccgggccccggatcgcgagcttgccaagcgtcgaaacgtccagcatgccgaccttgttgcgcacaagcgcgacttcgtccgcgatcgcacggctgacgtcgcccttgccggcatagtggaacggacgccaccatgcgccgaccggcgtcagtttcgcaccgctttcgacatgctcgtcatgaatggccgtatggcgatagagaacatggttcggaccggcaagaaggcccagcttttccggaccataaggcggacgcgaggtcgtgataccgacctggccgacgctgcgggctgtcgagccggcgacgatgcgggccgttgcgagcgccgaatgccggccctgcgatggacccatgccgaccgtcgaatagcgcttgaccagttcaagctcgctatagccgtcggcgaccgcgttcttgatgtccttgacctgcaggtcctcgtcgaaatcgacgaaatcccgacccttcggatgtgcggaaagctcctgcgcatagttcatttccggtgcgtcgagatcctcgatcgccatggggacgaccacgtcatggccaagcgcccttgctgccgccgaaccggcgatctcgccgctgcgcaatacggatttcagcgagaagacgccggcgaccgaacctgccagatggaagtcctgaggcagattgctgacggtgaattgacggcttgcgtcgtcataaccaagcttcgctcccgcattcagcggcaactggtagccaggcgtatacccggtcgcgacaaccaggtgatcgcaggcaagcgtcttttcgccatgctgtcgcgtgctgaaagtgacggcgcggatccggcgattgccactcgtgccgacagccgcgatcacgcttgcgtcgcggatgacctgcacgcctttctgggcaagcaactgcgccagcgcttcgcatgccgcgccacctgtgggcgtcagcacggcggcaatcttcacgccggcctcgacgagatccaacgccgtcagatagccgtcgcgattgccggcgaaaacgacggcctgcttgccaggacgaaccgcataatgacgcagaagacgctgcgccgcggatgaaagaatgacaccgggcaagtcgttgttgtgaaataccaatggctgttcgtgcgatccggaagcaacgacaacctgcttggcacggacgcggtagagccggttttcccgaagcacgggaatgaagttgtcggcgaaccagccgttgcatgtcgcaccggtcatgatctggatgttcggcagatccgcggcctgcttgcgaagcgcctgcagcacggtgttggcttcgtccgtctcgacatcgaagcgcgcgtaggtcagcgcgccacccgtttcggggttgagatcgaccaccagcacctgcgaaccggcctcggcagccttgacggcggccgacagaccggccgggccagcgccgacgacgagcacgtccacatgcatgttttcacggatatagtggccatgtccggccttgatatcgaccttgccgagacccgcggatttgcggatgatcggctcccagaacttcagccagctcttctggcctgggccgaaaaacgtgcggtaataaaagccgaccggcatgaagcggccaaacttgtcgaggatggcgttgcgatcgttctctgcggtgccgctgacattctgggctgttactgcaagatcatcggaaatggcgcgcagatcggcgcggacgttcggttcgtcgggcaactgcaccagcgtattggcgtcctggcctgccatggtcaaaatgccacgcggacggtgatatttgaaagaacgagacaggatccagcgatcggcgcccgccatggcggatgcgatactgtcgccggaaaagccttcgacagtacggccatcgaagctgaaactgatcttgcgggtgcgatcgatgcgcgaaccccagggggatggaagccgttcggtcatgtcaggcgggctttcgattgggaagataggtagcaatgatctggtcggtgaccgtgtggcgctctgcaataaggatcgtattggacggcgtatgccgccaccattccttgagcacgcccagcgggttttccgcatagaaaagcgactcgatcagctgatcgggattttccgcatcggcggcacgcacggggccgagatactgaaattcggtgatgttgcgaggaccgttcaccgggcaggtcaggattttcatgagagcctcgtcaatggctggcagcagtcgcgcccatctcgttgaggagggcgaaattttcgaaacggcgcatgtcgaagggtttcagaatgtcaggcacgcgaccggtggcgatggtttcagccatgcgttttccggcaaccggcgtcgctttgaacccccaggttccccagccgcaatcgagccagtagttcgcaagtggagacgcgcccatgatcgggctgtaatcgggcgtcatgtcggtgataccggcccattggcgcagcagcttgaccttgtgcaggaatgggaagaggtgcagcgcgccttctgcaagatgctccttctggtcgagcgtcgagcgggtcgacgcaagctggtacggatcggatccgccaccgatgacgatttcgccgcgcgaagactggaccagataggtgtgcaggttggcggaagagaccagcgtgtgcaggaagggcttgagaggttgtgtgaccatggcctgtagcgggaagcaacggatcggcagcttgatgccggccaattcagcaacctgaccattgaggccgccaacagcctgcagcacatggccggccgcgatcgtgcctcgattggtcttgatctcggtgacgcggtcgccggccttgccgaagcccagaacctccgtgcgctgatggatctcgacgccgcgagccgcagcatgcttcgcataaccccaggcaaccgcatcgtgacgggcggtggcaccatcggcatgccaaaggccacccaggatttcgtgctggccgccgatatcgagattgaggtcagggcacaattcgcgaacggtctgaacgtcgaccacctcgatcttcgttcccatatacttgcccatctcggcccgcagatggaagctgcgcagcgtcgcttcggaatgagcaagcgtcagctggccgcgctgcgagaacatgatgttgaaaccaagatcctgagacatggtctcgtagagctcgacgccttccttgtagaagcgaaccgattccggcgtcatgtagtttgaacggatggtcgtcgtgttgcgcgccgtattgccgcccgcgagataacccttttcgagcactgcgacatttgtgatgccatggacattcgaaaggtaataggccgcagccaatccgtgtccgccgcccccaatgatgaccacgtcataggcgcgcttcagatccggcgtcttcggaatatcgccgtacggaacgtgccgggagcgaagagcatatttcaacagggagaaaggcattgttttcctgtgccttgatgtggctttgatgaaagacagaatgccttctggccaaagagaaacaagaaatcgttctttacccagtgaccccgtttttgtaatgcatgggaaactcaaacgggatcagcgatgcgcaatcttccccatctggactacttgcaggcctttgaagctgcggcgagacatctgagcttcacgcgggcggccgaagagctgaattgcacacaagcagcaatcagccagcgcgttcgcgcgcttgagcgattttttgcgcgcccgctcttccataggcgcagcaatgggctggaattgaccgaagtcggtgcggcctatctgccgggtgtcgcggaagcgctcgaccgggctgaaatggcgacacagggccttctgggcgcgcgaacccatacaagcatcacagtgtcggctccgttgagttttgtcgccctttggcttgcccgcaatctgcacggcttttcgtccgcccatccccagcttgaagtacgcttgaacagcacgatctggacggatccgaacgtcgaactggcggacctgagcatattggcactgagcgttgcgaacccgccaccgggatcggtccgtctgggcagcgagcgcctcatgctcttgtccgatcctcagacggcatcacgcgctggcaagagaccgacgatagagtgggcgcattccgcccgcctcattcatgtccaaggtcgcatgcaactgctggatctctgggcacagaaggaaaagcttgatcttgcacctcaagaagccccgatcaaggtcgacaatgcggcgactgcgctggaaatctgcgcaagcggcggcgggatcacggcggcaatgtcgtcctatacaaccgcctatctggcatccgggcggctggttgcaccttttggcgcaggcgagatcctgcctgtggcgcttcacatagtccccaatcagcagcggcgcctgacgcgggcagctgcggcgtttatcgagtggctgtcagggcaggttccattcgctggagagatttagatcatcgccgaggaccggtgagctggcgaaaaggatacgcttgatccgctgtttcgtcagtttgtgatgaagagtggcgtattcatctgccttgtccgcatcctgtgcaacgatcgcatcgaaaatgagatcgtgctgacgcacggtctcatcgagatgtttgcggatgtcattttcgtcgtcattggtatttccggcaaaacaggcgcgcgcaattcggatcgagccgatcagcgtctgttcgtagaaggcggcgaaatgcctgttgtcagcggcattggcaattgccatgtggaaggtgaagttcgtttccgaacggccaacaccctcgccagacgcaacctccttcttgaacatgtccatctgctcggagatttttctcaagtcttcctcggtgcggttctgcgccgccaaccgatggattacccggctggcgacgagcaatgcatcatagagtttcggaagatcgtcgaagtcaagcggcgccactttggccgaacgtccctcgcgcacgacaaggccgtcggcgatgagctggatgatggcttcgcggaccggcgtgcgcgatacggaaagagattcggccagcgccgcttcgtcgagactgcgaccgggacgaagttccaaccgtaagatggcctcgcgcagttctcttgctactttccacgcatctctttcgctcatatttccgccttcaaatagactgacaaagcaatgccttatcgcaaaagtggtattacaaagaattttacaaggcaagcaaccggctgcatgacgccacacccggctgagaaggtgcaatttctgcgatagattgcttagcgtataagtacgccggacgccatgaagccgccatctatgttgaggatgtgcccattgatatacgcagcctccggcgacgccaggaactggatggccgcagccacttcctccggcttggcataacgcttggcggggatctgggcatcccatattgcccggtccttaggaccgtgaacctggaggatcatcggcgtatcgaccggtgtcggcgcaaccgcattggccgtgacgcccttgtcgccgagttctgcagccagaaggcgcgtcagcatgtcgaccgctcccttgctgcaggaatatgcaccgcgcccggtattcgcgatctggccgtttaccgaactgacggttatgatgcgccctgcacctttcgccaccatctgccttccggcaaattggcagcaattgaaagtgccggtaaggttgacggaaagaatgcgctcccagtcctgcggatcgaaatcgaggatcagtccggtcttgacgatggcggcgctggtcaccagaacatccgtacccccgatcgcagcgatgtcgttgaaagcggcttcgacagcatcacgatcggcgacatcgacagcgaccccggtgacgtcgccggcttccgaaaggcgtgccatggccttgcccagaacctcccgagaccggtccatcacgatcacctttgccccggaacgcgcaaagacatgggctgtcgattcaccgataccgccggcgccaccggttaccaccactatcttgccactgaagtcatacatgcaatcacatcccgatacagagagtccttccgtatacaaaatggataccgcaagcttgtcaagcaccgctttgcacgctatttcccgcgctcacgcagcctaacgaccggatttcagaaatgagcacgcagctttatcaccacagcgcgctgttttcggaacagggtatccgcaggattggcgtcatcttggtcgacggttacgctctgatatccctggctgcgacggtcgaaccgctgcgcgcggccaacatcctatcgaagaccaagctttacgacttcaccttcatcaccgccgaaggagaccgcgcgcagtcgtccatcggtatcgcattcgatgccatcgagatgcgaagcgcgccggtcgatttcgacctggttttcctggtcgcaggcggcaatccaatcctctacgagaatgtggaactgggacggtatctgaagcggctgacacggcagaacgtgccgctgggcggcatttctggtgcgcccgccatccttgcacgttacggattgatgcggcatcgccggttcaccatccactgggagcacttcgactcgttgaaggaaatgtcgcaggacttcaacctcgaaaagtcactctatgtcattgatcgcgatcgatacacatccgccggcggcacgggcacgctcgatcttttgatcaacatcatctcgaaaaaccatggccgtgtcctggcccagcaggtcagcgactggttcatgcataccgaaacgcggctttccgaagcgccccagaaggctggtctcgaacagaaatacaacattcatcacccggcggctctggcggccgtcgaactgatgcacaacaatctggcggaccgcctcacgcttgaggaaatcgctggccgggcgcatatcagcgcccgacagctaaaccgggtattcgtcgaaatgctcgacatgagcgtaatggaattctatcgccatatcagcctcgatcgcgcagcccagttgctgaagcagacagtcctgcccatttccgaagtggcgctggcgacgggcttttccaatgccagccatttcacccgcatatttcaggcccgtttcgcgacgacaccgaaagccatgcgtgtcgccgccagagccgtcgccttcgacaaggaacgcccttgaggccgttccttgctcgcgggaaacagcgtcagagaacctgactgagaaacgccctggtgcgcgggtccttgggattggtgaaaatctcgcccggatgcccttcctcgacgatgaggccgcggtcggtgaagtagaccttgtcggcgacttcctttgcaaatcccatctcgtgcgtgacaaggatgcaggtcatgccgtccgaggccagttccttgatcgtaacaagaacttccttgaccgtttcggggtcaagcgcggcggtcacttcgtcgaacagcatgatatcggggcgcatggcaagcgaacgggcaatggccacgcgctgctgctggccgcctgacagctctcctggataactgttttccttgccttcaaggcgcactttcttcaggagcgcgcgtgcgcgggcttcgacttgcgcacgcggttctttcaacaccttgaccggcgccatcatgatattctgcaaagcagtcttgtgcgggaagaggttatactgctgaaagaccatcccaaccttgcgacggagagcccgcttgtcgagtttcgcatcatggacttcctgcccctcgacggtgatcgaacccgactgaatgtcgttgaggccgttgatgcagcggatcagtgtagacttgcctgaaccggaagggccgatgatacaaacgacctcgcccttcatgatatccatgctgatgcctttcagcacatcgatatcgccataggatttcaccacgtttttcatcgccacgatgggctgactgggagaccacatatctttacctagagcttgacggcgaacttgcgctcaaggcgcaccgtgagttttgcaatcgggtagcagtagaggaagaacaggatgaggatgaagccgtagaacggcatcagcagttccggtttattgccttccgcttccatcgcctggcgggtgagcgtcaccatctcttccgtgcccagtatcgagcagagcggcgtcgccatcgtcaggatcgcataccagttcatccatggcggaatcatccgcttgatacattggggaatgatgatctgccagagcgtctgcatgcggctgaagctgaggctttcagctgcttcccattgggcggacggcaccgattgtatcgctccgcgcacgatgatggcgatatttgcggcaaccggaagcgaaaggccgatgacggcctttatccagccgggcaatggcacgcgcgtaccgaaaatgttcagttcaaacggaaacgccaaaagcaccacgaagagcagcacgagccatggcgcattacggaagaatgccgttcctgtattgccgagaaaccgaagcggaaaccatttcgaaatcagggtcattccaagcaacacgcccagaccggtgccgagcgccatcgagaggaccgagatcaggacattgaagagaaagccgttcagcagaaggaacggcgcccatctgtacagaacggtgatggcgctatcgacggtgacgctcccctgagccagggcctgcagcggccacaccagcataagcagcatgacgtgccaccagcggatgtttgcgagccaggtcgtgaacgacaggctgtccatctgcggagcagggcgaagtggcagcaggacagccatttcactgccgccggtgcgctgctcccgcgcgcgcttgtagatatcagacgccatagccgggcaccctcattctgcgttccatgaacctgagaccgagcgacagaagtccgacaagcccgacatagacaaccagcaataagagcatggtcgggttctgcgctgccgggttgtcgttccacagggaggcggactggtaaagcaattcgggcaccgcgatcgcgaaggcttgcgatgtcgtcttgaccagattgataaggttgctgctgagcgccggcaggcagaccctgagcgccagcgggaattgtacttccgaaaagatcagccaccggctcataccgagagcatccgccgcctcgatcgtcgatttcggaacagcctcgagcccggatcgaaaaatctcgacgttgaaggccgcgccgaaaagcgaaagtgaaattgctgcccagccgacgttcgagatgagcggaacctgcgtccatccgtccggactgtagctcggggtaaactgccccagggcgaaatagaagaacagcagttgcacgagaggcggcgtgttgcggaatatctgcaggtaaccgctgacgaacaaccgtgcgaccttgtagcgggaggtctgcagcatggaaccggcaaagccgatcacaagcgaggcaacgacacaaatgacgctgagctggatggtcacccacagaccggaaaaaatccggtccgcggcgctgccatcgtacaaccaaatgaagtcccagcgtggtgctctctgagcaagatcacggaagtagtctgacaggacgttcatccggcgcccttacttgatcgggtcggccatcttgtcgcgcatggcttgcagatagccagtcgacttgatctcccacttcttctcaagctccaacagcttgccgctgcggtgccagttgtactgcatgcccgaaatcattgctccgaaggcacaagcttcttcggactttgcaacagcaagcccccagggcgactgatcttccgattgcaacggcatttcgaaatctccccaggaaccggaagccagatccgatgcgatggaggaatcgtcaaaaaggaaagccacgcatttgcgatcacgaagcgcttgctttgcttcggcggcgttggtgaaggccgaaatcttggcgccgtacttgtcggagaccgactggttgtagaacgcaccctgaatgccgcagaccggctttccgttcaggtccttccagtccttgaatgcaagcgccttgggcgaaaggatgttggtaccggacgcataatagttggggcccggaatgccgacgatgttgcggcgttccttggtgtccgtcatcgtggcgatcatgagatccgtttgtccctgctccacgaactgcatgcggttggatgcaaccaccggaacaagacgaagctttacgcctagcgtcgcagcaacttccttcgcaaggtcgatttccaggccaacgatctcgccattcgggtcacgaaagccgaacggcttgtagtcggccttgacgccgaccgcgatttcaccgcgctctgtgatgcgcttgagagtggcattcgtgcattcggcagcagtgacggaagtcgcggccgtcagcagtcccatcgtcaaggcaagtaatcttttcatgtccattccccttgttttaactgacgttgaatttgacaaaaggaagaattaaatcttgtcttgttcggacgtattttgctcacttctggccacgaaagccggactgcacagcagtcaggtcacggatacgcaaatcgatatccttcaccccggacttgcatgacaggcatggcacttcctcaaataacggcaggcaaaagatcgtctgcaaaaatcaaagtgcgatcagatcatgcagttgtcgagccggctgccgccttcgtcaagatcgaaacgatgtcgctttcgttcagcaatccctgctcggcgacgacgtccatgaacggccgtccctgtgccagcgaggactgcaccatgttcgaaaccacagcgtaaccgagacttggaacgagagccgttgccaaggcactcgaagccatgaggtgatcgagcgaggaagcctcgttggcgacgagaccgctgatgcaacgcttggcaaacatatcggcagaccgtgccagaagcgctatgctgtccaacaatcggtcacacaccagaagttcatagtgatttatttctagaagcccttgctggcatgccattgcgatggcggcatcattgccggttattgcaaaggcgacctgacagaccgccatcggaatgaccggattgaccttgccgggcatgatcgatgatccctgctgcaccgccggcaacgtgatctcctgaatgccgcctgccggtccggaggaaaggatgatgaggtcgttggcgattttccaggacgaatttgcggcattgcgcagctccgccgagagacgcgcacaagtgtccatgttctgcatgccgtcgaaaggattgacgatcgatgtgaacggctctcccgtcaatgcgcatatgttccggacgactgctgcgcgataaccgggcagggatccaaatccggtgccgatcgcggtgccgccgataggcaggtgcagaaattgctgcctgagaatttccaactgttcccgatgccgccgcgtaaccgcagcatatccacccagagcctgtcccaatgtcatcggctgtgcatcttgcaggcatgtccgtccgaggcggagcaaggctgcatattcctgctcctttgcggaaaacgcgcgcgcaagttcctcaagaccagcatcggcatccgccatcgcccgatatatcgccagcttcatggcggtcggaatgacatcgttcgtggactggccgagattgacgtggtcattggggtgaatgaaagcatatccaccaagaacctcgcctcgtttcgaggcgacgatgttcgcgatcacctcgttgacgttcatgttcgttgaagtccctcccgagccttcaagcatatcgacgacgaagtgttcgttataatgcccctgcatgatgtcccggcatgcatcgacaatcgcatcagccctgtctggcgagatggcaccaagttcgagatttgcctgcgcagcggcatgtttgacgaccgccagcccccagacgaaatacgggctcgatgcaatcggacggcccgaaagtgaaaagttatgcgtcgcgcgcaaagtgttcacgccgtatagcgcaccagccggaagctccgcacgtcccaatccgtccacctcgatccgaatgcctgtcatgtctgttccttcccggtgccagctgcgaccagcacggcttttaagatcctttcggaaaagttggtcacgatatttttcaaattagagaatattgctcttagcattaggggtgctaatactactggggcattgacggcaatgggagcgaaggcatgaggccgacgggcgacatgtctctgaacatcaacctttgggacctgcacgttttcgagacgctcgcggagacccgcaatctgacggcgtgttcgagacagttgggggtcacgcagtccgcagtctcgcaatcgatcgcacggctggagcgcctgttcggtgtgatgctgatggatcgatctcatcggccgcttttgatcacgcgggcgggcgaaatcctcaggcggaacagcatcggcgtgctgcaggagatccggcggactgtcgatgaagtgcgggcgacggagatcgaggaacttcccatgttgcggcttggactgatcgacaccttcgccaccacagccgggcctgtcgtcatgaaatcattgagcagacgtgtcgaaaatctacagatgtggtcgggcatcacacccatgctttccaccgagctactcaaccgcaccgtcgacatcatcgtctcgaacgatccgatgactgcaaatccggaactcgaacgcgaatgcctgctgcaggagccgctggtcgcggtggtaccaaaatccgaagccgatcgcttcatgacgatgacactggcggaaatgtgcgccgctctgccacttgtccggttcagtgccagatccaatctcggccagaccatcgaatatttcctaagccaacgcaggctttctcctgcaaggaccatggaatttgatgcaagcgaggctgtattacgcatggtgtccaacggcttgggctgggcgattgccacgccgatgtgccttctgcatgcccattcatcgacaatggacttggcggcgctgccgcttccaacccagacgattaggcggcggatctatctcgtatatcggcgtaacgaactcaccccgatcatgtcggatgtaatcgatgtctttcgccaggtcatagcaaccgtaatcatcccgcgcatcgcagacgtgacgccttgggtcgatctggccgcagacctgccggccagctctgtcgtgtgagttcatgccgatgtcggcgcaagccttgcctagatggacgtgcgaccggcgggatctgcaggccattacacagcgtccgcgcaaaacgcaccttgctatgccgggtccctcgtctgacgctgtgcaagatcaaagcttcgcgcttcctccggatgctcacaccgcgccacatcgcgcattcgtggcaggttatccgcaggagacgagctagatcgccagcgaagatgaagtctcggcgccagcgctaggaattcagtctttggaatattggttgcggggagcctgatggcaaggagacttgtaaatttgccgaaccgtaaagggaaatgaaccgccgacttggctcgccccgctgagacctcgaagatgtagtaacgctggctccggggattggctcagccagccgtgatagcaagctgtcttttcatccgacgctgtaaccaccgtcgaccggcagagtgacaccagtgacgaacgcggcggctggcgagcacaggaacaggattgggccgacgagatcctcggtcgttccccaacgcttcagtgcggatcgctcggcgatcttcgcttcgctatccggctgcgaccacagcggcttcgtcatctctgtgcggtgatagcccggcgcaaccgcgttcacgcgtacgccgtcgcggccgtatttgtgcgccatggcgcgcgtcaggccgacgatgcccgtcttgctggcggtgtaggcgggaacactttcgtcggccagatagctcagcatcgatgcgaaattgacaatgctgccattgctcgtcctgagcaacggaaaggcggcgcgcgacagtcgcatggcgctgctcagattgacgtccatgacatcgagaaagacatcctcgccccactcgctgtcggggcgcgcgatgccctggcaattgaccagcacatcgagcgacggcagatcggcaaaaaatcgaccgaccgcggcgccgtctcgaacatccagccttgaaaaggcgatcgaaccggacgagctcgatcgggcgtcgtcaagccggcgttcggaactgccggtggcgagcacgttggctcccgcaccggcgaagccttgcgcaacggccagaccgatgccgcttgtgccgcccgaaattaccaccgtcttgccatcaaggaaattcggcgcgaacgcctcgttgctgtccatcatttctactccatcgatcagatcaacgccgccagcgcctcgatcaccatcgcttcggtgaccggcatcggctcgttgtggatgatttcgccggcgcggcaggcgcgccgcgccacaatttccaacttctcctgggaagcctcagcgatcccgatatccgccagccgcgtcggcagccgaaccgactggcaataatcgcgaacccgcgcgaattcgtcatgccggccctggatcttcaatccggccagcacgccgatggcaaccttctcgccgtgcaggtggtgatgcacatcctcgagctcgcaaaggccgtgatggatcgcgtgcgcggccgccacgccgccggactcgaaaccgatgcccgacaggaggatgttggcttccacgacccgctcgattgccggccccgccgtctttgtatcgcattctgagagcgccgcggcaccgaactccaggatcgtttcccggcagaagcgggccacctcgaaggcaagcggaaggccgggcatcctcatgcaattgaagccaccgctttgacgacaagcgtccgcctcgtaccaggttgccagtgcgtcgccgattccggccgcgaggaagcgcgcgggcgcgccggcgatcaatgccgtatcgacaagaaccagatttgggtttgcaggcaggaaactgtcataagcaacggtgccgtcgtcgttgtagacgaccgcgagcgcgctgcacggtgcatccgaagcggcgatggtcggcgccacgatgacgggcaatccgagatcgcgggcagccgcctttgccgtatcgagcgccttgccgccgccgacaccgatgatgacatcggctcccacagtcctggcccgggcgacgaggctggcgatctcaccttccgagcactcaccgccgtgacgcacgatctcgacatcggcgtcaccatcgaacgcgtccgacacgtacttttcgagcataccgaaaacgccacggtcgagcaacgccactgcccgtttgccataagcgtgcgcttcctgccccagcagcccgatcgcccccgccgcctggatataacggccggggaagcgtgcgccgcgcggcttgatgtcggccgtcaccagcatacgtagcctccatcggcgagtacgatcgagccggtcatcaggctggacgcgtcgctggcgaggaacaggatgacggaagcgacctcgtcggtccggccaagccggttcatcggggtgccgcctacccagtgccggtacatctcggcatcctcgtagacgtacttgttcatttccgtgtcgatataggtgggcgccaccgaattgacgcggacgccgcgcgcgccccattcggcggcgagcgacttcgtcagatggtgaacggcggccttggaggcattgtagttcgcctgctcctgcgggcgattgacgacgaagccggacatcgacccgacattgacgatggtgccggagccgcgttccagcatagacttgccgaacgccctgcagcaccagaagacgccgttgaggttgacgtcgatcaccttgttccagacatcgtcggccattgtctcggccggatggttgctgatggcgatgccggcattgttgacgaggatgtcgacgcggccatgacgggcgacgatctcgtcatgggccgcctgcacggctttgacatcggtgacgtcgagcacgacgctgtcgacggaataccccttggcggcaagcgttgccgtagcgtctttgagaagcgtatcgttcatgtccgtcagcacgactttcgctccagcttccgccagcgcctcgacggcggcatagccgatgccgcgcgcggcgccggtgacgacggcaatcttgtcggtgagcttgaacttatcgagatacatcagtcgcatccttgaagggtcgtttgtagagaagaaggaaagagcaagccggcgagcgtcgaagccagatcgttgggatcggccgggatcgtagacggcggaaagacgaggtcggtcctatgcggctccggccagccgatgacggccattcccgcggcaagaccggcgacggcgccggggatgctgtcctcgaccacgatgcagttctctgggctgacgccaagcagatgcgcagccctgagatagggttcgggatcgggcttgccgcggaggacatcgtttcggctgatggtcaccaggccgggctgctgcaggccaacggcccgaaggttggcatcaaccagcatgcggtccgaattcgaaacgatggagaagggcgtccgtgtttccgcaagcagcctcagagcggcatcgacgccatggcggcgctccagcttggcggcatcggccagatagcagcgatactttccttcgacatagtctgcgaaggatggcttgaaaccgatcgtctcccgcaacagtgcatggcaatcggcgtcgctcatgccggtcatgcgatcggcgagcgcgtccggcacgcgatatcccatctgcagcagagcttgcttcatggcatcgaaatgcagcccctcgctatcaacgagggtgccgtccatgtcgaaaagtacggctctttctgtcattgcggcagcccgtcgagatcatcgtagagggcctggctgtgcacgtagagtttttcgaagaaggcctgcatcggccgatatgtttcagcccatcgcggatcgggggcgatctcctgcgcgtaggagacaaaggcgcccgccgcatcctcgacgcttgaaaactgcccggtggccgcagccgccatgatcgcacagccgacgaggccgcattccggctcggatggaacaaggatcggaatgccgtagacgctggccttgatcttcatccagagttcggtcttcgccccgccacccgacgcgatgacccgctcgagcggcgcaccggatatgcgatcgagaatattgatgtggcgcttggtggcgaaggcgacgccttcgagaacggcgcggtgcatatgcgcaagaccatgcgcagcgccgatcccgaaaaattgcgcgcgcgcattgcgatgcccgccaagccgctcgccggtcaggtagggcatgaagaacaggcggtcggagccggcgggcgcctcggctgcctttgcgacgatgtcctcgtaggaggatttcttttcgtcgaacgcccgtcttgcccagcgcatggcgtcgccgccggactccagcagcatgaaggcgccccagtttccttcgacggtcccgacgttgcagatcgagggatcgagaagcggcttggcggcgatcgcggtgatgattgccgacgttcccatgacctcggaacccacaccaggacggcacacgccggacccgagcaaggccaccggataatcggcgccgccgaccagcaccggcgtgccgggccgcaaccccgtctcgatcgctgcgctctcgctgacggtaccgagtatctccgtcggattgcgaagaggcggcagcttatcggcatcgagcccaagcagcgcgatcatcttgcgcgaccagtctccgctgcggggatccatgagaaagcttgcgccgccatcgttgcgatccatggcgatctcgtcggtcaggcgcagattgacatagtccttcggcatcaaaacggcggaggccttgcgataggctgccgcgtcgttgtcgcgcagccattgcagcttgaagcccggccaggcgggcgtcggcgggttggcgcaatcggcaagataatcgctcggcgcatgcgcggcctcgaaggccgtcacatagtcgacggtgcgcttgtcgttccagagcggcgcggtttcgcgcaccaattcgccaccttccccaacgagcaccgtgccatgcatctgaccgcaggctgcaatggcaaccacgcgagagcgcgcatcggcaacctctcccagaacatcgcggaccgtggcgacaacgcccgcccaccaatccgccgggcgctgctcggcccagccgaattgcggaacgatctgctcgtgctcgcggctgcagaccgcaagaattttgcccttggtgtcgacgagggcggcgcgaacgctgccggtgccgacgtcgatggcaaggaagagatcattaggcatgctatttacccctgcaggaggcggacactacttgcgaaaccagttggaggcatattgcaggagcatcgcaccgatgatgatgcagcccatgaagacctgctggtgatagccgggcacgcgggcaaggttcatcatattggcgataatgccaagcacaagcacgccgatgaaggtgttcatgacgccaccgcggccgcccatcaggctggcgccgccgatgacgacggcagcgatcgcatcgagctccgaaccgacgccgatattggctgagccgatgccggtgcggctcgtcgaaacgataccggccgcggccgccagaacgccggagatcacatagaccgctgtcgtgtaataagcgaccggaataccggacagcctgacggcctcgacattcgagccgatcgccttcaccaggcgcccgaagcgcgtgaaggtcaggacgataccggcgataacgaagacgatcgccatcaacacgacgggatagggaatggtggcgatcgaacccgatccgaaggtggtgatccagaccccggcttcgtccatctgaatgggctgtccggcggagacgatcagagagagaccacgcgcaacggtcatcatcgcaagcgtcgtgacgaagggcggcagtttgaggaaggcgacgaggacgccggaggcgaggccgcaggctgcgccggcgatcagcgcggtcgcgaccgctccgccggtgccgtattcctgaatgacgatcgccgacaaaacgctgccgagcgctgccaccgaaccgaccgagagatcgataccccgggtgaggatgacgaagagcatgccgatcgccatgaggctggtgccagcgctttgtcggagaacgttgatgatgttgcgctgggtcaggaagacgtcggacatcgaggtcgccacgatcagcagggcgatcaggatcgccagcgtgccgtagcggtgcaggatgttggaaatgttcagcgaaggcgaacggtgagcggtttcggtgagttcggtcacggctttaacccaatcagttgctggtcgcgatggcttcggcctgtgagacggtattgaccatcgccagcttcagcagtttttcttcggtgtagtcttgcgggtcgagcgacccggtcagttcaccctcgcgcatgacgagaatgcggtcgcacagcccgaaaagctcgatatgttcggacgagatgacgagcaccgccctgccctcggctgcaagcgacttgatgagcgagtagatctcggtctttgcgccgacatcgacgccgcgggtcggctcgtcgaagatcagaaggtcgccatcggcgtggaaccacttggcaagcacgaccttctgctgattgccaccggaaaggctcgatgcgggatcgttgaggctgccggccttgatgcgcaggcgcgccgccagtttctcgacggtcgcgccttcggccgcccgccgcacgaagccaaacgcattgaccagcggcccgagcttcgacatcgtcgcgttgacgcggatcggaaaatcgagaacgagcccctgctccttacggctttccggaacaagcccgatccctgccttgacggcggcgcgtgggttgttcacgcgcacttccttgccatgcagaaagatcttgcccgaacgcgccttctcggcgccgaagatgaggcgcaccaactcggtgcgaccggcgccaaccaagcctccaagcccgacgatctcgcccgcctttacagagagcgatgcgccacggatgcgcgcgccatcggagaggtcttcgatccgtagcacttcctcgccgatcggccgttcgagatcgtcgccgaaaagagccttcagcgatcggccgaccatcatgcggatgacgtcatcgatcgcgacatcctttcgctcgaccgtctggaccgacgcaccgtccttcatgaccgtgatccggtcggcgatgcgaaacacctcgtcgaggcggtgagagatatagatgatgccgacaccgcgctcccgcagcgtccggatgataccgagcaggcgttcggcgtcctgcacggaaagaaccgctgtcggctcgtcgaagaccatcacgctggcattcttggagagcgccttggcgatttcgacgacctgctgatgagcaacggacagatcggacacggtcgcggatggcgagatcgaaaagccgaggctggagataagctccgcggcgcgccggttgaggtcgcgccaagagatcaccgagggtatctcggccagaaagatattctccgccaccgtgagatccgtcgccagcgccatttcctggtgaatgatggcgatgcccttgtcgagcgcgtccatcggccccttgaaccgttgctcggcgccgcgaaccttcacgcttcccgattccggaacgtactccccgcctagaacgcgcatcagcgtcgacttgccggcaccgttctcgccgagcagagcgtgaacctcaccgctgcgcaaggtaaaatcgacaccttgaagggcgcgtacgccgccgaaggatttccgtatgccggtgagctcaacaacagtttccatagcgtcacattctgcctgtcacacgaccgtgccgcgttctgcggcgacaccggcgcgagccggcttcggaggtcattgaatggatggccggcggggacgaagccgcgccggccacagggaggatccggtcttagaataccgcgtccttcttcaggtacttgtcgacgttgtccttggtgatcgcggtcggcgtcgtgtaggtgatcttggagatatcgccgggcagcttgccatcgagcgcattcttggccagatcgaccgccgtggcagcgacgagcgccggatcattgagaccagttgcgccgtacttgccatccttgatcgcctgcaacgcttccttctgaccatccgcggccgccaggaacaagacgtcccccgacttgtttgcctgctcgagtgccttctgtgcgccgaggaccatggagtcgttttcgccgagcacgacgttgacgtcagggttcgcggtcagaagatcttccatcgccttcaggccgccttcgttggtccaggcgccccatccctggccgaccaccgtgaagttggcacggccttcgttgcgcagctgaccctcggtcagacctgccagaacacccagacggcgctcctggcccacttcattgcccttgtcaccggagatcaacgcgatcttgagctccttgcccttggtcgcatcggcgagccactggccgaccaaaaggccgttctgcgaattcgaagactgtaccagggttacgaaattggcctgtgcgtcgatcgtcgagtcgatgacgaagaccttgacgcccgctgcggtggccgcgttgacggcgggcacaagacccttgctgtcgcgcggattgatgatcagcgcgccgatgccctgagcgaccatgtcttcgacgtcggcgacctgcttgttgagatcgttctggccatcgacggagatgacttcgcagccgagctcttcggcacgcttcttcgccgagacttcctgtgcggcgaaatacggcgcgtctagcgtcttcatcgagatgccgatcttgcaatccgcggcctgcgcgttcgccatggcaagtaccgatgcggctgcgcagagcgcaagcgtcattacagtctttttcattttcgtttctcctccgggtgagcgcttcaagcgcaagccatctcctggctgaaatgtagcgtagttacatgaattttttccgtcaacatattttttgttcaatttctacatttttgcagcgcaatatggcctacaaatttcgcttgcgcgtgtttccatatccatttatgtaactttactaccaaacggaggatgcatgatgatgcgggaaccagtctcaagcgttgtcgacacgatcggcggcggaatgagcggaaacaccgggcgctacgagaagcgcctgagcgatctcaacgggctttacgccgacgaagccgcgttcgacgcggcggtcgaaaagctcggcgatgtcgtcgtctacgacgtggaagactttcgtcccggcacacatagcggcgacctcatctacggcgtcacgcgcatgagccccggcaagatcgccgacgaattctttctgacgcgcggacatatccacgccaaggcggaccggcccgagatctattacggccagaagggtctcggactaatgcagctcgaatcgccggcaggcgagacgcgcatcgtcgagatcgagccgcagaccatctgctacgtgccccccttctggatccaccgctcggtcaacatcggcaacgaggatctggtgatggtcttcgcctacccctcggacagcggccaggattacgggatcatcgaatcctcccggggcatgcgccaccgcgtcgtgagcgacggagccgagggctggaagctcatcgagaaccccgcctatcagccgcgcggcgaggacacggttcgcgcgctgatgaagtcctacacctgatcgacaagagcttgcggagaatgccatgacacatcctatcgacctcatcgccggtctcggcgttgttcccgtcatcgccatcgagcgcgcctcggatgcggtggcgctcgccgacgcgctgctcgaaggcggattgccggtggccgaaatcaccttccgaaccgaggccgcagccgacgttctcgcagccatgcgcgacgcccgccctgaattgtgcatcggcgcaggcaccatcctcgaccgggccaacctgaagacggcaatcgcatccggtgcccgtttcggcttggcgccggggttcgatcccgacatcgtcgatgccgcgaaaaccgagaacctgcccttctgcccggggatcatgacgccatcggacctgacgcttgcagccgcgcgcggcgtgcgactggcgaaattcttccccgctggcgtagcgggcggcccgaaggcgctggcgggcatttccgcccccttcgcccatctcggcatccgcttcatcccgaccggcggcgtcaccgaggcaacgatcggcgagtggctggcgcttcgccaggtgatcgccgtgggcggcacctggatcgccaagaccgaagacattcgcgaaggtcgcttcaaggatatcgcgaaaaacgccgcggccgccgtcaaggtcgccaaggaagctctggagaagcgcgcgtgagcacttatgaacccgcaaccagcccgacgctctatttcatcggtgtgacaacaggcaaaagctcgatcatgaaggtctttcccgcctgggcggactatctcggattgaagagcgccgtgatcaagggtatcgatttcaagctgcatgacgatcctgccgcctatcgcagggctgtcgaattcattcgcgatgatccgctgtccatgggcgcccttgtcaccacccacaagatcgacctcttccacgcctgcagggacatgttcgatgtcatcgatgcgcatgcgctgctgatggacgaaaccagctgcatctcaaagcgggacggaaagctgatctgccacgccaaggatccgatctcgtcgggcctgtcgatcgacggcttcctcggcgaaacctacttcgcggacaacgacgccgacctgttctcgatgggcgccgggggatcgacgatcgcgctaacctggcatctgatgcgaaagaaccgcggcaggaacgtgccgtcgcgtatcatcgtgaccaatcgcagccagcatcgcctggacgagatcaagcgcatccacgagcaggtcgagttcgacgtgccggtcgagtatcttctggcggaacgccctgaagacaacgacaaggtactggccaccttgaaacccggctcgctcgtcatcaatgccaccggtctcggcaaggacgcacccggctcgcccctgacggatgccgccgtcttccccgaacgcgccgtcgtctgggatctcaattatcgcggcgacctcgtctttctcgaccaggcccgtcgtgagcaactggaccgatcgctgcgcatcgaggacggttggacctatttcattcacggctggacgcaggtcatcgccgaggtcttcgacgtcgcgatcccgacatcgggtccttcgttcgaccgcatatccgagatcgccattcaggccgcggggagataagcatgaaccagcgtattctcgtcacaccgcgttcgttgacacaggaaccgcatcccgatgtcgagcggatgcgcgagcagggcttcgagatcgtctattccacggcaggcgcaatgccgaacgaacaggaactgatcgatctggtgccgggctgtgtcggctggcttgccggcgtcgagccggtgaccccgaaaatcatcgaagcggccgcggccttgaaggtcatcagccgcaacggcgtgggcgtcgacaaccttccgatcgacatgctcagggagcgtggcgtgaaggtcatgatcgccgagggcgccaattccatgggggtcgcggagctgacgatcggcctgatcttcagcgccctgcgttccattccgcattcggatgccggcatcaaggccggtggctggccacggttgcgcggtgctgaaatccatggccgcactgtcggcatcatcggctgcggcgcgatcggccgggaggtcgcccgcatggtgatcgcgctcggcgcgcgcgtcgtcgctttcgatccggcgcgccccaatctcgatcttccatcgagcgcattctcgtatgccgaggtcgacgacatcgttggcgaggccgatatcctcagcctgcattgccccctgccccgcgacggctctaccttcctcggtcgagcccgtatcttctcggcgaaaaaaggacaggtcatcgtcaacacggcgcgcgcgcggctggtggacgaggacgccctgatcgaagcgctcgatctcgggcagatcggctcctatgccaccgacgtcttcgagcaggagccaccggtctcactcgagttggccgcgcatggccgcgtgatcgcaacgagccacatcggcgggttcaccgccgaaagcgttgaccgcgccacacgaatagcggccgacaacctgctctccgtattgtcagcctgaggtcgaaccatgcgcgccaggctgaaagagacgccgataggagaaccgctgaccgagcgattgaaacgaccaccgaccggtcaagtagaggtatactggctcggtcaggccggctttgtcattgacattgccggcatgcggcttgtcatcgatccctatctttccgacagcctggccgcaaagtaccaaaacacggcgcgaccgcatgtccgcatgatgccgccgcccgtcctcccggacgagatcttccacgtcgatctcgtgctttgcacgcatgcccacacagaccacatggatcccggcaccttgccattactgctctcggccaatcctggcgccagattgatcgcaccccgcgcggttgccgcccaggccatggagcgctcgggcgcacagggcgatcggctcattctcgcccgcgccggcgaacccatctcaccgctggcacatatcgaaatcattccgacgcgcgcagcacatgagacgctggaaacggacacggacggcaaccaccgatttctcggctgtgccatccggaccgaagggacctgcatctggcactccggcgactgtatccccttcgacgggcttgaggacgaggtgcgtcggttacagccggatgtcgctctcctgccggtcaatggcaggcgcgcggagctttcgcaaaacggcgtgcccgggaacttctcgcttcacgaagcgatcaccgtggcccggcatgtgggcgccgccgacctgattgcgcatcactacgggctgttcgatttcaataccgagcagccggagacaatcgacgccgagatcgctgcgactaccggtctcggcctgcaccgcgccaggacgaacatcttatacaccttgcagaagccgtaaccggcctttcgttgcacgacgcgaccttgctcttaaacctctaagcttctagccttcgcagctaagagtgcaggaaaggcgatccggatggatagcgacatcagaagcagcaacggccgcaacatcatcgaagtcatcaggacgatgcgacccgaattgcgcaagtccgatcgcaaggtcgccgacgtcgtgctcgacgatccgcgccggatcatgaatgcgaccgttggcgaaacggcggcgctggccgaggtcagccagccgacggtccttcgctttgccacggcggtcggctgcaacggtttccaggatctcaagatccgcctcgcgcaaagcctcgccttcggcacgccggcaacgcattcggtcttgctcgataccgatgagccggaggtaatcgccgagaaaatcttcgactacaccatgacaagtctcgactgggcccgctcgaagctcgacaagactgcccttcacaaggccatcgacattctggccgcggctcgatcgatcgtattcttcggcttcggagcctccggcatcgtcgcccgtgatgcgcaacagaagttcccgcttttcggcgtcccatgtggcgccgagctcgattcccaccagcaactgatggtcgcctcgatgatgaaggaaggcgatgtcgccttcgtcatttcgaacaccggaaccacccgatcgatcatcgagatcgcccgcatcgcgcgcgacaacggcgcgatcgtcatctgtctgacgggttcggaatcgccgttgacgcattattcagacgtagcattgatcgtggaaacgctcgaaaacaccaacatgtatacgccgaccatatcgcgcatcgccgcgctcgtggtcatagacatcctttcgaccagcgtcgccatgcggcggcccgaaggcgagcggacgcgcatcaaccagatgaagcgtcagctgagcgacatgcgtaagatgcagccgatttgacccaatcagaacagaacgccgggattcattcgccaatccggatcgatcgccgccttcaaagcagcaagcaactgcacctgcgtcggctgcaatccggtgcggaagtcgtccatcttttcacgcccgatcccatgctcggcgctgatacttccctggtagcggaaaagaacttcgttgatgatggtcttggcacgcttgatgatcgtgtcacgttcgccatcgggcgttcctgccgacggcagaacattcaggtgcacattgccgtctccgacatgcccgtaggatattgccaggcaccccggtagagcgcttgcaagctcggcctccgcctcggccacgaaggatgcgaggttggagagcgagaccgacacatcggtgcgcagatgccggccacgcttgacctgcccctcgaccatgccctcgcgaaagctccacagggtctttgcctggctctccgaggcggcgatgacaccatcgagaatgagacccttttccattccgagctcgaggaaccgctgcatgagatcagccatgtcagccagtccggaacctccgagctccataaggacataggctcgatattgcccggaaagcggcatgacgagatccggcatggccgcctgcgccaaagggaacgcctcgggcggcatgaactcgaacgccgacatgagatcgcagcattcccgccgcgccaagcgatagagcgcaacggcgtcatcgagagaggccactgcgagcagcgcggtctcgcgctgcgtcggcaggggcgtcaatttcagagaagctgcggtgatgatgccgagagtgccttccgaaccgatgaacaactgcttcaggtcgaccccgcggttgtccttgcgcagcgtcgaaagaccattccagatctcgccattcggcagcacgacctcgaggccgagcaccagatcacgggccatgccgtaacgcagcacattgatgccgccggcattggtgctgacattgccgccaatctggcaacttccctgcgcgcccaatgccagcggaaagaacatgccgttttgcgcggcgcactccttcgcagccgataggatgcagcccgcctcgaccgtcatcgagaagtcgtcgggagcaatggtgcggatcctgttcagccgctccaggcttaaaacgacatggtcggatggcgattgcggtagcgctccgtgcacaagcccggtgttgccaccttgtggcacgatggcgaggccaagatcgcgtgatgctaaaaccgcgttagccacgtcggttaccgatcgcgggcggatcacggcaacggccgcaccgacggtgtcgcgatgccagtcgcgcaggtaacgatccatgccttcaccatcggcaagaacgagatcgttgccaagctttgcggctaagcgtttggatgacatggacacttgcagccctcctgccttcagaaggcttgtttaccaatcttccgttgagcgaccaatagtataggtgatgttcaacgcagctcttcccgacgaagccgcgatcggaagtcgcacgctcaccatgaggcagcgtccattgaacggctggtcgagccgacttggcgcgagcgcgaacgcctctcaagcaatggtatcgagatcggccagcgtaatcgcgtattccagtggctggccggttaagtatcgctctatctcatcgaccgccatttcacccaatctcgtccgctcgaggccgacggcgcctgcgatatggggtgtcaagaacacgttaggcaaatcgtagaaggcggatgccggttccggtatctcagggtcggtgacatcgataatcgcgtcgatccggccggtcgaaagcgtggcgagaagtgcagcctcgtcgatgatggcaccgcgtgccgtattgatgagcgtcgcaccgtccttcatcagcgccagcccttgggcgtcgatcatatgttgtgtcgatggcagcgagggcgcgtgcagcgagacgatgtcggcactgcgcatcagggtatcaagatcagccttttcgacgccgattgccgcgcactcggatgcgctcaatgtcggatcaaaaaggataattttgaaattgaagggcttcagcagctcgatcacgcgccggccgatgcgcgacgcgccgatgatgccgacggtgcggccgtaatttccgatcgtaaggcgctgcatggggtgggtgcgatcgcggttgcggtccgcgacgtaagtgtcgcgaaaccggaaaacctgcttgccggcaaagaggatggcggcaagcgtgaattcggccaccgggaccgcgttcgcctcggccgcatggctgacggcgatgcccgcgcgaaatatgtcttcgtcgatcagccccttcaccgttcccgccgcatgagcgatcatcttcagccccccggctgtcgaaagcacatcgcggccaacatagggagcgccccatccggttatgaggatttccatttcggacaatagtcgcctggcgcgttcgtcagcgaaagtctgcaacggctctcggtcaagcaatcgacccagactttccagccggtcgagaaggcgatcggggagaacgtgctccgtccgccccgggtgcatggcaagcgcgatacccggtcggctcatggcatctgccctggcgcttcgatggcgctgacggttatgccgtccttggtaatccttgccccgagcgcggagatatcaggtgccgccggaggcgtagtccatgcgccggaagccgcagccgggtcatccaacgcgagcacggccgtgatgaggaccgtctcgccggccgggatttcgccgcgcaattgagggacaagcgtcttggcgacgatcaggttggtattcggcagagctttctgcgccagcccggctcggctcaccgtcgaacccagatcgacaatgccggagaaatcggcatcgccaatgacgtgggcactgcccggccctgcctcaagtacgtcgagatcgaagtctcgcttggcaatcgcaaagccaccttcagccgtttgcagcggccgcggcgaattgatcctgtggacgcggatgtgccagggtgtcgcgggaaccagccaggtttcgacggaaacatccttgaatggcgaccatcttgaatagagcacgtcgccggcgagcttcgcctcggcgttcgtctcgcgcacgcggtagtgcagtccatcgtcgctgaaggcgagcgcggaatcgaaggcaccaccggcaaagctccgttcatcggcttcgacgctgaagccatatcgcgccgagtaggcaaattttgcatatttctccgtgccgaaccgcatctgcagattttcttgtccagaagacagcgccacgacatcgccaccggcgcgcatcagtaccatgccgggatggcgctgcggcgagacgctttcgcttggtgcaggcgctttctccttcgcggtccagaacgggtggtcatccgcgatcgccagcggcagaaaggccttgaacgcccaatatggcgatcccgccgagttgtagctttccgacatcagcaggtttggatagccgaagccgatcgacaggatgccatcgcgattggtcatcggcttgtccttccaccaacgcagatgctgcaggcagagatgcttgatctcgccccagggcagtgcctccagatcggcaaaggcgagcgccgaccagaagccggcgcaagcgaaacgataggtgaggctgcgaccgaaggggatggttgcgccgtcaggtgcaaaccagttgcgaaaatccttggcgaacagaacggcgcgctcgcggtagcgtttcgcgtagtcgtcatcaacgagcttggaatagatcagcccatagaaatgcatggcgaagggaatgtagtggtcgacgcggcgcacgttcccgtcgcgataccagccgtcaccgatatagaagccctcgagctcatcgaggtattgcctcgtcaggctgcgatcgaactcggcgccgacgcgatcgagggcaatgtcgacgaagatgcggaagaatttccagttgttatccgcataatcgaattgccgcgcatgcttgagataggcgatcatatttgcccgtgcccgcttgctcagaggctcccagatcttgtcggggacaagcgccagcgcgaaacctagcgccgcgagctcgaccattcgctggtcgcgcccgttgactgtgccccaatattccgggtgttcgggatccgtgccgttcgccagcccctccgcaaaacgccgccagtggggaaagtcgccctttcccgctccaagcggcgccagcccccaaagagggcgggcaaacccttccaggtccgcggccgcgcgatcaaaatgggcgccggcaccatccagccgaacgcgtgcattgccctttgagaaataggggagcaacggatcgaagaggtcgaggagcgcgcggctcatgtcctcgcgcgtctccagcggattgcccgctaacggattggcgctggccgtatcataggtcatctctatcgctcatcggtttttggcattggtacggtgccgcccacaacggggacgaccgcatgacatacgtggcgggcaggcgctgaccgatcatggaacctgtcgatcatcaggccgacggcttcgcgcccgagagcgccccgatcaacacgcatggtggaaagcggcggattggtcatcaaggcgcagggcagatcgtcgaagccgacgatcgcgaagtcttccggcacacgaaggcccgcctcggtgacggcttccagaacaccgaccgctatgaagtcgttcatgcagaaagcggcggtaaagccctcgttctcatccaggatggcgcccatcaattcgtgggcttcccggctggcgctgccttggaaactcatcggaaccacccggctggtggctgcctcaacggatgcgatcgccgcgtcgaagcccctcacgcgttcgcggatggtgtggcgatgggaaccggtgaaatgcaggatcttccgatgtccagccgcaagtaaccgttcgccggcctggagggcgccgaagaagttggcgggagagacaccgtcgaggtgaagttgcggatcggtgccgttgacgagcacgacggggattttatcggcctcgatccactgtcgcaacgcggtgttggggtcgatgccaacaagaaacaagccttctgcgttggtggccttcatttggtcgcgaatgacatcaggcatcgcgcgatcctcacggaccagcctgacttcgaaggacattcccgcgtccgccgcacccgcccgcaagccttcgacgatcgcttcgtaaaagacactgagcccgccggtcgcaccgtcgctggcaatcaaggcgaggccgcccggcatcggctcggaaatccccttcgtctggtagccgtgctcggccgcgacccgcagtatatgctgccgaacactttcgctgatgcccggctcattcgccagcacacgcgacacggtcgatacggaaacgcctgcggctgcggcaatgtcggcctgacgcggccgctttgacttaatctcgttcataaacgcagagttatgcaaattatgcaaatttgcaacaaaaagatattttattgcaaatagaaagtttttgcgtaatcttcccgcaacatgcccaaaaggcgttggaggacgccgggcagacaaccggaggaatcagcatgcagatcaatcgacgttcatttctgatgggctccgccggcgtggcgagcggccttgcactcggcgccggcgttccggcctttgcggcggacacacagctgcgcgccatgtggtggggctcgaacgatcgggcaaagcgcacgctcgatgtcgccaggctttatcagggcaagacgcctgatgtgtccatcatcggcgaatctcttagcggggacgggtactggaccaagctcgcgacacagatggccggccgctcgatcgcggatgtgtttcagctcgagccaggaacgatctccgactactcgaagcgcggcgcctgcctgccgctcgatgaattcgtacccttgacgttgaaggttgatgccttcggcaaggacatactgaaactgacgaccgtggacgaaaagctctacggcgtaggtcttggcctcaattccttcgcgctctttttcgatcagacggcattcgagacagcaggaattccgttgcccacgccagatctcacctgggacgagtacgccaagctggcggtcgaactcacaaaggcggtcggcaagaacaattacgcgggcggcccctacggcgcgcgctacacctatgtgttcgacgcctggctgcgccagcgcggaaagagcctctacaaggatgcggcgcttggcttcgacgtcgaggacgccaaggaatggtacagcttctgggaggacctgcggaagaagggcggaaccgtcgccgccgacgtgcagacgctggaccagaacacgatcgacaccaattgcctcgcgctcggcaagtcggcgatgggcatggcctattccaatcagctcgtaggctaccagctcctctcgaagaacaagctggccatcacgatgctgccccgcgagaagaagggcggaccgtccggccactactatcgcccggctctcatctggagcgtcggcgcgaccacgaagaacggcgaagccgcggcgcagttcatcagcttcttcgtcaatgacccggaggccggcaagattctcggtgtcgagcgcggcgtgccgctttcgccggcagtccgcgaggcgattttgccgaacctgaacccaacggagcaggataccgtgaaatacgtgaacctgctcaaggatcaggtgggcgactacccggcacccgcacctctgggatcgaccgagttcgaccagcgcgtcctgcgcccgatcgccgacgagctggcgttcgagcgcaccacgcctgccgaagcggcggcgcggttggtcgaggaagggaaggccacgatccgtagctgaggtcgttacatggtattgaaccgccggcgcaccatggccccggcggttcaacgtatcaaggataaggacagatcatgcgcaaggcgatcatcgtttggggcggctggaagggtcatgagccggagcaatgcgctcgcatcgtagccagcctgctcggcgaagacggctttcagactgaggtcaccaacgatctcggcatattcggttcaccgaggctcgctcatgcggatcttctcgtgcccgtaatcacgggtgaaagcctcgaaaaggcccatgccgacgccctcgtggaagccgtacgcggagggcttgggcttggtggacatcatggctcactcgcgacctcattcaaggaaagcgcgccgttccgctatgtctccggcgtgacctgggtcgcccatcccggcaacatcatcgattttcgcgtcgcggttacctgccgggaagaccctgtgatgcagggaattccggatttcgactatcggtccgagcagtattacctgcactacgatccctcgatcgaaatcctcgcgaccaccaccttcaccggcaaacatgaccctgcggccagcaacgtcaccatgccggtcgtcttcaaacgccgatttggcgcaggccgcgtcttctattccgccctaggccacgtcgccggcgagttcgatcatccccacatgccgctgatactacggcgaggactgaactggtgcgcacgccgccagctatgattgcgctaagtttcgcggtaaatcgtcggcttgatttttctgtcacctctttcatcgcaatatcctccgcattcaattgatccgagtccaatcaacgcccttgcacagcagcccggctacgacgcaccctttcgtggtcatcttgtctccattgattgtcacggtcagcttgtaggttagattgcgttgcggatcgaaggctgttccggcgtagcctccatcggcgtccggattgatggtcatcaccagcctgtcgcccgccttttccttgggcgtccccggtttgatccaggtgtttgtggcgcagatgtccgatccacagggggcgatcctgaccttggcattgccatcgccgcgcgcccattggccgtcgatatcggcagcattgaccgtggtgaaggcgcagaggccgaacgcgatggccgctggtgtcgtcttcatcatgctcgtttctcctcttggcggtgggttgcgcgtgctcgatcgtggcgagcccgacatagcctggaaatcccagtgccaacgaccgcaccattcaatttcaggctatccgcccctctgtttgccagttccatcaatgcctgcacctcgggggctcgattcagccaatccttgcaagggtatatggcaaggacgcacgcctctggcagcgccgctggcggctgtttttcctgtcgacagcaggcctgttcgggcatgataacggcaaggtctggggtgtcggccactatctgctggcgccgaccagatgatgtcccagaaccgcaatcagctcgacccaacgacgcaggcgaccattacgattgcgtgggtcatcgtgctgaacaagcccttctatcctgtctatgtctggtatctggtcggcaatggcgtggtggcgtcactcggcacattgctctcggcgccgctcttcctggcgatcccgtttttggccagacgatcgccattgacagctcggatcgcgctgccactgataggcacgctcgacaccttgttagaaacgaaactcttcggctcgacatcaggcacggaattgtacttcgccgcctgtatcatgcttgtcgcgctgtcgttccaggcacatgaaaagtggtggcaacgtggaatggccgtgcttgtctttgccgtcttcgtgttctcgcggaattttatcggcgtgccgctttatgtctggtctgcgccggagctcgccaccctcttcaacctgaatgccttcgccgtcgccagcttgttggcgttcatcacccttcgacatgcaggggtcccaaggacatgaagccaactcgatcagacgacaaccagaacgaatgggagcgcagtatgcagaagatccatagctggtgttttgctgcggcagtcgcactgatgtcattatcgagcccagtgctgtcagcgcaggccgaaccgcggccggttgcagtcggcatggaccactatcgtgggacatggcttgagatcggccgccggcccatgtggctgaccgatggctgcgttgcgggctattcgacctacaagcccggaaggacgcaaggcgaggtccaggtggaagacggttgccacgtccgcactcccggcgggcggctgaagaccgtcaagggtgatggacggatcctcgatctcgggcacggcaatgccaagatgcgcgtcagatatcccttcttcatcacattcaactattgggtcctttacaaatcccccgataaggcatggttcataagtgccgatcccaagatgcgaaacctttggatctacgcgcgcgccgtgccttcaaaggcaaaactgaaggtgatgataagcaaggcgagccaactcggctatgatgtcagaaagcttgagtttcccgcgcaggccgggcactgagtggccaatggccgcttcagcgagccacgttgcgatgctgctcgaatgtagtgatcgactgattgatcgctcggcgggcgtacaccgaaacaagggtttcggaaccgacttcaagggacacgcattcgaggtgtgcggcccaagaccgggcggcaccctttcaagctgtcatccgacaaagctcaatccgtgaaaacttccgtcatcgcctttaaaataagaaccgcggacgctgctcctgggtcgacgtggccgagtgacctctcgcccaatctggcggcgcggccgcgcaccgcgaccatcgaccgcgtggccatcgcccctccctcgcctgctgttacgacatcgcgccacagttcagcaggcccgctcgcacgctctagtgcagcaccgcccgcttctgccgccgggatccaggtgtcgagcatggtcttgtcgccacgttggcccttgcctcgctcttgaattccgagtgctatcgcctgcaacaccgcaacctggccagcggcatccagagactggcgcaactccaacgcctttgcagcgtgcagaaaggctgtggcgtacaaggggccagtcgaggccccaactgcattgaggaatacagaggcggcgattgtcatcacggccgatggcggcatgtcgtcaagatcggatcgcgccagttcactggaaacggcgccaaagccgagcagcatggtaatgccgtggtcggcgtcgccaatcgcaccgtcaagctcggtcaggtaatccttctccgtggcaatcaggctggatatccggttgaacatccggttcagtttgcgcgcatcgttctctgccatcgtttcccctcccatcgtcagaacgctcccggcggtgagtcgggcgcattctgcttcttacgttatcttcaagactgcggtgtcacatggatgatgcagcagtcccgtcagttcctcatcaagctccatgatggagatcgacgccccgaccatgtcgagcgacgtacaataatgaccgatccagtttgcctcgatggcaatgcccttggcgctcaagcgctgctctacgcgacggaacaagacatagagctccatcatcggcgttgccccgaacgaattgacaaggacggcgacacggctgccttcgaccgctttcatctcggcgaaaatccgatccatcaccttgtcgacgatctcgtcagcgctgatcatcttctcgcgaatgacgcccggctcaccatggatacccatgccgaactcgatatccttcgctccgatctcaaagttgggacgctgggtctgcggcatcgaacacgcctcgagcgccacaccaaccgtaaaagtccgcatgttcgccttgcgggtcacggcctcgcaaagatcgagcgacagaccgcgatcacaggccgcaccggcgatcttgaacgtgaagaaattgcctgccacgccgcgacgaccatcgcggtcttcgatcggcgaagaggtgatgtcgtcggtggtcagaaccgttcggattggaatacccgccgtctcggccatctccgcagccatctcgaagttcatcacgtcgccggcgtagttgccgtaaacgaaaagaacgccctcgccacccgatgccgccttggcgcaatggaggatggggatcggaggaggcgacgagaagatgtttccgaccgcaacggcatcggcaagccccttgccgacatagcccagaaagcccggctcgtgcccggatccaccgccgatgaccagaccgacctttcctgatcttggcccgttccgcgcgatcagggcacgattggatttgtcgatcggcgacagatatttgcgatgcgcacgcacgacgccatccagcatctcctcgacgatcttgtccggatcgttcagaaacttcttcacgcgcattcgcgtcgcggatggcaacggcgcttgactttcgggccgcagacgctgcgatgaccgctgatcgatatcggtcacgccatcggcgttgagaatgccacggccggtcgcggcatcagtaatcagtacgttgacatagcctccgcgcaaagccgcgaggatagccggcaccttgtcgaagccgcctgcggcagcgatacgcaagtcgatgttcttgagcatatcaagagagatgccgatcgttcgatcgtcgagcggccctgccaccgcgcgtccgtgcacatcgatgaaacgaccggccaccacgccgacggcgcccttggcaagataatcctgcagcggaacggactcgaaaaagccgctggtgtgaatggtggaattgggacgcagcgacgaaatgccgaagagcgccttgttggctccggcaagtgccgcgaactggccttcgatcaggggctcgtgcagaaaagcatcgcgcacggcgggagcggagacaatcgcgggcgcggaaatattgatcagcttgccgtttacggcgttggcgagcgccgccgcacagagctcgggagtatacgcgaagctcgcgcgcgtgccgccggtcgcctgcacgaccgtcacgtcctgcaatcctggaacctccgcatgctcgctaatcgcgagtaccgtacgcccccacgacacggcgatcgtatcgcccgacttgaacagccggtgcaacgcctgaccgcctgcggcgccgatcctgtctatcaacggccgggcggtatcctcgctcggaacaacaagacagtcagcaaggccaaaatgccttttgagcgcttgtgcaacggtgagcgatgcaagcctggccggctcgatcgcgatattaacgatgccgcgatcccgcgcgtcagcgagatagctgttgacggttgcgcgcgatatgcccatgacgtcggcgatttcgccctgcgtcagtccgtcctcgtaatagagccagcacgcccagacataggggtcgtcgccatagcgcagcggcatcgcatcgggtgcctgtgcgagatcgctctttcctgcgccggcttttctcgcctgctgtgtcttaaccgttgccactctggaataaactcccgcttacaattgccgggaagatgccgccaatgcgggccgtttgcaaccgcgcggcacgcgacccgccgccaaaggacgggccgcgctgtcttgggagacagactgcaagatcaagcgttttccaggcgagaagagacgcccacggaaatctccttcagaatgagagcgcaggaggtggcgccggcgtcgagaatgccgagcgaccgctcgccgagacggctggcgcggccaattttcgcgacgaggtcgatcgtcgaatcgcgtcccttctcagcggcctcggccagggccgcgagcgcatccgcgaatgactttccagacgccgtcgcctcatcgaaggcattcacagccgggacgaaggcgtcgatcagcgtcttgtcgccgactttggcagacccgatcgactggataccatcaagacctgcgtggagcatctgactgaagagcctcgcaccgacgtcttccttgccttcgagcgtctcaccgaattccgtgaacatgaccccataaagtggccccatcgagccgccgatctccgtcatcagcagcgtgccgagcgtttcaaaggcaccactgagcgaggcatcctgccccttcagacgttccgccgccatgccaaagcccttggccatgttgacgccgtggtcgccatcgccgatcttgccgtcgatctcgctgagataggcgcgattttcgatgatgcgttccgccagcgaaaggacgatcgcacccgccgaggcgttcttgaaagtttgcatgtcagcgttcctcagagcaacattgtgcaggacgtttcgaggtcgagaagcggcttggtctcggcatcgagcgcaaaaaccgtcaacgtcgcgccgaccatttcaagcgacgtgaaatagttgccgacatatgttttgtagacgacgagcccgcggccggtgatctcgctctcgatggtatcgttcaggatataaagttcgttgagcggtgtggcgcccaagcccgaaacaaggaccgcaacctccgtgccagcgggaagattgtgatcatcaagaacgatcctgcacatatccttggcgacttcagcggccggcttcagtggctcgacacgcacgccgggttcgccgtggtggccgatgccgacttccatcgtgcccggctcgatctggaaattcggatggccgacggccggcaacgtgcacgggccgaggccaacgccgattgagcggcagttgtcgatcgccttctgcgcagccgcgcgaacctcttcgagactgccgccttgcgtcgccttggcgctgccgatcttccacatgaagatctcgccagcaacaccgcggcgcttttcgcgctccgacggcgacgccgagcagacgtcgtcattggcaacgacggtcgcgacctcgataccgtccttggcggcgagcttcgtcgccatcttcacgttcatgttgtcgccggcataattgccgtagaggcagacgacaccagctccgccattggcctcgcggatggcatcgtgaaagctcttggcggtcggggaggaaaacaattcgccgatggcaacggcatcaagcatgttcttgccggtgtagcccatgaagcccggctcgtggccggagccgccgccagtaatgacgccgaccttgccgctcaccggtgcattcttggcgacaaccacgcgcggattttcggcaagccgcacgatatcggaatgggccttgatgaagcccttgactgtatcctcgacgacgagatcgggattgttgacgaaccgttgcatgaagtctccttgaaatgtcctggcgcgtcggctcagagaattgtgtagccgccatcgatcagaagatcggcgccattgatcatgttcgcgccgtccgaaaccaggaagacggcggcggcagcgatctcttcgggataggcgaagcggccggtgggaatgcgcttcttggcggcctctcccttttcgccagcccaggccttcttgccgagctcggtcaggaccacggtcggcgaaatggtattgactgtgatgccgtatttgccccattcggcggcgaaggtcttcgacatgccgatgacgccgaacttcgaggcgcagtaggcgacgtgctcctcgatcgcgacggtgcccgcctgcgacgcgaggttgatgattttaccgccgtttcctgcagcgatcatggcgcggccgacagcctgggtgacgagaaagctgcccttgagattgatgttgatcgtcttgtcccagtagtcgagcgacagatcttcggctggcgccaggaagacgacgccggcgctattgacggcaatgtcgatgcgtccgaacgcggcgacgacatccgatatggcgcgattgaccgagtccggctgggagacgtcacagacgaaggatttcgcaccaccaccgagcgcggccgccttggcagcggcgatatcggcattgatatcgagcacggccaccgtggcgcctttggcggtcagcgcgtcggaaatcgccgagccgatcccggacgcggcgccagtcacgacggcgatcttgcccgtcagggggaaattgaggtcaatctggggagcagcttctgtcatctcttcaagcccttgcgatgtggatgccagggcggcgtgacaccgccctggctttgcgttcgttacttgcgggattcgagcaatttgtcggcattgtcctttgtgaccggggtccaaggaaccagatagtccttggatgcgccgtcttcccacttcatttccggatactgggtccagatcgccgactgcggcttggcgtccttggtcgccgccttgatggcgacatcgagcgcgccctgcgcttgcgcgttggcatcctgcagaatcgatgccatctcgccacgcttgacggcgttgattgcgtctgtgacgccatcgaccccggcaatcgcgaagtcctcgaccttgagcttcgcagccttgatcgcctcaatcgcgccgagcgccatttcatcgttctggccgataacgccgttgatctggcctgggtaggacgtaagccaattttccatcaacgtctgggcttcggcacgcgaccagttggccgtctgctttgccaagaccttgacatcagggcacgcctttagtgccttctcgttgccttccaggcgttgaatctggccggactggccgatcggaccttcgaggatgacgaggttgcccttgcaacccatcttgtcgagaactgccttggcttccagctcgccggcttcgacgtcattggagccgacataggaggtcaagagatcagaattcacgcgagcattggagccgacaaccgggatgccggcatcagcggcggcctgcacggcggcggcaccggcttcgacgtccatcggcacgaagatgatagcgtcgaacttctgggtgatcatggtgttgaactgctcctgctggaccagcgcatcataacgaccgtcaaacaccgttagctccacctgaccgctcttgacggcagggtgctgcttcagcgcggccgaccagatctgcatgaactcggcattcaaaccataggtcgtggcgccgatcttcagcttcttttcctgcgccatggccggcgcagcaaggatcgccgcactggcgataagtgcgagcatcaacttcttcatctgtttctcctccatagagatgtccggtcgccgttatgacgcgcggtttgccaacggatcgcggatgcgatccgaattatcaggtcagagaccttgatttcgcttctggtccagcatgacggcgccgacgatgagcgcgcccttgagcacctgctggtagtaggattggatacccatcagatcgagaccgttgttcatgacgccaatgatgagcgcgccgattagcgttccagtcacgcgaccgacaccacccgagaggctggtgccgccgatgacgaccgctgcgatggcatcaagctcgtaggcaatgccggcctgcggcagtgccgatcccgtgcgggccgagagcatcatgccggcgagacctgcaagcgagcctgagatgccataaacggcgaagcggatgcgggtaacgttgatgcccgaggtgatcgccgcatgcgggttgccgccgacggcatagatgtagcggccgaaacgggtgcgcgtcaggacccaccaggagacgatgaagacgacggcaaggatcaccaccggcatgggaacgccgaggatgtttccggttccgatccagcggaactccgggatcagcgccggaacaggcttgccaccaccgtagatcagagtcatgccgcgtgccgccgacagcatgccgagcgtggcaacgaaggcgggcacggcgaagcgggaaacaatgaagccgacgatggcgccacacgccaaaccgacgccgataccgaccagcaaagcaacgaccgccggatacggcgcgccagcgatgcctgccgtcgccgacgtcgtgacgaagctggcgctgacgatgcccgcgagcgccacgaccgacccaaccgacagatcgatgccgcgcgtcaggataacaaaagtcatgccgatcgcgagaacaccgttgatcgacgtctgcagaagcacgttcgagatattgccggccgtgaggaagtactcgttggacagcgacaggatcacagacagaagcaggaaggcgagaaagatgccgtattcctgaatgagcagcctgcggcgatccgagttgaaccagcccgtcgttggtttgttatctgtaagggacactgtttctgacctcttcccatgccgatccgtattgagaaattcgcgatgcgccgattacgtcgacagatgcaccagcgcctgcgcgtcggtctccgaccgcgggtagacgcccgccgagcgaccattgcgcatgacaagaatgcggtcggacatgccgagcacctcgtctatctccgatgaaatcatcaccaccgtgcctcccgtggccgcgaattcgcagatgatgcgatagatctcgcgcttggcgccgacatcgacgccgcgcgtcggctcgtccagaagcagcaccttcgggttgcgcaggaaccacttgccgagaacgaccttctgctgattgccgcctgatagccccgagaccgccatggtgtcgcgcgcggtcttgataccaaaccgttcgatcatcttttggctggcagcctgctcctggccgcgacgcatgacgaagccggggctgaattccggcaggctggcgagcgcgatgttgcccctgacgctgtcgacgagattgaggcccgtcagcttgcgatcctcggtgacaaaggcaagcccgtgcgccatcgcgtcgaccggcttgctgacggtgattgccttgccatcaagcttgatctcgcccttgtccttccggtcgagaccgaacaggcaattgaatatctccgagcggccggaccccataagcccgtaaatgccgaaaatctcgcctttcctgacggagaaggatacatcctcaaccttgccgcttgcgctcaaccccgtgacctcaagcccggtgacgtcggtcggtgtgttggtcttgacatattcctcgccgagttcacggccgacgatcatgcggatcaattcggggcgatcgatgtttgcaaggtcgcccgcaccgatatacaaaccatcacggaacacggtgtaggcatcagcgatctggaaaatctcggacagacggtgggagacgtaaacgacaccctttccggcagctttcaatcgctcgatggtcttgaaaagctgctgcgcttctttctcgccgatcgccgatgtcggctcgtccatgaagatcacttcggcatcatggctcagcgccttggcgatctcgaccagctggatctgcgcaaccgacagattcatcatgaactgcgttgggcggatattgaactcgagctgttccagtagccgctgagcattctggttcattgtcttgaaatcgacgccaccaaaacgacccgagggttcccgcccgagatagatgttttccgcgaccgtcatgtgcggcacggggctgagctcctgctcgataatggcgatgcccgatgccagggccgccgcgggaccggaaaactcaacgtccacacctcgtcgccgaatagacccggcatcgcgcttgtgaatacccatcaggatcttgaggaaggtggattttccggcgccattgccaccgcatagcgcatgcacggacccagccttaagctgaaaccggccatcgcgcagagccgcaacaccattgaaggactttttcagcccttcgacatcaagaagatattccaccttaactcctcccaacaccgtccaccggtcagatggaacgatggatcatcgcgccctctccattggagcgatttttacaagtgtcagcgacatttcgacaaatgtcaatcgcgcaatcgctcgtttcttgaagtggagttttgttgtcgaacagtccggctgcgaagacgccgagagcaacgtgctcgacagggcgcgcgcgagcccggaatagccagcgctgcgatgtgagagcaaagcgctgattgccaccaagacaccgcgaacgcggcgcctcggctaattgcctcgaatgaaattgatgcccgcaagcgtgcccttcgcacgctatggaccgacgtcctctggcgacggctatcgtcgcgcttctgctgcgccgaccggtacggccttgtgagccaggcccgcaagaggaccgggtgaacaaggccgtgggcacggcgctgtcgacggccgtcggtcccaacgacctgtggtgcgccgatttcaagggcgagttcaagctcggcgacggccgatattatgtcccgatggcctcgtgattgttctgacaactcgaatcaccatttgacaactaacatgtcagtcgcctaacactaggaaatcagtggaggagacacttatggaacgcttcggtttatccgtcgcattgacgaccccttttgatgaaaacggcgacattctgctcgacatgatgatcgcacaggtgaaacgcagccttgccgccggctgcaacagctgcactctgttcggcacgacaggcgaaggatcatcgatcggtatggaagaacgcgaacgtgtcctgtccgccatcctcgatgccggcgtgtcaccccagcagatcgtcgtcggcgtactggcagactcggccgaagacgcagctgcacaggccggccacgcacttgatcgcggcgcgcgcaacatccttctcgccccgccgtcctatttcaaaaacgtcagtgacgacggcctgtttcgctggttctcgcgcgtcttctcgctgcttggaaacagggcccgcgacatcctcgtctacaacatcccctcggtcaccatggtgacgctcagcgtccccctcgtctctcgcctgcgcgaagcgtttccgggtatcgtcaccggcgtcaaggattcatccggcgactgggatcacacgcaggtgctgttgaaggatcattcggatctgatcatcctgatcggcgacgaacggcatctggcgcagggtgtgcgcatgggtggtcagggcgccatttccggcgtcgccaactttgccccgaaggaagtcggcgccatggccaatgacggtcgcgacgacgcacgtatcgtggaatttgtgatcgagcttctgaaacatccggtcacgcccgccgtcaaggcgatgctggcgcgcgaacttggcgaccagaagtggcttgcggtgcgtgcgccgctgctttctatatcgacggacgtacaaaatcagctcggtatcgttttcgacggacttttccgcagcaaggcggcctgagagaacagaaggaggaccggaacaacgatggccatgcagcatgacgaccagcaggtggaagaacccacgcttcgggaaaaagcttatgaaagctttacccggcacctgctggcgcgtgatgtccggcccggccagttcgtgtcgcagcgtcgccttgtggaactgaccggacttccactcggcgccatccgtgaactgatcccaaggttggaggccgagggactgatcaagacggtgccgcagcgcggattgcagatcgcccatatcgatctgcacctgatccgggaagcatttcagctgcgcctgtttctggaaaaggaagccgttgccctgttcgtgcattcggcatccgacgatctgatcggcaggatgatcgccaaacaccgcgagcttgccgcagccgtcgccgccggctacgagacgccggaactggaggcggaagctcaggcagtcgactggggcatgcatgacgcttttatcgatgcccttggcaaccgcatcatctcgaatgtctaccgcgtcaattcgatcaagatgcggttgatcaaccaggagcgttttcgcatcaacggccgcgtcgcctcggtcatgggcgaacatatgaccgtgctggaagccattgagcgtcgctcggctgaagatgcggttgcagcactcgtcaagcatatcggaaatgcgagggaccgcgccctcaagatttagcaaagcagaatttcaacgttcatgagccgggatgaggagatcccggtaaacctttggaggaggacatcatgacatcatcattctggaccccgacccgccgcagttttctggcaggctccgccgcactcggcgccgcaggccttgtcggcgcccgcccggcatcggcagcagtcgactggaaaaagtttgccggcaccacgctggaagtaaacctcgtcaaaagcccgcgcagcgaaattcttctgaaatacatgaaggatttcgaggcgctgaccggcatcaaggtcaatgccgaagccacgcctgaacagcagcagcgccagaagacgacgatcgaactgtcgtccggccgccccagcttcgacgtcgtgcacctcagttaccacgtgcagaaacgccagtatgaaaagggcaagtggctcgccgatctttccgggttcttcaaggatccgagcctcaccgatccatccatggtagaaggcgatttcgccgaggccggcctgaaattcgccaagaatgccgacggcaccctgcgctccctgcccttctccgtcgattactggatcgtctactggaacaaggaactgttcgacgccaagggcctcaaatacccgcagagtttcgaggaaatggtctctacggccgaagctctcaccgacaaatccaccaacacgttcggtttcgtcgcgcgtgggctaaaaaatgccaatacgccggtctggacctcgctgatgctggggtatggcgccaccccgatcaccgacggcaaggtgaccagcgatagcaaggaagccgtcgaagccgcaaaaatgtatcagacgctgatgaccaaggccgccccggtcggcgtctccggtttcaactgggcggaggcgcaatccgccttcctgcagggcaaggtcggcatgtggttcgatggtgtcggttttgccccaccgatcgaaaatccggaaaaatcccgcgttgtcggcaagaccggttacagcgtcatcccgaagggcccggcctcacaggccgccggcacgttcggcgatggtttgggcgtcaccgcagccagcaccaagaaggaagccgcctacctgttctgccaatgggcgatctcccatgagatgggggcgcatctgctgcaggccggcgccggcgtgccgtatcgccagtcgatcctcgaagatgccaaggtgcgcgaaggcgtcaccatgccgcgcgaatgggtggatgcggttgttgcctccggcaaggtctcgcagctggcgctgccggtcatcatcccggtcaccgagttccgcgacatctatggcgtggcgctcaccaacatgatcggcggcgcggacccggctgccgagctcaagaaagcgggcgagcagttcgcaccggttctggcacgcagcgagggataatggcttccgtgaccgtcgatacgaccgcggcagacgccgtgacagcaaaagggggcaagccgcaaaggctttcccccaattactggcccttcgtcgtcccggccctcgtggtcatcggggcagtcatcgttttcccctgggtgttcaccctctggatgagcgtcaactcctggacattgggacaggagcagacattcatcgggctggacaactatatccggctcgccggcgacatgcgattctgggaaagcatgtggcacacggcgctctacaccgtgctttcggtggtggcgccgctgtttctcggaacactcgccgctctcgtcttcgacggccagtttccgctccgcggttttttgcgcggcgtgttcgtcatgccgatgatggcgaccccggtcgccatcgctttggtctggaccatgatgttccacccgcaactcggcgtgctcaactatcttctgtcgctggtcggcatcggtgcgcaggaatggatctataatcagtcgacggtcatcccgtcgctggttctggtcgaaacctggcaatggacaccgctgatcatgctgatcgtgctcggtggtctcgcagccgtcccgcgcgagccttatgaaagtgcggaaatcgacggcgccaatgcctggcagaagtttcggtacctaacgctgccgatgatcgcgccctttctgatgatcgccgtcatcatccgctccatcgatgccgtcaaaagcttcgatatcatctacgcgatgacgcagggcggccccggcacggcgtcggaaaccatcaatatctacctctacaacaccgcctttgcctattacgacatcggttacggatcggccatggccgtcgttttcttcgtcgttatcgtggcgctgtccttcgtgctgatgatggttcgcgcccgcaccaactgggccaacatggagggtcgctgatgacccatcgtatgctcaaccggatcggcctgttcttcgcagccttcatcatgatctcgccggtcatcctgttcttcatctggatgatctcgttgtccctgaaattcgagatcgacaacggcgcctatccgccgatcctcatccccgaacgcgtggcatggtcgaattacgcaaaggtctttgaggagaacaattttcttctctatttctggaattcggtcctcgtcaccggtgcggccaccctgcttgccctcgtgatcggcgtgcccgccggttacggcatcgcacggctgaaggcggaacgtgccaccatggtcatcatgatcgcccgcatgacgcccggtctttccttcctgatcccgctgttcctgctgttccaatggatgaacctgctcggcacgcttctgccgcagatcatcatccatctcgtcgtcaccgtgccgatcgtcgtgtggatcatgatcggttatttcgagacgacgccgaaggaactggaagaagccgccagcatcgacggcgccacctcgtggcaagtgtttcgcctcgtggcgctgccgatcgccaaacccggcatcgtcgtcgccttcattctggcggtgatcttctcgtggaacaattttgtcttcggcatcgtgcttgccagccgcgagacccgtacgctgcccgtcgccgtctacaacatgctgtccttcgagcaggtcagctgggggccgctggcggccgcagccctgatcgtcaccctgccggttctggtgctgaccatgttcgcccagaaacagatcgtcgcgggcctgaccgccggcgcggtcaagggcggctgaaacttatttggaaatcgggaggattttcacccatggctacagtcaacatccagaatatcgccaagcgctttggcgccgtcgaagtcattcgtgatctcagcgtcgatattgcagacggcgaattcgtcgtcctcgtcggcccgtccggctgcggaaaatccacgctgctgcgcatggtggccggactggaggaagtgtccggcggcgccatccgcatcggcccgcgcgaggtctcgcatctgccggcgcgtgaccgcgacatcgccatggtttttcagaactacgcgctctatccgcacatgaccgtggccgacaacatggccttcgcgctgaagctgaaaaaggcggacgccaccgagacacggcgcaaggtggaaagcgctgccgccatcttgggcctcgaaaaactgctcgaccgctacccgcgccaactttccggtggccagcgccagcgtgtcgccatgggccgggcgctggtgcgtgatccgcaggtgtttctgttcgacgaaccgctctccaacctcgacgccaaattgcgcgtgcagatgcgcgccgagatcaaggcgctgcaccagcgcatcggcacgacgatcatatacgtcacccacgaccagatcgaagccatgaccatggccgacaagatcgtcgtcctgcacgatggtcatatcgaacaggttggtgcgccgctcgacctctacgatcgtcccgccaacctgttcgtcgccggtttcatcggctcgccggcgatgaactttatcgatggacagatcgaggaaggtgtttttcgaagcgacaagggcctcgtcctgccactgccggcgggcgcggacacgacaaaactcggcggccgaaaactggtctacggcattcgaccggaacatattcgcgccgaggccggcggcatttcaggccgcgtcgagatcgttgaaggtaccggctcggaaatcttcgcccgcatcatcagcggcggcgaagagatttcctgcctgttccgcgaacgcctcgacatccgcttcggtgacgatatcggcatagcggttgatgcgacccgggcgcatcttttcgacaaggcgaacggaaaacgtctgtaaaatgttcacaccgggctccatttcaccaaccgaggcggtgcaaaaagctttgcctcccccattgcctaaatttgaaatcgtggccaccgaacggcgccgaactgaatagccccgagtttcgtagacaccttcgggttagattttctgctgcttctcgaactcgacgggcgacagcgtcccgttcctggcgtgtttgcgtttcgggttgtagaatatttctatgtagtcgaacacgtcctggcgagcatcatcgcgtgaacggtagaccccgcgacgtatccgctctcgcttcagaagattgaagatgctctcggccaccgcattgtcatggtagttgccgcgtcggctcatcgaatgaaccagattgtggtgcttcaggaacaaggcccagtccatgctggtgaactgtgagccctgatccgagtggatcagcaccttgtcattcggcttgcgtcgccaaacaaccatgagcagggcctgcaacacgacgtccgtggtttggcggctctgcagtgcccaaccgatcacgcgacgcgcgtagaggtcgatgacgacggcgagataggcgaagccctcgcaggttcggatgtaggtgatgtccgtcacccaggtcgtgtctggagctgtcacgtcggattgccggtcgggcgtattatcgacgacgacagacggtctgccaccatcgatgccggggcggcgcttataaccgatctgtgccttgatcccagcaagacgggtcagacgcgcaatccggttcgggcagcacatctcgccctggtcgagaaggccgtcgtgcagcttgcgataaccgtagaccttgccgctctcttcccgcgccttcaggagcagatcggtctgtcgcttgtcctggttggctcgcctgctcagcgggttcttcaaccaagcgtaaaatccgcagggatgaacgcgcggaaggcggcacatcgtccgcaccgaaaactgcaagcgatgcagggcaatgaacgcgtacttcactttgcatctctggcgaaatacgcggccgcgttccgcctggcaatcgattcactggatcgattgcttatccggcttcaatttaggatgtctcgctcctcggtgacgcgagccagttccttcttcagccgcctgatctcctcggcctcgtcgttgcccttggcgttcgacgcggtaaattcttcttccatccttacacacaaaatcgcagccgtcgcggaccattgtgcgttgtcgctgtgtctgcatggggatttggttgcgagtgcggaatttgaaccccgcggcctttcgcgaacgccaacagccggcgttatgcgggctttgtttgtcttgtcttatgtggtttcagtctttggaagattggttgcgggggcaggatttgaacctgcggccttcaggttatgagcctgacgagctaccgggctgctccaccccgcgttaccaggtttttgccgaaaggcaaaataccgcccaggtaagccgctttgcggcttagccggtgttgcgcaaagcctacggctttggcgcggcggcgtaaccgcgaagcggttatgccttctaccggagcaaaaccctgttgggttttgttcctgtgagagacgcaccattatagatcaggtgcgtcgaagtttcattctgtatatgggccttaaagcagaaaggaccgctttgggcggcccttttgtttcggccttggccgtcatgtgatgagaagatttgttgttgcgtttg

SEQ ID NO: 6 - DNA, 233819 bp, Rhizobium matallidurans
  source 1..233819: mol_type = genomic DNA
ttatgcgcagctccgcataagcatgaatatgagccgtggtgacttatggtcacggcgctctccctttcggcggctcgcaaggcgtccgcagcttttagctgcacataataaaaagcaggcgaacccgttcaggcgcgcctgtgatcttgatcggtcgtttcgcgaaccgcgagaacggatgcgccacccatggcggcgggaaaacttcgggcggttcggagcaaaggatccgagccgtcacgacaatgagattagaaatcccagtcttcatcttctgtagccacggctttgccgatgacataggacgaaccggagccggagaagaagtcgtggttttcgtctgcattcggcgagagcgccgagaggatcgccggattaaccttgcaggcctcgggggggaacagcgcctcgtaaccgaggttcatcagcgccttgttggcattgtaatgcaggaacttcttgacgtcctcggtcaggccgacgccgtcatagagcgcctcggtatacctggcctcgttgtcgtagagctccatcagcagatcgaaggcgaagtccttgatctcctgacgcttggcctccggcaacctttcgacggcgcgctggaacttgtagccgatataatagccgtgcaccgcctcgtcgcgaatgatcaggcggatcatgtcggcggtgttggtgagcttggcgcggcttgaccagtacatcggtagatagaagccggagtagaacaggaagctttcgaggaagactgacgcgaccttcttcttcaagggatcgccggaggcatattgctccatgatcagcgccgacttccgctgcaggaagtcgttctcttccgaccagcgataagcgtcgtcgacatcgggtgtggagcacagcgtcgaaaagatcgacgaataggagcgtgcgtgcaccgcttccatgaaggagatgttggaaagcacggcctcctcatgcggcgtggccgcatcggccatcagcttcaccgagccaacgccgttctggatcgtgtccagcagcgtcaatccggtgaagacccggatcgtcagttgctgttcctccggcttcagcgttgctcaggatgggatgtcgttcgatagcggcactttctccggtagccagaaattgccggtaaggcgattccagacctcgaggtccttgtcgtcctcgatgcggttccagttgatggcacgcacggccgcggcgaccttcgggtttttggtcttcacttgaatgttcatcttggtcacctgagatcaaagggcgcaggagacgcagccctgcacttccgtgccggtcagcgccatctggcgaaggcggatgtagtagatggtcttgatgcctttcttccacgcatagatctgcgccttgttgatatcgcgcgtggtcgcggtgtcgcggaagaacagcgtcagcgacaggccctggtcgacatgctgggtggcagccgcataggtgtcgatgatcttctccggcccgatctcgtaggcatcctgatagtagtcgagattgtcgttggtcatgaaggcggcaggataatagacgcggccgatcttgccttccttgcggatctcgatcttcgagacgatcgggtggatcgaggaggtcgagtggttgatgtaggagatcgagcctgtcggcggcacggcctgcaggttctggttatagagcccgccttccatgacggcctgcttcagttccagccagtcctcctgcgtcggaatgtggatacctgccgtctcgaacaactcggccacgcgcgcggtcgcgggcgcccattcggcctcggtgtatttgtcgaaatattcgcccgatgcgtacttcgaattctcgaagcccttgaagctctggccccgctcgaccgccagccggttcgaggcgcggatggcatgataagtcaccgtatagaaatacatgttggtgaaatcgacgccctcttcggacccgtagaagatgcgttcgcgggcgagatagccgtgcaggttcatctgaccgaggccgatagcatggctgtcggcattgccttgggcaaccgatggcacagaggaaatgtaactcatatcggacacggccgtcagcgctcgaatggaggtctcgattgtcttgccgaagtcgctggagtccatcgccgcagcgatgttcagcgagccaagattgcaggagatatccttgccgagatgctcataggataaatcggcctgataggtgctggcatcgctgacctgcaggatttccgagcacaaattgctcatggtgatgcgcccggcgatagggtttgccctgttcaccgtgtcttcgaacatgatgtagggatagccgctctcgaactggatctcggcgatcacctggaagaagtcgcgcgccttgatctttttcttcttgatgcggctgtcggcgaccatctcacggtatttctcggtgaccgagatctcgctgaaggcgacaccatagacgcgttcgacgtcatggggcgagaacaggtacatgtcctcgttgttctttgccagttcgaaggtgatgtcgggcacgacgacgccgagcgacagcgtcttgatgcggatcttctcgtcggcattctcgcgcttcgtatcgaggaagcgcatgatgtccgggtggtgtgcgttgagataaaccgcgcctgccccctgccgggcgccgagctggttggcataggagaagctgtcctccaggagtttcatgacaggaatgacgcccgaggactggttttcgatctgtttgatcggcgcgccggcctcgcgcaggttggtcaggctcagcgccacgccgccgccgcgcttcgacagctgcagcgccgaattgatgccgcgggcgatgctctccatgttgtcctcgatcctgagcaggaagcatgagacgagttcgccgcgctgcttcttgcccgcattgaggaaggtcggcgtcgcgggctggaagcggccggaaatgatctcgtcgaccaagtccttcgccagcgcctcgtcgccttgtgccaaagtgcaaattccgaggcaatccaccccctgattccgaaatgatgtcgccccctaattccgagaaatagtcgccccctcgttccgagatgatgccgcccccttttgaggcatctttcaagggtggtctgcaggtgtgaagtttctcccctcgaggtcgaggaggaaggaacgcaatgcctgcggagagagtggagatgcggcgtgtccgcgagatactgagatatcggtttgagcaaggacttgggcacaagtcgattgcggtgcgggttgggactgcgccgtcgacggtgcgcgagacgctacggcgtgcagcggttgctggcctgtcgtggccccttggtgacgacgtcagcgacgcagtcctggaggcggccctctacaggggggccgggacgaagataggacatcgccgcgcgccggaaccagattgggcgcaggtccaccgcgagctgaagcgcaagcatgtgacgctgcagatcctatgggacgaatacatcggtcttcatccggatggttatcgctatagtcgatactgcgacctttatcgcggctgggcgttgaagctaccggtgacgatgcggcaggatcatgcagccggcgacaagctgttcgtcgattatgctggcgacaccgttagcgtcgtagtcgaccgattgtctggcatgacacgacaggcccacctgttcgttgcggtcatgggtgcatcgagcctctcctatgcccacgcgcgctggagcgaaacacttcccgactggattgaatgccatatccaggcgctggagttcttcggcggtgcgccggcgttgcttgttccggacaatgccaaggtggcgatcatcaaggcgtgtcacttcgatcctcaggtcaaccggacgtatagcgcgatggcggcgcattatggcagcgccgtcctgccgacgcggccgagacgccctcgtgacaaggcgaaagtcgaggccgcggttcgtatcgtcgaacgttggctgttgggccgccttcgccatcgcaccttctacaatctcgccgaggtcaacgcggcgatcgccgacttgctgcatgatctcaacgacaggcgggtccttcgccgggtcggcgtcacgcgccgccaattatttgaagagctcgaccggcctgctctaaggccattgcctgtggaacgctatgtctttgcggaatggcgtatccggcgtgctggattggattaccacgtcgagatcgagcggcattattattctgtcccgtatcgcttcgctcgcgagcaagtcgaggcgcgcatcaccgccaatacgatcgagatcttccacaaaggcgaacggatagccgctcatcgccgctccagcggtaacggcaagcacacgacgacccccgatcacatgccctcggcccaccgccgttttgccgactggacgatcgaacgcattcaacgcgaggccacgtccatcgggccggaggttgcgttgctatgcgaaaagatcctcgccgaccggccgcacccggagcagggctttcgagcctgcatgggaattatccgtctgaacaagggctttgggcgcgacagagtgaatgccgcttgcagccgtgcgctggagatcggagcccggacctacggttcggtgcgctccatcctcgacaatcatctcgatcgagccgcctccaccaatggaccagcctcgcatgagcctatccaccacgaaaacatccgcggacctcgctactacaactaaggagaaagaagaatgcttgctcatccaacactcgacaaactcaacgccatgggcctggccggcatggcaaaggcctttggggagctcatctccaacggtgaggccgaacatctctcgcacgctgagtggttaggattgctgctcgaacgggaatggagttcccgctacgatcgcaagcttgctgcccgcctcaggttcgccaagctgcgccaccaggcgaccccggaagatgtcgactatcgcagtgcacgcggtctcgatcgcgcactcttcatgaagcttctcgggggcgactggattaatgctcacgacaatctggctatctgcggcccctcaggtgtcggaaaaagctggctagcttgcgcactcggtcacaaggcgtgccgtgacgatcgctccgttctttatcagcgtgtcccaaggctgtttgcccagctcgcacttgctcgcggcgacggcaggtatgcccggctgcaacgtacgctgggtcatgtccaggtcctgatcttggatgattggggtctcgaaccgctcaacgaacaggcgcgtcacgatctgttggaaatactcgaggaccgctatggccgccggtcaacgatcattacgagccagctccccgtatccgcctggcatggcgtcattggagacccgacctatgccgatgccattctggatcgcctcgtccacaatgcccatcgcgtcgagttaagcggcgacagtctgcgccgaaacctgccgcgtagcgcttgacaccaagcctgaacgaactgacaacaatacctgcctgcagacctcctcggaagggggcgagatcatcccggaatcacggggcgcaatcatctcggaacaatggggcggcttcatcggaatcggcaccaaagccagcgccaccatgcagatgcgatcttcgtagcgctcgagatagcgctttccgtcgaaggtcttcagcgtgtagctggtgtagtatttgaaggcgccgagaaaggtcgggaagcggaacttccggtcgtaggcgtggtcatagaggtcgcggacgaaattgaacgaatactggtccagcacctcctgctcataatagccttcgatcaccaggtaatcgagcttctccctgagattgtggaagaagacggtgttctggttgacgtgctgcagaaaatactgcttggcggcctgccgatccttgtccagctggatcttgccgtcctcatcatagaggttcagcatcgcgttcagcgcgtgataatccagcccggtttccgcggcgtgcggctttacggggcgttcgagaactgccgtgtccaaaatcgttccaatccgtgtctcacattggcgacatcctctgcggtgccaagcagttcgaacctgtagaggtaaggcacttggcatttcttggagatgatgtcgccggcaagcccgtaggtctcgccgaagttgctgttgcccgcggcaatcacgccgcggaggttcgaacggtttgccgcatcgttgaggaaacggatcacctgtttgggcacagctcccttgccaccctcgccgctataggtcggaaggatcaagacatagggcgagatggcttcgagcgtctcgcctgttatgggaatgcgccgggccggtaggccaagcttttcgacgaagcgatgggtgttttccgaccggctggaaaaatatacgatctcgcccaccgttatgccgctcaggcaagcgcgctgatcatgtcaggtcggaagcccgcccagtgctgttctccggcgatgacgacgggaacctgacggtagcccaagccctgaacaagctcataggcggcgctatcggtggatacatcgatgatggtgtaatcgatgccctggcgatcgagggcgcgggtggtcgcggtgcattggacgcaggctggcttgctgtagacggtgatgctcatggtgtcctcgtaggatgctaaaggcataggtatccgtccggtcgtccgccgacgcccgcacgaaggatcagaaatgggaaaaaaagcgcgcctacacggcgtagccgattctactcgcgcttacgatgaactgaacgactagtcatggacctcaccccgaagtttgctcatgcggggatcaagggctgcgcgtgcgcgcaaacattgcgcgtatcgacgcgaccaaccggacaccccgcccgtggacgttacgctctgaggcaggtctcctggctcacgggtcgttgcatccatcctcgccttcccgaagcacgaaacttcagtggctttgtcgaacagatgctcaccgcttacagttgcgggggcagctacggcattgcgcatccatcatggacgccacgcaccgtattcccgtcttagctccgacccttacgaatcgagagaacctcgaacacaagatatagtagacgtagtgaacttttcgtcaacgcctatgactgtgacccaagaaaaacattggggattacaatctaggcgaacttatctggaaggagaaaccccataggatgctgacgtctggcgcgacgttgcgaggaatccggaaataaaatctacggcctcgtccccgcttctaaggccgaggtggatgctcttctggatcccataccgaccgatgcggacggcatgaaccccaagcactgccgcctcccgacgcaccagccaatcaggaatagcgctgacgcccctactggcagcgacgagttgaagcatcatttccgtcgtctcaacattacggtggtgacgcggtcggcagttggctgggaccaggaattgcgtgaacacgtccagccgctccggcggtacaggataggtgaacagcgtctcatgaagcaggtcgacaggatccgcatgcggctttagcgccagagggtgatcggcgggaacggcaagcaccagttcgtagtcgaacacgggcagatagtagacgcctggggtctcaatcggatccggtgtgatcaggatgtcgatttcgtagcctgtcagggcagcgacaccgccgaaagcaaatgatgtcgtcagttcaaggtccacatccggccattcaacgaggtagggtttcgtgacgcccatcaaccattgatggcagggatgacactccatgccgatcttgagcgagcctcgctggccgtcgcgatagtcggataggacgtcctcagctctctcgatttgtggcagaacgcgctgcgccagcctgacgatgtatcggcccgcctcggtgagccgaaggttgcgcccatccttttcccacatggccacgccaaagcgttcctccagcttgcggatcgtgtggctcagagccgactgggacacgttcagtcgctccgcagcagcggtcaggctgcccaagcggtcgacttctcgcaggatggagaggtgttgcctgtccagcatagttacgcccgcccctgtgtatcgtaaaagacatccgccgaaacattgtcgcgcacaggaatcggacgatgatccttgtcgactgcaaccatggtgaaatgtccggttgccgtaacgtgcctctcgcccgtcagaaggttttccgaccagagtttcgtctcgatggacatggaggtgcggccgatgtgctcgacccgtgcctgagcctcgacgatctcgccaatctcgatcgcgcttgcgaaatcgatacgctcggatgaagccaggacgaccagcttgccggagcaacgggacgcagcaacgaatgcggcctttgtcatgtacgcgatggcctcgcccccgaaaatccggccgacgctgtttgcctgatccggaaagacgatctcgaccatggcgacagcgtccttggtatctggggcgtccactgctaccagttcgggcaaggcatagcgctgcgcgtgctcgccttccggtatcgcgaccatgttgaagatgccgcgcgtgcagatgtgccgctggcgaccgacaatggtctccgcggccatttcgacctcgacagccagagaacagcgtccggccctgacgggcctcgctgtgaattcgacgatgttcccgatgcgcgcgggctgcttgaagtcgatccgttcacaggaggcggtcacgaagggtgtgcgaccaaaccgggtcgccgcgatgaaggcaacccgatccatgagcgcaagccctgtcccgccgaagagggtgccatgatgattggtatctccgggaaagacgatatcgatgagcctggtcgtcgaaccgtgctggactggcttttctgtcgtcgtggtctctgtcatcgcactaccatcagcttgcggccgggcattggcatgacgcagagacgacggcacgggagtgctcatcgcgaaagcggcactccgggacaccccgcccgtggacgttatctatcgcggcaggtctcctggcttgcgggtcattgctctggtccgtcttcccgaggcttggcctcagtgacatggatggacgttcgctcgccgcttacagttgcgggggcagcttcggcttcaggcgggaatgccttcaccgaattccctcttagctccggacttgtcatcctgagaaccacgataacgcaccaatgtcgcatgccgtccaagcagtcaagatgtcccggcgggaacggtgaaagcggagatctcgatgcgtccgcctgaaggcgcgcatcagacttcaggtgccaatgtttcgagccgaccgctccgacaatcatgaacgccgctcatacttccgtgagataataccaatttttcccgatcgatctctcaggcataaaacgcgcaccgctctccagcgtgcgcagcctgactgctgctgaccgagggcaacgaaaaatccggtgcactctgaatcgtaccccgatcaattcaggatccaccccaagctttaggacgctcgatcgcgatgagtagagatttcgactttcatattacgaagatttctttcgatgaggactatcacccctcggagaacacgcggatcacgaccaacttcgccaacctggccaggggggagaaccgtcaggagaacctgcgcaacgccttgaggatgatcgacaatcgcttcaacgccctggcacattgggacaatcccaagggtgaccgctatgccgtcgagctcgacattatctcggttgagatgagcattagtgccgaaggccgtaacgatgccttcccgctcattgagatcctgaagacgaacatcgtcgatcgaaagactggtgagcgcatcgagggcatcgccgggaacaatttctcctcctatgtgcgagactatgacttcagcgtcgtgctgccggagcacaacagaaatagggccgagttcagcgcgccggacgatttcggcaatctgcatggaaacctgttcaaatgcttcctgaactcgaatgcctacaaggcccattttagcaagccgcccgtcatctgcctgagcgcatcgagcagcaagacctaccatcgcactgaaaatcagcaccccgtgttgggcgtcgaatacctgcagaacgaattctcatcgacggatgaatacttccggaagatgggcctgcaggttcgctatttcatgccgccgaactgcgtcgcgccgctggccttctattttctcggcgacctgctcggcgactacaccaatctcgaactgatcagcaccatcagcacgatggagacgttccagaagatctatcgaccggagatctacaactccaactccacggcaggcgcttactatcagcctagtctcaagcatcaggactattcactgacccggattgtctacgatcgcgaagagcgcagccgactggccgtcgagcaggggaagttcgccgaggagcacttcatcaagccgtacaaggccgttcttgagcaatggtctgcgaactacgccgcctgaaacacgaaatacaaggtttaccatgatgaaaagactgttgcccacgtcgaccgccggcagcttgccaaaaccctcttggctcgcacagccggaaaagctctggtcgccgtggaaattgcaagacgaggaattggttgaaggcaagcgtgacgcgttgcgtctgtccttggacgatcagcggcaggctgggatcgatatcgtcagtgacggcgagcagtcgcgtcagcatttcgtcacgaccttcatcgagcacctcgacggcgtcgatttcgagaaacgcgagacggtcaggattcgtgaccgctacgatgcaagcgttccgacggtcgttggtgccgtatctcgccccatagcggtcttcgttgaagatgccaagttcctgcgccagcagaccaaggcacccatcaagtgggcactgccgggtcccatgacgatgatcgatacgctttttgatgcgcactataaaagccgcgaaaagctggcctgggaattcgccaaggtcctcaacgaggaagccagggagctggaagctgccggcgtcgacatcatccagttcgacgagcccgcattcaacgtcttcttcgacgaggtgaacgactggggcgttgccaccctggagaaggcgatcgaaggactgaagtgcgaaacagctgttcatatctgctatggctacggcatcaaagccaacaccgattggaaaaagacccttggatcggagtggcggcaatatgagcgaactctcccgaagctgcagaaatccagcatcggcatgatctcgctcgaatgccacaactctcatgttccaatggatctcatcgagcttgttcgaggcaagaaggtgatggtcggggccatcgacgtggcgagcgataggatcgaaaccccagaggaagtcgccgcgacactgcgaaaggcacttcaattcgtcgatgccgacaagctttgcccttgcacgaactgcggcatggcacccctttcccggcgggtcgcacgtggcaagctgaatgctcttgccgcaggcgcggaaatcgtccgaaaagaactctcggcctgaagtcgatccaaaggcaagaggccgacatgaacatgatgaaccgtcacatcgacatcgtcgacaaagccgcgtttcgcaatggcatgtcgcgcctcggctcggcggtcagcgtggtgaccacgcggtttggtggcgaacgctatggcttcactgcctcggcggtttgcagtctcagcgacacgccgccaacgcttttgatatgtatcaatcgggcaagctcatgttttcatgcatttgagaacacgagccatttctgcgtcaacaccttgatgcccggccaggaagacatctcgaatgtctttggcgggaaaacgcagacaaaggatcgatttgcacatggtgaatggatagaggggcttaccggggtcccagtccttgccaacgcctcggtcagcttcgattgcgaactcaccaactctgtcgatgaggcaacccaccgtattctctttggacgcgttgtcggcattcgtgaaagcgaagaacaggcagcgcttctctattgcatgcgtcgctatatccacgtctaggtcccgaaggtcggaccgctcccggtcggaactccgggagcggcaacgtcaaagcgactgcaggaattgcatcaatttgtctggcggccggtaccgaaggcctgccgcgttgacgggctgaagccgactgagcgcgtcttccttcatcgcaaggtcagcctccatgtagacatgcgtcgtgctgatatcctcgtgcccgagccaaagcgcgatcacggtcaggtcgacgccggactgcagcaggtgcatcgccgtggtgtgccggaaggtatgcggcgatatcgcctttgccctgatcgatggaacgtttctaccggcagtatctacggcgatgtcgaggcgttgcctaacgctggaacgggataggcggccacctgaactgttgggaaagaggtaggcatccgccccgcgatcatgaagatcctgcagccatctcttcaacgcaggctcgctccttctacgagtgtggtggaaggcttcgacatcttgcccgcgtttctgcgagcatatcaacactgttatgggcagccgaacctctcatgatccttggactggcagctgtggtgctacgagagcccgtaggatggcggctaattatcattatgctcgggggcggacttggcgtggcgttggtcacggacgttggcggcgggctcactggttctggaaacgacccggtcggaatgctgctgcttctgtcggccgttctctgctgcgcattctataccgtcttttcacgcaagatcagcgaggcagccgatccactcttcgtggtcgctgtccagcagacggccggattgagctgggctctggctctgctatttgcgcagacgccctttggttcaccggatgagatttcggccattccaattggcgtgctggccgcagctgccgtatccggcttgctatactatgcagccgcgtattggctttacatcactgcattacggtctgttccagcagccgtggcgggcagctatttcaatcttattcccgtgttcggcgttgggcttgcttatgtgtttctcggcgaaaggctggttccgattcaatgggtcggagcagcagcgattatcatcgcagcgctgggattggtccggctgactcgcaacatcgggaccgaacggccagcagaataacgttgcgtgcttctgtgagcgggcttattgcccgctcgcttccgcttgccgtccaggttggccgaggttgccagctcgttggtgatgcgtcagccgaccgatcccaaggaacgcaaggaccgcgagcgcgccgagccccgtcgtgatcgcgagcgaccaggtcgcaccgatattggccatggcaaatgccagggcgaacggtgcggtcgcagagacgatcagcctcgcggccatgaccttgccctgaagtctgccatatccctcgctgccaaacagcatcaacggcaaagtgccggtgacgatgctgaacaggccgttgcccagaccgaagacgatggcaaaagccatcgctccaatcacaaagggtgccgtgacgatcaatatcaacacgccgccggggatcagcacggcggcgatcgtcgccaaaaccagtgggggcagattgccgccgagcaccatattcgtaaagcggctcaacacctgcgacggaccgaacagcgtgccaactatggcggccgtagcacccagaccgagccccgacaacagcggcaccatatggaccaacaccgctgcactgacgagcgactgcaacgagaagccagccaccatcaggatgaagccaacgcgcctgacgttcgggccgagaaccccttctactacatgccccgatccggtctgttcctgtcgacgacccttggaaaggccgcgcgacagccaggcatgaagaggcagacagatcagcaggttgagacctgcgaacacgagatagatgttctgccatgagaggtgagcatgcagcgccgtggtaatcggccagaagatagtcgaggcaaatcctgcgatcagcgtcagataggtgatgctgcgttgagccgtttgaggtcggatctgcaccagcagcgcgaaagccgcgccatactgcaccaggttcgcggcgacttcgatcacaatcaacgctacgacgaaggcaatcttgcccggagcgaaggcacaagcaacaagcgccgcggcggcgatcgccgagccggctgtcatcacgcgacccgcaccaaaatggtcaattgcccttcctagcattacagttgcattttagttttgagatgagctcgtcgagcggtcgcctgatgggcgcgccgccagcatgaccatgcgatgacataggcggggtttatgcgacgctgagcgagtctgttggcgatgcgccggacttcctggatagaccaccggatcaaatggtgatggtcggcatccgcggtctttttgggggcgtcgcgtcattagcgcgataccggatcaccgccatcatggcaaaggccagcatgacgagagagacgtggcgatgccagccatgccatgagcgggtttcgttgtgatcgagtccgagctcgttcttggcggtctcgaagctgtcctcgatcgcccagcgatggccttcaacggaaacgagcgtctggatgtccgtcccggcagggcaccatgttgtgaagaacgcgagctcaccatcgctgatattgcgccggatcagtaggccccgggtccaaagccctgacttcgtctcgttatattcgtcggcatcgagatcggcgagttcgcagtaggcccagtcatgaagccgtgcgcctttggtgccctcaccagcggaaagacgttgccatgcgcttggatcgagatcacgggcgatctcctgcgctgtgccggcaaccggaggctttccggaccaagagccgaaatggtggtccgatttgactccaagaacgtaccctttgcaggctcggcgcagtgttctctcaacgtccccaacgccataaaccgcatctgcagctacccatgaaaacggcacatcggctgccaatgctcgccgtatcatatcgacagccaggcctggcttggtagcaaaggctgtaccctgaggaacatgggttgccgaaagccttaccggatccgcggcccagctcttgggcaagtagagggctcgatcgataaaggcatgaccgcgaacggacacataggtggcgaacacaccgatctggcagttcgttatcttgccagccgatcctgtatattgacgtgcaacaccgcacgacgtcttgccctgcttgagaaagcctgtttcgtcgatgactaggacagcatcatctgtggcgaggttttctacgacatactctcgcacgatgtcgcgaagtgcgtcggcgtcccagcgcccgcgccctagaatggcttgttgccgccacgggccgggatcaccggccgcctcagcacgcatccaacctgtcttacgccgctcgtcaccgagcaagccgtccaggaaaaggttcgcagatgatgcgacacgctcctgcgtaaacagtccgcgcatacgagccttaacgtcacgcaacgatgatgcccatagctcaagcgttgtctcgattgatgcacttgccatccatgaacctccgattcatggagacctatagattcagactacagagaattatgcaactgtaatgctagccacggcgcactcagtccgcccaggagaagtgccgccgaaagcgcaccgaatatccattccgtcgaccagctcagatcccgcgccatgtccggcgcgagaatgctgaagctgtaatagagggttccgtagccgatgatctgcgtgaggcccagggcgaggatggcggcaattggcggacgttcggtcatatggatttgaggctcacgcgctgtccgagcttttcggcctcttccttccgctcgctgtagcgatcggtgagataggaagacgcatcccgtgtcagcagggtgaacttcaccagttcctcgcagacatcgacgacgcgatcgtaataggaagagggcttcatacgcccgtccgcatcgaactcctggaaggctttcgcaaccgacgactggttcggaatggtgatcatccgcatccagcggccgagaacgcgaagctggttgatggcattgaacgactgcgatccgccagacaccggcatcaccgccaacgtcttgccctgggtcggacgaaccgatccgatcgacaacggaatccaatcaatctgagccttcatgatcccggtcatcgcgccatgacgttccgggctcacccacacttggccttccgaccaagcagatagctcgcgcaattcctgcacctttggatggctaaccggctcggcgtcaggcagaggcagaccttccggattgaagatccgaacctcgcagccaaagtgttcgaggagccgacccgcctcgagcgccaggaagcggctataggagatggatcgcagtgagccgtaaaggatcaggatgcgcggcttgtaggttgagaacgctggacgcagcgcgttcaagtccggctggcgcagatgctccagcgatgcagcagccaaatcagacaatgcgcttgccctcgctgtcgagtacgttttcgccatcctctttcgtgaagggccccctatgcgtttccggcaggatttccaggaccacctccgacggacgcgcgagccgtgtacccagcggcgtaacgacgaacggacgattgatcagaatcgggtccttcaacatggcgtcgatcaactgatcatcggtcagggacgtgtcgtccaggcccaattccgcatagggcgtgcccttttcacggatcgcctcgcgcactgtcagaccggcgtcagtgatcatcttcgcaagctggtcgcgtgggggcgggttgttcaggtactcgatcaccgtgggttcgataccggcgttctggatcatcgccagcgtgttgcgcgacgtaccacaatccggattgtgatagatggtggcttccatggtcagaccctttcaatggcttcgggtttggaatgagaggttgcctgcacggcggcgccgcgctcgtaccagcccttgctgcggttgacgatccagacgactgacaacatcacgggcacttcgatgaggacgccaacgacggtcgcgagtgcggcgcccgagttgaagccgaacaggctgattgctgcggcgaccgctagttcgaagaagttcgaggcgccgatcaaggccgacggaccggcgacgcaatgttgctcgcccgatatccggttgagcagataggcaagaccagagttgaagtagacctggatcaggatgggcacggccaacaaggcgataatagtcggctgcgcgataatctgctctccctggaagccgaacagcagcaccagcgtggcgaggagcgcgaccaacgacagtggctggagtgttttgagcagacgatcgagagccgccgacgatccggaagcgagcaggctgcgacgaaggatctgcgcggcaatcaccggcaggatgatgtagagcacgaccgagaacaccaaagtcgcccatggcacggtaatggcggaaagacctagcagcaggccgacgattggcgcgaatgcgaccaccataatggcgtcattcagtgcgacttgggacagcgtgaagagaggctcgcccttggtcaggtttgaccagacgaacaccatcgccgtgcagggcgccgcggcaaggatgatcaatccggcgatataggaatcgatctgcacctctggcaacattggccggaacagatagccgatgaacagccagccgagcagcgccatcgagaagggtttgactgcccagttgatgaagagggtaacgccaataccgcgccaatgccggccaatctggctcaaggccgcaaagtcgatcttgatcagcatcggtatgatcatcagccagatcagcacggcgacaggaatgttaaccttggcgacttcggcagctccgatcgcctggaagacatcaggcatcaggtggccgagggcaatgccggcaaggatgcacaaaaacacccacaccgttagatagcgttcaaaaacggacatcgttgttatccctgcagtggtttggcgagcagtgctgccgaggccgggcaaagactggccgcctgacgggtctgcaaaatcgcggccggcgccatcgcacggtcgatcggcttgaagccaagggtttcgaagaagggcgcggctgtcgtcgtaagcagatagccggtgcgtgcgccctccgcgtaagcgcgtcgcagaaggaggtcggtagcccgacgaccaagccccttgtgacgattggcgggcgtgatcaccaccgaccgcagcagtgcattgtcgccatgcaactcatatccaccatagcccaccgtatcgacgccacgggcaatccggaagaatgtccggccgtcctcgtcaagatcatccgtcggaagatcagccgccgcgagcgcgctgcggagatcagcttcatgtccggtgatcggaaggagcgccagcgaggtggcgccttcggtcgcaccgatctcacggagcttggtttcgagcgccagcttgtcgatcgaggtgatcggcaaattgatgaagagggtaatgcggttcttgagatagcgcgccgccagagcaaaggcgcggccaacgtcaatatcggaaccctctaccgcggcaggatcctcgacaccccaatgggcggtcatcggatggccgagccagaccgggcaggcctcacccgccgcgttgtcacagacagtaaagatgaagtccatctgcggagcgccggcctcggcaaagacgtcccagcttttcgagctgaatccagtcacgggatagccgagcgcgtccagcgttttcagcgcccatggatggacctgtccctttgggtgactgccagccgagaaggcacggaagcggccctttccctcggcattgaggatggattccgccaggatcgagcgtgcggaattgcccgtgcagagaaagagcacattataaacacggtcggcagtcattgcaggttctccttggctgtcggagcgcagcaggcggcaacctcggcggccggcgcgcagatttcgggatgtccagagcagcagtcttccatcaggaagcgtacgaggccgcctagagcttcatagttcgcggtgtagatgatcgagcgggactgccgttgcgcggcaatcagcccggaatgttcgagctccttcagatggaaggagatgttcgacggtgagacctcgaccttctcggccaacgctccagctgccataccgtcgggtccggcaaccacgaggatgcggacgatctgcaaacgggtctcctgggaaagagcagcgaaggcaccgagggcttgacggtcatccatatttcaatcatcctttaaatattgaaacgaggattaccgcaaatgaacgcgatcgacaacagcaaaatttcctctgaagacatcagccttggtttgcttctcgacacgctggccggcgccaaggatctgccgctggtgttccactatgacgggcggaagattaaggccggctaccacgtgacggaggtcaaggcgggccagttttccgcactcgactgcggtgcaaatccggaagcatggtcggagatttttgtgcagctgtgggatatcgatgaagagggcagaacccatatgccaggtggtaagttctcggccatcatccgcaaggtgtcggagcatgtgaagcttgaaggatcggcgaagctaacctttgaggtcagcgatggcgtgcggccaatgtcgctctattgcgccgccgtgccgacgcttcgtgacggtgccttgcatgtcgaactgtcgccgcggcccgccagctgcaagccgcgtgatcgctggctcgcggagcagcaaacgcagtcgaactgctgcgcgccgacgtcagctgggcaagcctgctgctgctgacgaaagttcgcaaacctacttgactgtcggccagagtcgagcgtgctagggcaaaggcggaactggcggttctcaccgagcatgcgcaggcacgaagagacccagttcgaacgtgacattgaagcattcctcgcctaactcgaatgaggccaatgaccaaaaggagggcgatcgccctcctttctctccattggtcagtggatctaggaagggacaggatgccggaatataccttgctcgttaccgtgctaatagggtgtgtctctcttctctacgcaactgctggccaggcaggaggaactgcttttttggcagtcatggcctccgcgggatttccgccagacgagatgcgtccgacggcgctcattttgaacgtccttgccgccggctatgcgacctggaaactgcatcggcacggcaagatagattggaaccttcttttgcctatagcgataccatcgctcctgacggcctttgtcggtggattggttgtgctcaacggttccatttattccgtcctcactgggattcttctaattgctgcctccatactgatgttgcttaagcgaggggctgacaaaatagatccccgtcgggtgtctcgttcctctgccgcactggtaggtgcatccatgggcctcctttccggtctgaccgggatcggaggcggcgttttcctcacgccattgatcctcgtactcggttgggcatctccccggcaggccgcggcactgtccccgccgtttatcctcagcaactcaatgctaggtcttgccggcgtactgttgtccgggcagtcggtgaatcctgaagtcgccgtttacgcgaccggtgctgtcattggagcgatgctcggaactcttattggtttgcgctggatgtcggagcgtgcgacccgctacgtcctcgcgttcatcctgcttttttccggtatccggcttttggttgggtgaaaatcttccaacggggcacggccgcatctggcggtagtatttccctgcaaagggcggtattcggttgactgtcaggataacacctcgaacttcgtaacgcgtgcgacgccggcgagcgtcgccagatccaggccgaactggaagtcgcccgggcggagcttgcggccgtcaccctgcggaacgagaccggtgatcgggagcctccgtactgagaagcaaccgatagcacggccattgtcgactgtcgcggtgctcctgtgatcccatttcatcgacatcagggatagtgcgtctcggacgtcgtgccgcaacctgatggcgtcagaattttccccgccttcggcttcctcgcgagccaaaattcagccgccctcaggtcctccgcttcgctccggtcgttccgatgcagccctccttaccgatccgcatctcatccccgcgatgaaacgcaatcacaggagaaccacatgcaacagctcgcaaaatatctcaccgccaccggccgccgcctgcgcgctctcggcaaggtcatcggtcactttttccgcaaagggaagctcggcctgaaggtcgcgatcaagatccccttcttcgccgacatcgaggtcaacttcgagaccgactggaaccggcgtccgtaaggcggtcgaaacgtggagctggcccgctccggcggaccggatcctcagcaccagggttcgcggcggcctgaccaggtccgcgccagaccctcggagaccaaccgatcgccgaggcttcttccgtctcggacgagtacccggagcttgcgaccgtaacgatccgtatcacgcccgggccaagcctggagttgaaatggcccctcattgacgagctcaatcaaccgttcggttgccttgttgccaagtgccagttccgacgcgcatttcggcgtgctgatttcgggcgcgtcgatatcggcaaccctcaccttctggccgttgatccacagcgtatcaccatcgacaacgcagttgtaacgagccccggatgcacatttgggataacccaaggttcgtgcggattgcgcggcttcaccgtacgaaacaggggagatggcccctagcagaacagcggctgatatgacgcctgtcagaagtgatttcaccggtttgctccaagctcgatgcgggaagattgagcgcatctatcagattcgcctgagatcgctgacctcgttcgatagcctcgggcccgcttttgccgggtgagttcaaggaagagggacaccgcatctttctctcgatcgaagtggtggatcagtgtttggcccttgctgccgatccgtccccatcgccgcgtcaggcaaagctctccgaacagattggcgtcgatcgacatcgcatagtagcgcgccatgttcttggcgtggtccgtgcgttcgacatagagctggtagggctgagcgatcatgaccgagaatcgcgcgtgatgagtccgcggtccaacgacaaatatgaatcggtttcgcgtgttcgattcaatctggtgaagcgttcgaaatgtcaggtcttgggcgatccgccttcggcgtacggctctattcgccacggcgaacgaagcccgcaggctgtctccgcccattcgggtcacgatcctctcgctgcgcggaggcatggttcagtatccaagatagccaaggatatctgcgccatagtattccccctcctcgtctgcatgcgcgatcacctcgccggtggcttcgtcgagcaatgccttgtcatcttcacagacggtggctctcaccttgtggatgcggcattcctcgattgcgtcttcagccgtaacctgtgcctcacatgcttcccaatatcgcatcgatggatcctctcgcgatcaattctgttcgggcgaagccgggacttcggcgcgctcaccgcgctgttgaaaccggttctcgccaacgcatgacttcatgtccggacgacgaaaccagatcgcgcggccgcatctcaatggcgcattgcctgcggtgaagacgatctgctcgtccgcgcgcatgcgcaggacctcgtgcggctggatgagctgcctggaggcaagctgcttcgagcgagttcgtgacgacccgcgcgattggaaactacggctcacctggtcgatctcgaccgtcgtcgtcccgcagcggcgcgatatgtaatcggctgtttccgggtcgttgatggcggcaaatgagatccagctggcgctctcgaaccatttgctggacgcatcacgtccgccataggtttcccgcagctggccgatcgactgatagatcatcgtgagcgtgatgccgtattttcggccggcatcacgcgccgtctccagcacccgcatgtagccgagcctggccacctcatcgaggagaaacagtgcacggcctttgatcgctccatcccgattgtagattgcgttgaggaaggagccaatgatgacgcgcgcgaggccggaatgcgtctccaatgtcttgaggtcgatgttgatgaagacgtcggtctcgccatcggccagcgcctcggtggagaagctcgagcccgacaccagcgcgccgtagttcgcatagctcagccaatgcgtctccttgatcgcattggcgtaaacgccggagaacgtctccggcgtcatgttgacgaaggcggcgacattctccttcacgaaggcggacgcggaattgtcgtagatctcctgcaggcgcgcgcgcagctttggctctggctccgacaggttcgcgcgaacctgcctcaaggtctggtgcttcgggtccgtgtggccggaaaggcaaacgtcggcgatcatcgcagtgagtagctgcagacctgatgaacggaagaagtcatcgcgcacgcccgtcgcgcggccactgtcgctcatgatccatgatgcgacggccgcgatgtcctcttcctttgtggcgccgtgacgaccgatccagtcgagtgcgttgaagccagaagcagcgttcttgggatcgaggacgatgacgcgccggtgcgctttgcgtcggtgctccgtcaccatcggtgccacctcattggacggatcaagcacgatgagcgagccgccccatttgagagctgtcgggaccgtcaccgacgttgtcttgaaaccacctgagccagcgaacacgatcccgtgcgacgagccgaacgagccgtcaaaacacaagagcggcgcggagccccccttgccccaggtcgtcggctcgcccggtcgaaacgccttcgtcgccggatcgtcccggtcgacgcgatatcgctcgccgatgacgataccgcccgtatcggcaaagagcttttcagcctcctgcatcgtcatccagtctgcctccccgtgcagggcgcgcttgccacgaatgcgtcgcggctcgcttcgcgaaaaggccgcattgcccatcctggcgacgcgcagggcgaagaatgtggtgagcagggctacgcccgctcctgtgatggtcgaaggatcggcataggacaggagcgtccttcccgtggggacctggccggcaaacgccagcaggcgcgatccctccctgatcgctgcgacgacgatcacgccgaggccgcctgcggcgacactccaaccagctgccttgacgttaatcgaccctctcgttccgaacagaaacatcagcccgcaggcgccggcgagcgaatagggcaatgccagcccaatccgcccaagaatgagctttgcctggtcggtcgttccgaacgccgagagccaccgttcgatgccggggaggctcaagcaaacgacgatcatggcaacggccggaatgctcgcgaccagaaacttcttaggcgtcatcggaaaacgccttcgcaccgagttcactcaggcgggttcgctccgcctcgtcagccttgatccgctgggaggcatcgatcagcagcccgagcaagagcgcgcgtttttcgtagcgcaggcctgccttgacgatcaggccaccaagctcgatcttctcccgcgcgtccttcttgcgggcttcggtcgctgtcatcttttgcattcgctcaagtctccgcagattggcccgcagcctcgccagcgccgttcgccggcgtggtcgtgggcttgctcccctggacggatttcgtccctgcgcgaaaccggccggcgacctcttcgaatgccgacaggagatcagcctcttcgacctcgatctccccgatgcccgcacgcagcgcgatacgcccgatgcgctcggcatcacgtgtttcggcctgcttgagttgctcctgcaagcgagcaatctcttcccggattttggctgttggcttcttcatgggcgtggcttcctcgttgctttcagtccgatgaaactgaaccttgcccccaatttactcccgatggaaaggtgcaacgttgcacctcgccaaagcgccagctttgggcgaatgatcccgccgttccgaaggagcggatccgaagggcgcaattatacgtcgctggcgcgacgctttgcttttggcccctgacgggcccttccgctcccgacgaacggtttgatttcgttcgatcttaggagcttgttgtcgtcgtggccgtcccgcatttctcagtcagcatcgttgcccgcggctccggtcgcagcgccgtgctgtcggcggcctaccggcactgcgccaagatggagttcgagcgggaagcgcgcacgatcgactacagccgcaagcaagggctcctgtatgaggagttcgtcgttcccgaagacgcgccggaatggctgcgggagatgatcgctgaccattcggtctccggcgcttcggaagccttctggaacaaggtcgaggcattcgaaaagcgcagcgatgcgcagctcgccaaagatgtgaccattgccctgccgatcgaactcaccgcggatcagaacattgccctcgtgcgcgatttcgtggagtggcacatcaccgccaagggcatggtggcggactgggtgtttcacgatgctcccggcaatccgcacatccatctgatgaccactttgcggccactgaccgaggacgggttcggcgccaagaaggtcgtggtcttgggcgctgacggcaagcccgttcgtaacgatgggggcaaaatcgtctacgagctttgggccggcggagccgaggacttcaacgcgttccgcgacggatggtttgcgatccagaaccagcacctggcgctcgccggactcgatatccgcatcgatggacggtccttcgagaaacaagggatcgagctgacaccgaccatccatctcggcgtcgggacgaaggcgatcgagcggaagggtgacgctgcggaggagaaggtcgcgcttgagcggctggagctgcaggaagaacgccgcacggagaacgcccggcgtatccagcgtaatccggagatcgtgctcgacctcatcacccgcgagaagagtgtcttcgaggaacgcgatgttgcgaaggtcctctatcgctatatcgacgatgcgtccctcttccagaacctgatggcgcggatcctccagagcccgcagacgctacggctcgaccgtgagcgtatggatctcgccaccggcatcaggatagcggcaaaatacacgacgcgggatctcatcaccgttgaagcgcggatggccaatcaggcgatctggctgtcgcagcgatcctctcacgcggtcaaaccacccgtcctaacgggcgtcttcactcgtcatgatcgcctgtcggatgagcagaaaaccgcgatcgaacatgtcactggtccggagcggatcgccgccgtcatcgggcgcgcaggcgccggcaagacgacgatgatgaaggcggcgcgcgaagcttgggaagccacgggatatcgcgtcgtcggcggcgcgctggccggcaaggcagccgaaggtttggagaaggaagccggcatcgcctcccgcacgctatcggcctgggagctacggtgggatcaacagcgagaccggcttgatgacaagaccgtcttcgtcctcgacgaagccggcatggtctcgtcccgacagatggcgcgctttgtcgaagcggccacgacctcaggtgctaagctcgtgctggtcggcgatcccgagcagcttcagccgatcgaagccggtgctgccttccgcgccatctccgagcggatcggttatgcggaactgggcacaatctaccgccagcgcgaacaatggatgcgcgatgcttccctcgatctggcgcgcggaaacgtgtcggctgcgctcgacgcctatgcgcagcgcgctatggtacggaccgcctggactagggacgaggcgatcaaatctttgatcgccgactgggaccgcgaatacgatccggccaaggcgaccctgatcctggcctatcgccgtgtcgatgtgcggctgttgaacgagatggcgcgcggcaagctggtcgagagaggcgtgatcgaggccggccatgcgttcaagacggaagacgggactaggcactttgctgccggcgatcaaatcgtcttcctgaaaaacgagggatcactcggcgtcaagaacggcatgttggcgcgcgtcgtcgaggcccaggccggacgcatcgttgccgagattggcagcggcgaagatagacgccaggtcgtggtcgaacaacgcttctacgccaatgtcgatcacggctatgccaccacggtccacaagagccagggcgccaccgtcgaccgcgtcaaggtactggcgtcgagcacgctggaccggcatctctcctatgtcgccatgacccgccaccgggagacggcggagctctatgtcggcctggaagagttcgcgcagcggcgcggcggcgtgctgatcgcccatggcgaagcgccctacgaacacaagccgagcaaccgggacagctacttcgtaacgctcggttattctgatggccaggaacgcaccgtctggggtgtcgatctcgcgcgggcgatggatgaatcgaaagccgagatcggtgatcgtatcggcctcaaacacgtcggatcgcaacgcgtcacgcttcccgacggcaaggaggtcgaccggaattcctggaaggtcgtgccgatcgaggagctggcgatggcacggctccatgagcggctttcgcgttccggatcgaaggagacgacgctcgattaccaggacgcctcgcactaccgcgccgcgctgcgctttgccgaggcacgtggcctccatctcatgagtgtcgcccgcacgatcgcgcacgatcagatccaatggaccgtccatcaatcatcgaaacttgccgcgcttggcgcacgcctggcccaagttgcggcaaagcttggccttgtcggagcgaagtcgaccgcatcgacaccgtctgcaatcaaggaggtaaaacctatggtctcaggtacgacgaccttccccagatcgatcgctcaggcagtcgaagacaggctctcagccgaccccgtcctgaaggaccgctggcaagaggtttccgctcgcttccactacgtctttgcggatccgcagggcgccttcaaggctgtcaatgtcgacgccatgctgacaaacgagacggttgccgcaacgacgcttacgcggatagccgagcggccggaaagttttggcgcgctgaaggggaagaccggtctgtttgccggcagcgccgagaagcaggcgcgcgatacagcaatcctcaacgcgccagcccttgcccgcgatctgcagggcttcatcgcgcaacgcgcggaggctaccagccgctatgaggacgaggagcgcgcggtccgcaccaagctctcgcttgacatccctgccctctccgcatcggcaaagcaggtgctcgagcgcgtgcgcgatgcgatcgatcgaaacgacatccctgccggtctcgagttcgccctggcggacaagatggtgaaagccgagctcgaaggcttcgccaaggctgtgtcggagcgcttcggagaaagaaccttcctgacactcgcggcaaagaccgcggacggcaaggcgttcgagacggcgtcggcggggatgcagccggcccagaagcaagagctgcggtcggcctgggacacgatccgatccgtccagcaactggcttcgcatgaacggacagcggtggcgctcaagcaggcggaaaccctgcgccaaacccaaacgaaagggttgtcgctgaaatgatgtcacacgaaaaacccactcctgccatagcgcgtcaaaggcgccctgccctcgccctgatcgctgcctcatgtggtgttgcccttgcactgattgctggcggcgccgtcggcggcctgcggatcaacaccacgccgagcgagccgcttggtctatggcgtatcgcacgccttgatcgtccggttcacgtagacgacatggtgttcgtttgcccgcctgagaccgaagctgtctctgagggatttgtgagaggctaccttcgcgcgggcctatgcccgggcgggtttggtccgctcattaaaacagttgcggcggtcgccggtcagcgcattgatgtcgccggcggcgtcacgatcgatgggcggccgatcgaaagctcgaacctcgtgtctcgggacggccaaggccgacctctgcgcccgtatgtgggagggacggttccggccggcttcctgttcctgcactcaccgtttcccgggtcctgggactcgcgatacttcgggccggtccctgcgtctggtgtccttggttttgcaaagcaggtgctgacctatgcgccctgattggatccaaccacttgccctcgcgctggcttcttgcacgactgggtacattgcctggagtggacatgtgctggcgcttcccgcagcaatcgcctttcccgcgctctggtctctggcgcgcagtcgccgcaccgctagtcttgtttccgccgcctattttctggcggcgtcgcgtggcctgccgcaaggcgtggctgccttttatcaatccgacatctggtcgggactgatcttgtggatcgtcgcgtcaagtggctttgttgtcgtccacgccgccatgtggtcgcgccagtctgggggttggaaggccctgcgatatctggtggcgatgatccttatggcccttccgccattcggcattgtcggctgggcccatccggtcactgcggcaggcattctttttccagggtggggatggtcagggcttgcggcagtgacagccggtctcgcgatcatgacgacgcaatatagaccggctgcagccatcaccctcgtaggtttctggctctggtccgccgcattctggaccactcccgacatagggcgtgggtggcagggcgtcgacctgcagctcggaaatagtctgggtcgaaataacagtcttgctcgccatagtgaccttgttgcaactctgcggtcagcgcgtcgccccgacactgcctacatgctcctgcctgaaagcgcgctcgcgttttggacgccatcggtcgaaaggctttggcagcagcacctagtcggtagcgatctgagcgtcatcgccggggcggctgtcgttgatcacgatggatacgacaatgtgcttgttcgcgtctcttccaccgaaagcgagatcctctaccgccaacgtatgccggtgcctggctcgatgtggcagccttggttgcctctgattggaaggagccgcggagcccgagcgaacttctttgcaaatccgatcgtgtccgttggcggccagcgcttggccccactcatctgctacgagcagctggtcatttggcccatcctgcagtcgatgcttcatgatccagacctcatcatcgccgtcggaaacgactggtggaccaaggagacatccatcgtcgccattcagcgcgtcagcacgcaagcctgggcacggctgttcggcaaacctctcgtgatgtccttcaacacctgatttggagaaagaccatggacgctgctcttatcgcgaactgcgccgacccaagccttgcccccgctatcgtcgaacagttcatttccgccgtcggttccgacgatccgctggccgtaaccgtgaaggcggatggccggctggttctcatccccaagcctggctcgcccgacgaggcgatggctgtggtcaaggactatgtcggtcatgccatcgttcgcgtcggcatcactcaatttcccgcgggcgttggtgttggcgacccgtcacagcttcagccagacatgttcgacgcctgctcgaacttgcggacggggaccggcatctttgcaaaggtcgcccgcatcgtcaccaaatggtatggccgccccacaaacagcgagctcctttcgcaattggtcgatgatgcgatctacgcttggaagacaggaaccttcgagggcgacaacgtgttccgagccaacgatcccggtggtccgaccttcatgaataaaagctcagaaaagccggctgatgatggtgaacccgcggcgcctccacccgaaagtgaaaatagatcacaatcagacgagccgggtaaggccgcggaggcaggaataaggatcgacatttcgcggataggcggaggtcgataagcctgatttgggcgccaaaaatatagctttccctgtctctgccggataaactcagtgccaatgacagcacctcccgaatatcacctgtttatagacgacaccggcagccgagatcccgaccatgagcttcctcaacagcgaaaggacggcatggattgctttggcttgggcgggttcctgatcaagcaagaagatatcggtgaactgaaggtgcgacactccgcattctgcgctgagcatggaatcgactaccccctgcactcgcacaaaattcgtggcggtcgcggagattttggttggctaaggaatcctgagaaggcgcggcttttctttccggaactcgacgcatttatcctctccctgcccgtgattgggattgcagccgtcatcgatcgaccgggatatgtcttgcggtatcgcgagaaatatcaggaacgactgtggctaatgtgtaaaaccgcctactcgatcctcattgagcgggcggcaaagttcgcggatagtcaaggccggacccttcgggttttcttcgaggcgagcggcaaacacgaagaccgggatctgatgacctatgccaaggcgctcaaggccgacggaatgccattcgcgggcgacggcgcaaatgcctatggctcgcttcctccagaggaattccggcggatcgtcagaggtgaacccaagcgccggaccaaggaggcggcgatgatgcaggtcgctgacctgatgctctatccgatggccaagggtggatacgatcccacctataaaccgtatgtcgatctcatgaggtcgggcaaactgatcgacgcgctcgttccagaacaggaccggtcgagcctcggaatcaaatacagctgcttcaaatgaaaaaaggtccttgcggaccttaattcgtttcggccagcgcctagcgctgaccccggagcgttgctctactggaaaagtagtgcacgtaaaactgttttgcaagtttgatttgggcgagtcgtcagatttggtgcggacacgctctcaagctctcgcagggcgttcggtcctatcaatagagaaaccgtttcaaactcagacccgcatgcaggatgtacggcagccgtccaagggaataatggccacaattcagcttcaagatctgtggtcggccaccgtcgttcttcaagctggataacaggctctccgagatcgctggcatcacaaccttgtctcttctggccaagacaatctggatatcgagctccggccgcgccaaacgacgcgtgtagttctcgagattgagtggaccccatgctctcctgagatcagccagctcgatctcatgctccaggctgctgcggatagttcgagtggcgcgaccggtccaaaccatatccgcaaggctcccacctggcagaaacagcgaagccttcgaaacgctcagatcatgggccgcaatcaatcctgcgacccaagatccaaggctcatgcccaggacagagatttcttggtagccttcacccttcagccagcagatgagtttttttccatcacacacggcctgcttcaccgcttggatcgtacgacccaggttggcgctcaacatataatccgcgtgcaatgagccgggccggccacgctcgaggtgataaggcatcgcgatctcgacgaccgtgatcccgcgccgtgacaaaaagccggcaattttcgcgtttcgagcccgtgcattccaatggtgaaagatcacgagtgccttgcggagggatccacttctagtgatcttcgcccagacgatattattctctgcgacatcggtggatatgtccgaggggaatttaacccaatcctcgttcacctcgaaccgatgattgtcgcgatttggctcatcgaaaaacccaggatcaatcgatgcttcatccgcgcggtcacagaattcagaaatgctctcgatcttctcaccgggaaaggcacggtcggcatccagaatgaaacgcgtcgcctccttactgtcttcaccgcgtcgcgcgcgctgttcatcccactggtcaagccacctaagatacaatttgcttgcttcctacgtcattggagcgccgcctgcctaggccaggttcaatcaggctgaacaccgcgacgatcacaccgatacccaaaaggattgagaatcccacgaacgcgtcgatcagcaggtatgcagcaaacagcaatgtcacgaccgccgccatcgtccagagaggttgttgaaatcgcccagcgatagctcggatcgagattgaaccgtagacaaagacgacgatggtcgaaagggcgacaagtaggctgctgtagtgggtaggcatgcgatagtgaaaaccattgctcgcagcatcgcggccagccagcaccgaagagaaatccccggccaaccagtcgaggatgtttccggcgttcgatgtcagataggaactctgagccttcatgcacaacgcgacgagaaggccaagtattgtgcagcggaatacaccgcgcattagtctcaggcacagcttgtgcacttcgcctcgggacccagtttgatgaagggccgccgcgtccaggccaattttcttgaggtcgtggatcatcgtgtaaagcaaaatgagcccggcaaaaaatagataaaagcacaggcacatgtagaggtaagcgagcgcagtgaacacgatcgccaccgggaccgaaatgacctccgggcgcacaattgccagcgtcccccagcttgtcgcgtagtctgctccgccttccagtaatgggacgaggcaaacgccaatccattggaaaacaccggcgaacaacacgcaaatcaggaaaactgcccagtaggacaaggaggacgcctgcacctggctagcccatccatcgccgcgggtgctcatgtggctccacgtcctcagcttcaggcgtgcctctcctttccaaaaggcgagcagctcggccacgattgcgaaaaacagcggtaggagcaccatgaaaaggatggtccaattcggcgcccagagaaatccgacctctttcgcgacattgtccgcgcggaggtaaacggcgctgtggatccccaagatataggaaagaaagccgagagcggaggcgcctgcaaacaccccggctggcaagttcagcggcgagccgccgctaaaaaacatctccgatcttcgcgctagactgaggcgcggtactttccgaaggtcatcgggttctggttccgtatgaagcgtgggctcgaccgctgacaaggtctcgtggtcaactctggggtcaggcgacagatctggacgctctggcgcacggccatctatctttcgcgcttcccgtctctttgcctgcaggagagcctgggccgcacttagctccacctgccaagccgccgttgataccggatcatcacatccaaaaaccctcgcaagccagcggatattcgccgcgctaactcccctgtcgttttcctgaaaccaaagctgaacagtcctcagatcaaccccaacgcggttcgcatctatctgtgagatcgcctcggcaagcagctctggtgtccaaggaccagctggaaatccgtcttcaccgactgctctgcctgcgcccgccgcagacagtttcttgaataattccttccagtcactaccgtcattgggcggaggcagaaataatttcccattctgaaacaatcgattaccagttctgatttcgtttcgtttcgctgcacttcatattacatcgtgccaaatcactcaatcaccctttatcgaattcaggttggataaatttcgcataaacgcatagcgcgtggtcgacatgcgcaaacaaatgaatcaacctcaggacgagttggcgcgcgatgtcaacgttagtcgaagggttgggcaggagcgtccaggttctgccggtgaagtcatgaagcacggcaccggggaaccagcactgaatggaggggattgacatggaccaactcgtcgcagggcttttggagatcggtgctgccgcacatgatgacgcaacgctgaagaccgccttggccgatctggcagaacagttcgagtttacgggttacggctacgccaagcggctcccaggcgacttttacgtgatctcaaacctatcgcctgattggctgaaacgcagtaggaaattcgatgtggagcgccggcatccaatcatgaagcgagcccaacaaatgcgtcgcgcctttgtttggtcggctacggagggacaggggatgatgccggaggaagacaaagtcttctatgaaacggcatcgcagttcgggatccggtcaggcctcaccctcccgattgcaatttccaatggcggaatttcagtgctcagcttcgtctcgccgaaagaggttctgcgagattgggaggacgtcgatccaatcgccgcatcgtctgcggttggtcagctgcacgcccgcatcgaacagataaatgtgacgccatcgatccaagaaccgttctatctctcgccgaaggaggcgacgtacgctcggtggcttgctcttggcaaaacggtggaagacacagccaagattgaggacgtcaaatacaacaccgtccgaatcgcgctcgctgatgccaggcgccgctatgacctctgtaacaacacgcagcttgtggctttggcaatccgacggggcatgatctgatcagacctccggtgtccgccccagaatgttgataagcgttgtgagtgcacacatctgcgcgtgcatttcgattgtcgcttccagatatgctacatgggcgtcgcttgggtgtttatcgaccagcagaccatcggagtgggcgattcggaacagactctctgcacggtcgaccagggttcggtgcttcttgatcgcatcgaccgtcagcccttcgatcacgtgctcggactcgttcgagagcaatccgacaatcggccgtaagtcgatgtccgacgtcatgtcatttctctcgtgatccataatttctcaacccctcgcatgacctgcgcgaaccggatcgctcgtgtgagaatcgagcaacatgtcgcgtactgtcttggaagtcattttagcgattggccggtaacacttccactgcagttttgcagcttgcaggactaggcgttcccagtcgatgcgggagccggtgccctacgggacagctcgtttgctgaacgctattgtgattgcttgctctttgctgctcagaggtgagatgcacctcgttgatctctgtgtcaggcccgacaacctcaaagtcggttggcgttcggtcttcaaacatccggtaaacgttcattgctgcctctactggactgtcggcttcgacgagcaagctgtgagaggtcactttgtaaaacggcatgctcttcccccgggtctttgccgatacctctagcatccggggaggctgcatggaacggcccccatcttgaagtcacccaggccgactcccaaatgaccagatagcaaacacggatcggcaccatgagagcggaagctacatccatcacgaagacttcgctggaagctctggctgcgattgcgaggtttcggcaccaaagacgtctgggtcgagtctggctcattggtgaccgtcgggtcgcaacccgcactatcgaaacgctcgagcagaaagaccttgtgcgagaggtcgcgttcaacgggaccccggcgttgatcttaaccgacgaagccaagaacttcctcgctggaaagcactagcggaacatggaagctgccagcgcgagcctgatcggatcagcgacgcactgatggcttaccaaagaagcgttcgtgctcttccatgatttcgtgccccgcagtatagaggtgcgcaatggcctcgcgaatgtccgtgaatgccttcgcggtccgttttgagatgtagtcgccgtcggcttcaacatttgactgcagcgcattcgcacaatctgtagcgacgcaatcaagcactggcgcgagagcgtagagctgttgcatcacacgatcgagatcgatcttcgcgcgctctgacattctatcgaccatcgacaactccttgtccctatgagcccggcggcatgtcagactttaacctctgtagtttcccgggaaaataatgtcttggtcaacgagcacattgaacctgtatcctggcctgatcttgatcgtcggctggacattgaggtttttagagattgtctgttccgccaccctcccaaaggtctcggcaaaattccgacgtgccgcatctgaggctgtgtcctgtgtagcgagagtcgagctctcaggcatcgacatgtcgatccccgtcccgatcagcgcgaccagcgcggccgacccgaaggtccttagatagtggttgtcgaccttgtcgttaaaaccaccatagccctccgcgtcggtcccggccatgccgccgatctgcagggtcgaaccattcgggaagatgatgtcggtccagacaacgagaacgcggttttgtccgaatgacaccttactgtcgtatcgaccaagaagcttcgtgccttgtggcacaagtgtgtagtggccggtcgcactgtcataaacgttctggctgatttgggctgtgatgcggcccggcaggtcggaattgatgcccgtgattagcgtcgcgggaattactgatccacgtttgagctcgtatggtgactgctgtggcacgacctgattgggcaggtagccgagatccttgatatcagcgttgaagaaatcttccttggacgcttggccgttctgatcgacctgaccggccgcgcccgctctcaacgctgcggcatagagatcctgcgcaccgctcggtgcagcgttcgattgacgcgctctagcagattgagcgaccggcgattgtgccgagacatctgacatgtcgaccttgagcggcgaatcgaaagccgcccccctcgcctgcaggcttgccatgcgctggcgctgctgttcgcggaagatctgttctcgctgttcgcgaagcatccttgcattccactcctcgtccgattccatgcgggacctgctgggttgccgtgattcagccttcggttctgcctctaccggacgagcaactgcctgctgctgtggaacaggggtgggctgaaacaccggctgctgttcctcccggtcaccgataatgccgtctttgacaccccgcttaagctggtcggcgaaagtcgaagctggtgttcccgatccgccatcatttggatcgtgctgaccaaacctcagcccacgcgaggaaaggccgtagaccagaacggcgaggaacagaaccaggatcccgatgccgatgaacagaggcacgcggttgaggcgcttcatccctttgtcgtcagccgattgatttgacgttcccagttgcagcgattggaccatgatcgtctccgcctgtcagtttcgcttcatgagggaaagagggcttgccggcgtcgcaataccattgctgactgaatatgcccggccgagcgacatggtgtccgtcgacaggcgcgcgaggacctgcccgtctaccgcagcaatcgaataggccagctctaccggcttggttgaatccttcgcgcccgcgctcttgtcatccgtaacgactgcaaagccccaacccttcaacgccgcctcgagcgcaacggagtattcagacgtgtcattgtgcagtttgatgggagtggtcgtcgatccggcttgctcggcgaacagtcctgccatgtcgccggcgatagcgtctgctgcgggcccgctgacgtcagagggtgccgcagctgtggagagcccgtcggttgcggtctggcatccagttaggccgagagcgatggcaatgggaatgaggcaatggaactgcatcaattatcctccccgccggatggtgatcttctgctgtttccagccgacccctgatatcagtaccgccttgtcgatattgtagtcgacgatcatcatgtcgttcttcatccggtaattgacgatgcggttctggccgcccgagacgacgaacaggaccggtgcatcctgaccggagattgcacgggggaactgaatgtaggtcttttgcccatcggaatagacgcgcttggggcgccagggagcgcgtccgctcaaggcataggagaaggccagccgttcgggagcgacaccgccttccggcccagtcatggcctggaggcgggcgttgatgtcggagagctttgtggcggcatcctcgggatactcgaacccgacgcgggccatgtattgtgtgggatgtgacttcagctggatatgataggtgcgccgtgatgtcgtcaccaccatggacgtgacaagccccggctcggacggcttgacgatcaggtggatcgcctgaccgcctgcggcgccagaggttgccggctcgaccttccaccgaacagtatcgccaaccagcacgtcgcggacgatttcaccgccctgcagctcgatatcgcagacctgcaagggcgagcagacgacagacggctgcgtttcaccgaagaggaaaatcaccttaccgtccggccctcgtgtcaccagcccggcctgccctcgccatttgtcggagaggttcgtcccctttgcctcgttgcccgtcaagctttgcgcgatcgcagtggatgagacctcggccgatacggcaagcaccagcatgcagccaagagcggcgtgtttgtgtttgatcctcattgcacatccctgcctttaaagttgcgcggtccagtcgaaatcggtcacatagacgccgatcggattgagccggattgttgcttcgtcttgtggtgacgtgatcgacacggtcgcgatccctcgaaagcgacgggttgcgacctccttgcctttgcgatcacgctcgtactcggtccagtcgatctgataggtctggttcgatagcgcgacgatgttgttcacctcgatcgccactgtcgcgttgaccgccttttcgaacggcgagttgccgcgaaaccaggcattgaccttttgcgtcgacgcatcgctcgttcgcagcagggcataggtgcgatcgatatattgcttctggaccaccgcatccggcgtgatcgaacggaagctggtcacgaagttcccaagggtcgcccgaacaacccgcgtgtcggcgtattcgatctgctgcgggaagccgccggaaactgtgtttccgagtttatcgacctcgacgatataaggaacgagcttgacctgcgtgctgagataaagcgcgtagctgacgccgataacggccaatcccaggctcaagatgccgacggcccgccaggccgaggccgccttgacgtaggagccgtaacgttccgaccattcctgccttgcggcaagatacgggttctcaggtgcgggatgccctgccatgtgtatgatcctgtcgtgaactatggtttttccggtctttccggaggagggggcggagcggaaggattaccctttgcctgatcgagcttggcgttggccaggccgagaaacgagccggcataggcaccgggcgacccgatcgctttctccttggcagcggatcctgtagccatggcaccggagctcaaacttgcgcccatgcctttgagcaccgagcctgtggtcgaggctccgctggcgcgcgctgcctgcgctgccgcaaagccagcgccaaccgcgccggcgccgagaaacgcgccacccgccgcaaacgaggccgcctgtccgccgtgccgaattgtctccattccgccggagacagaggctccttgcacgacgccctggatgatgttcgggacgtacatcgcgataatgaagacgacgaccgagatgccggcgatcgcgagtgtggtgatgaattgatcgctttcggccgtcggagcttgcgcgagtccaagcaggacgttggagccgatcttggcgatcatgaccaaggccatcagcttcatcccgacaccaaaggcatagacaagatagcggatcgcgaagtccttggtgaaggatgagccgccgaggccaagcatgatcatgcctgccagcagacctacatacatctcgaccatgaccgatacgaagattgccgccaccagtgagaagcagatgacgacgatgcccatggcaagaaccgcggcgatcgcaagcgcattgtcctcgaagacgccgaacttcgcctgttccgacatctgagacgcaacgcgaatgccggcgtcgaagacttcggccggagatgcagagccgccaccggcgccgatctggaacaggctgtcgacgaccgccttggcgaaagtcggtccctgtgtgagtgtgaaggcgaaaaagccgatgaacatgatgcgccgaacgagttcggcaaaccaactgtccagagatgctgcctggatcgcgagccacacggcggcaatgccgacctcgatgcccgcaaggatccagaacagtgatttcgccgcatccatgatggtggtttcccaccctttggcggccgtggagacctgattttccaactccgtcagcacttggccttgctgggcgagagccggcgccgccaacgcgaggaaggcaataccggcaaccacgatggcgcttctgcgatcgcgctttaccatctcggtcgcatctcctgacccttttcgacaggcgggagcgtctcccccgagccaaagaacttctcgcgagtttcgcgttgctcctcactcatctcgggcgcggcggagctatcttcacgcgtcagaacgacagtggttatcacagcgatcccggcgataacgatgcagacaaagacaagcagtgcgggacggttcaccagcggggctccattttctgtccggagggaatggattgagcgtctgcattgaagaatttctcccgacgcgcctgtgcgagatccttgtcggtctgttcgctctgcagccaggtccccatcatcgtggtctgctgggagacaattccccgaagcttttgcatctgtgcgacctgttgggtggcgatctggtggccgacctgaagcgccttcatctgaccgtccgccgattgcgacatcgatcgtagctggctcatcgtatcctcctcgctgtcgaactgatcggcggtgaggctggcagccttgagcgtgccggaaatcgtatcccggttggtgttcgaccacgtctgataggtggacgaaaaactctcggcgttcggcaggttggtcttcaggtccgagtagcttttgaagcgttgcttcaggagatcgtcggcattgcccatggagaaggcgatgccctggccctgattgacgatatcgcgtagctggttcagatcgctttcgaccttgccccagatctgggttggaagctgggcggtgttttgcagcatattttgatagatgttgagctggttctggatctgctcggcaagctgggtaatctgtttgatctggttggcaatctgttcgctcgattgtccgaccagggaaatgagctcgccgttgttgagcatctgcgtcatctcggtcgcgccggtaaccgcgcccccggcgtaggaaacactgggcgttgcggaaagaccggcggcgaccaaacccgtcacccacgatttgctgagtctcaaaaactggacagcttcactcatagtggttgatccccctttcgatgagccactgacccgaccattcatggccgtgcatcgacgagagttccctgatgcgggccagatcggccttgccagaagcgccgacgaaggaaagtgtgaccggaccgagagacatgtcgaaaagcctgcggccgtcgggcgacgtcacgtagtattcgcgtttcgggatggcgtttgcgacaatctcgatctgccgctcgttgaaaccgatccgctcatagaattcgcgggtgccggtttcccgggcggcgccattcggaaggcaaatcttggttgggcaagattccttcaggacgtcgatgatgcccgagcgctcggcgtcggagattgactgcgttgcgaggatgaccgcgcaattcgctttgcgcagcaccttcagccattgcctgatcttgtcgcggaacaccgggtgcccaagcatcagccatgcctcgtccaggacgatgaggcttggcgagccattaagccgtttttcaatccgtcggaagagataggtcagaacgggaacgagattgcgctcgcctatattcatcagctgctcgatttcgaagcactggaagcgcccaagtgtcaggccatcctgttccgcatcgaggagctgacccattggtccatcgaccgtgtagtgatggagcgcatccttgatctcgcgcatttggacaccgctgacgaaatctgacaacgaacggccgggcgccgaagtcatcaatccgatttgccgcgagatcgcgtttcgatggtctggggcaatcgtcacgccctgaagcgaaaccagcgtctcgatccactcggaggcccaggcccgatcggcgtcggtcgaaagctccgacaaggggcagaaggcaagactggccccctccccgctttcgccaccaatctcatagtggtcaccgccgacgccgagcgtcaggggcaacatcgaattgcccttgtcgaaggcgaagacttgcgccttctcgtatcggcaaaattgcgcggcgatcagcgcgagaagcgtcgatttgccggatccggtcggaccgaagatcagagtgtggccgacatcgtttacgtgcaggttcagtcggaagggcgtcgaaccggacgccacctgcatgagcggtggggcatcaggcggatagaacgggcatggcgcggatggttgacccgaccatacagagttcagcggaacaaggtctgccagattgcgcgtgttgatcagcggttcgcggatattgcagtaccagttgcccggcaggctgccgagaaacgcgtcggtcgcgttgagcgtctcgatgcgggctccaaagccttccgcctggatgaggcgacgaaccgcttcagccttctccagcagcaccgagcggctctcgtcgaagagaatgataacaggcgtgtagtagccgtaggccaccaactgcgacgaggcttcagcaatggcatcctccgtctcggcgaccatggccatcgcatcctgatcgatcgaccgagactgcgtctggaacagctggtcgaagaaaggtcgaactttctgctgccacttcttgcgggtccgctccagacgctgcttggcttcctccgcatcgaggaagatgaagcgtgacgaccagcgataggtcagcggcatcaggttcaggctgttcaagatccccggccagctctcggccggaagtccatcgatcgcgatcacaccgagaaagcgtccctcgacccgcggcgtcagtccgtgttccagctccgctgtcgcgagccagtccagatacatcggaatttcaggcaggcggaccggatggttctcgccggtgatggcaaatcgaatgaactggaaaagctcgtcgtagcgcgcaacgcgagctccatcccgtttgggaacctctcgggtctgcatgcgctgtaccgaaagaacattgccgaggtactgctcgatctcccggatagagcgccggaatgcatcgagagctgtgtcggcgtatttcgcggagcggctttcggtatccgagtagatatagcgggtcaggccggatcggcgtcgttctggcggccggtaggtcaagataagagcgtgccggctttcgaaatgcccgcgttcctgcccgaaatgccgcctccgctcgtcatcgatgagcgacgtgacagtatcggggaaatagctgcgctcagcggacgggtattccatcgtcggcacccgcacggcctcgacctggatcatccagcccgtaccgagccgggaaaggatcgcgttgatctgacgagaaagctcgttgcgctcgaaatcagtcgcgctttcggaatccggaccggcaaaataccacccagccataagactgccgtccttcagcaaaaggatcccgttgtcgacaaggcccgcatagggaaccaggtcagcgaatgatggacctgtcgatcgaaatgtgcgtagggcgaccatcgcgaaatcctcagtaacggcgccagggcgcggaggtcggaaggtaatgcgcccgatagcgcatatggcgggcatagactttgcgcatcatgggatcggacttcgccatcatgcggagcgcgccgacgaccacgatccagatcgcaacgccgaacagggccgagtagatggtcagcacgacgaagatcaggatgatcgccgcgagcccggtcagcagcacgagctctcggtccgctcccatcaagaggttcggtcgcgacaaggcgcgatggatccggttacgatgaagcccggcgccggcgtcagccatgccgcccctcccctcccccgacccgatttgcattcgggaccgcggtttgctcggcaacaaacgagccgccgattgaagcgcccgtcgagccgaagaggccgacgatcgtcgtcgcgccaagcaggatccctgcgaccagcaccacatagaccagccgccgcgcgaaatcgttgagctcgccgccgaagatcagcataccgccagcaatcgcgaccgcggcgagcgcgatgtagccagcgaccggtccggtgatggattgctggatttgctcgagcggcccctcccacggcaggctcccgccgcctgaacctgcaagagctggtccggcaagcgagacgcaaaacaatgcgccgataattcccaaacggagagagcgattatgctgcatgactgtcctcgtcgatttgcgggtagtgttcggtctggtagcgcgagccgttgaagccctcgacatgaagcacctccctcacccgccggccccgcccggcgcgttcgatcgagatgacgagatcaaccgcctcgccaatcacggcctgcatcggctgctggctggcctccgacgtcagttgctcaaggcggcgaagcgccgacatggccgagttcgaatggatggtcgtgacgcctcctggatgtcctgtgttccaggctttcagaagggtcagcgccgcgccgtcgcgaacctcgccgacgatgatgcggtcgggacgcaagcgcatcgtgctcttaaggagacgcgccatgtcggccgcatcagtggtgtggaggcagacggcattctccgctgcgcactggatttcggacgtgtcctccaggatcaccattctgtcttccggcgcggccgaaacgagctcggcgatcacagcgttcgcgagcgtcgttttgcctgagcccgtcccgccagcgataacgatgttcaatcggtcagcaatggcgctgcggataatcgacgcctgcgcttccgtcatgatcttggcggtcacgtagtcgtctaggggaataagccgcgatgcgcgccggcggatcgtgaaggtcggcgaattgacgacggggggcaaaagaccttcgaagcgatggccgccaatcggcagctcaccagagatgattggtcgttcgccatcggcctcggactgcagagcgtgcgcaaccgagccgatgacagtctcggccgcagtcgcctgcatttcgccggctggtgcaacgccatggccgaggcgctcgatgaaaagcttgccatctggattgagcataatctcgacgaccgtcggatcttcaagggcaatgcaaaggtgttcgccgagggcgtcctggagtttgcggacaaggcgagagtgcgactgaagcatgggtggggtcgtctcctcgtttgagtaccgaaggagacagaccttggtcgccacgcaaagtccacgtgcaatattgcacctcgcgagtcgcgcccgattccgtcaggttgacttcgattcggtggcttagcggcttgtttcgctttcggagcagactgtgaatcacaggaaagattaacaaggaaattgaaccgtatgatcgataaatcgctggaatctaagcgttagtagcgttcgcgtcggaaatggccgttttgcgttaaggctttgttaactttaaaaatcttgcaaaacgagctggaatgagttgtcttatccacggcaaaaagatgtatttacgaaatttaccgtgtgtacgagaggacgtcgtggagaatcccgctgagcttcaaaaagctattcataaactgattgcggcccacgcgcgagatctctcgggcgcgcttcacgagcatcgtgtgaaactgtatccgcctgaagctcgaaagacccttcggtcattttcttcgatcgaggctgcaaaactcatcggcgtaaacgatgggtatctccgccatctttcgattgagggtaagggaccgcaacccgaaatcgggaataacaatcgccgatcgtattcggtcgagactattcaggcccttcgcgagtatctcgatgagaatggtaaaggagaccgtcggtactcaccgcgccggagtggcagcgagcacctgcaggtgattaccgcagtgaacttcaagggcggcagcggcaagaccaccacggctgctcatcttgctcagtatctcgcgctcaatggatacagggttcttgcgattgatcttgatccgcaagccagtatgtcagctttgcacgggttccagcctgaatttgacgttggcgacaacgagacgctctacggcgccgttcgttacgacggagagcggcgtcccctgaaggacatcatcaagaagacctactttgcgaaccttgatcttgtgccgggcaacctggagcttatggagtttgagcacgataccgcaaaggtactcggctctaacgatcgcaagaacatatttttcacgcgtatggacgacgcgattgcgtccgtcgcggaagactatgacgttgtcgttgtcgactgccctccccagctcggctttctgactatttcggcactatgcgctgcgaccgcggttctcgttaccgtccatcctcagatgcttgatgttatgtcgatgtgccagtttctgctgatgacgtctgagcttctcagtgtcgtcgcggacgccggtggcagcatgaactacgattggatgcgctacctcgtgacgcgctacgagccaggagacggaccgcagaaccaaatggtctcgtttatgcgcacgatgtttggtgaccatgtcctgaaccacccgatgcttaagagcacagccatttcagacgcggggattacgaagcagacgctctatgaggtgagccgcgaccagttcacgcgagcaacatacgaccgagccatggaatcgctcgacaacgtgaacagcgagatcgaacagctcattcaatcctcgtggggtcgcaaatgatggtcgcaaaaatacacgaaaacaagaggttgaccgagaagttgccagccggaaactttttgaacctcccactctttgtgtcgcggtattcaaccgatcacgggcacttcaggggaaagcaagatggctagaaaacatctcctttcagatttaaaggcacctacttcatcgactatggagttcggtgagacgaaggctgcagaggcccctaccccacaatacgcgcctcgaggtgcgatcggtgcagtatcgcgctcgattgaagctttgaagtctcagggactgagcgaattagaccccgatctgatagatgcgccgtctgttactgatcgcctcgatgaggatggagcccaattcgaggagttcgctcgaaatattcgcgagaatgggcagcaggttccaattcttgtccgccctcatccaaccgccgagggacgatatcagattgcctacggtcggagacgattgcgagcggtcaaggcagccggcgttaaggtcaaagccgcaatcaggaatttgactgatgacgagctcgtcttggcgcaaggtcaagaaaacagcgcgcgtcaggatttgtcgtttatcgagcgtgcgctctatgcggcccagctcgaagcaagtggctatcaacgtcccgttattatggcggcgctcgctgtggacaagagtaacctttcgcgcttgatccaggctgcgactcagttaccagacgacatcattcgcttgatcggtgctgcaccaaagaccggtcgtgatcgctggtacgagctgtcgtcacggttggctacatacgatgctgtcgaaaaggcgcgtgctcttctttcgagtggcgagctaagctccctggggtctgatgagcgatttgtccgcgtattcgacgcggctgctcctaagaaatccaagaaggagagagctcggccgaacgtctggcaagccgaagatggggtcaaagctgcgagtttccgcgaggacaaacgaacactgacattgatgatcgacaagacggcggcgccagaattcggcgagtacctgatgtcggctcttcccaagatctacgcttcgttcaaacagtcgaagcaatagatgaactgtaacgaagaaaggtgccgatagcgcaaagaaaaagccctccgaaacggtgttccagaaggcctctctcagtttggtcgcttagagaatcgcatttcccggaatcacagtcaagagtcaacgccacactggcgtagccttttctttgccttgcgaaaggtgaaggacatggaaacgggttacataacgacgccatttgggcggcggccgatgacgcttgccttggtaaagcgtcaggtcaagactgagcaagccgcgacagaagggtcggttgaaaagtggcgagtgtttcgcgacgtcagcgacgcacgctcgcgacttggtctccaagatcgagcgctagctgtcttgaatgcgctcttaacatttttcccagggcccgaactcagcgatcacgggaacctcgtcgtcttcccatcgaacgcccagctgtcggcgcgcacaaatggcattgctggcacgacgctgcgcaagtgcctcggtttgcttgtggaggctggggtgattattcgcaaagacagtcccaacgggaaacgctacgctcggaaaagcggtgatggcaacatcgaggatgcttatggcttcagtctcgcgcctcttctcgcgcgcgctggcgagtttgctgcactcgcccaagaggtagcagctgaacagcgtcgattccgcatcacgaaagaccgcctcacgatcgtccggcgagatgtccgcaagctcatcacggtgggcatggaagagagcctgacgggcgattgggctgctgcggaagcatgctttgttgagattgtcggaaggttcgcgcgacgccccactatccaggatttgacagccagcctcgacgagatgaccctgttgcacgaagaagtctccaggatgttggaaacacaggaagaaaccacaaaaaacgatggcaatgccaccgcatacggatgccacatacagaattcaaataccgaatccagctatgaacttgaacctcgcttcgaaaagaaacagagcgaaaagtccgagacaagcagccggacagagcggatgggcggagcggagacatttgctttgcctatggtactgcgtgcgtgccccgagattctgcccttcggtccaaggggatcaatctgtaactggcgcgatatgatgtcggccgcagtgactattcgctccatgctcggtgtcagtccgtcagcgtacgaggacgcctgcgaagtgatggggcaggccggcgcggcgatagcgatagcttgcatctacgagcgtggcgcgcacatcaactcggctgggggatatcttcgagatctgactgggaaggcgcggagaggtgagttttcacttgggccgatgcttttggcgcaacttcgagcaaatgctggccccgcacaagttcaggctcgtaactagccattgtcattttggcgcataacccattgaaaacaagtgattatctgaagagtttccggccggaaacttggtggagcggctctcagctaaacgtcaaggctgcgtggcttctaaatagaaacggcagagctttgatacacgcaccgccgttcgctcaggacttcttctcgttggccgcccggcgcttcttcacgccagatgccagtgtctcgagagacttgacggtcgtctgccagtcgatgcagccgtccgtaatgctctggccgtagacgagcttcttaccggggatcaggttctgccggccgccgacgaggttgctctcgaccattgcgccgatgatcgcatcattgccgtcggcgagctgctgagcgacatcctgcaggacggcgggctggttctcgggatccttgcggctgttggcgtggctggcatcgatcatgatacgcgggtcgagcttcgcgttgcgggacgcggtcattgctgccgcaacgctttcccgatcatagttcggttgcttgccgccgcgcagaatgacgtggcaatcctcgttgccgcttgtggatgcgatcgctgcgcgtccgtccttcgtcaccgccggaaaatgatgcggctgcgaagcggccatgatggcgtcgagggcgatgcggacatcgccggtggtgccgttcttgaagccgattgccgaggagaggccggaggcgagctccctgtggacctggctttcggtcgtgcgcgcaccgatcgcaccccagctgacgaggtcggcgatgtattgcggtgtgatgttatcgaggaattcgcagcccgccggcagaccgagttcattcacatctagcagcagcttgcgagcgatgcgcagaccatcctcgatccggaagctaccgtcgaggccgggatcgttgataagacccttccagccgacggtcgtccgaggcttttcgaagtagacgcgcatgatgatctcaaggtcgtcatgcagccggtcgcgctgctccttgagccgcttggcgtattcgatcgccgcgaccggatcatggatagagcaggggccaacaacgacaagaagcctgtcgtccttcttggtcaggatatcatggatggaactgcgtgcgctgagcaccgtcttgctgacagtctcgtcacgcggcagctcatcgatgatgcgtgcaggcgaggagagttcgacgatattggtaatacgaaggtcgtcagtagcgttcgtcacggtattggtctccaggaggtcataccgggcgcataaaaaaaccgccaggtagactaacggttggtcgggtgaaattgcgtctttcttaacacgcatgttcccgcttccgcaccgaggcacggaaataataaaatcgggaaacataggcgaaagcgatcgacatgacatcttgctacagcaagacgagcgagttgtcactgccgatttccattctcactcgcgagccggagccactccggcgggatgggacattccacttgagtgctgcttcgacggcgtggatccctgcagccggatgggcttgctgggtccttccgggaactcacgatggtggacaatctggttctagagcattcgcgcggctttaccgctgcgccgtgtcgcattgttgtaatagctcgacgcctgctgcaccgaccggtggcgcgactgctccatggcttcggccagcgggatgctgcgattggcggcttccgtcaggtagcccgatcgcaagccatgcgcggagaactcctcaggcttcaaccctgccatctccactcgctgtttgatgatgaggttgatcgactgtgggtcgagagggcgccgcgagagcgttccccaacgtccaatccccctgaagacgctacccttgtcgatcttggccgtcgccatccaggcgttcaaggcttccaccggccgccctgtgagatagacgacgtcgtcctgctcacccgatgtggttttcgtccggccgagatgaatagcgattgaggggaggggagggccgtccttttgctcgatcggcgcctcgatcgtcagttgctcgacgcgcaatgcggcgatctcgcggcgccggcgaccgccggaggcaaaggccaccatcaggatcgcccggtcacgcagatcgcgtaggctgtcgctctcgcacgtcgccagcagcttggagagcacatctgcggtgaccgccttggcactcttgcgtcggcgggtccgagggaccgcgcgcacggcgaggcgaatggctgccttcaggggaggggaggtgaaggcgccgtcgaggccgcgccagtgggtcaaggtcgaccagctggccaggcgccggcgcacggtcgccggcgcgtgcgggcctgcggccttgagaaacccctggcttcgaaggctgtgatcgacatcggccggcatgccatggtccggatcgtcttcccggcgccgtggatcccacagatgatgggcgacgaacttcagcagcagcgcttccggcgccggccaggggagggggctgccggttgccgccagcgcccaggcttcgaggtaggcaagatccgaggtgatggcgcgcagggtgttgtcgcccatcccctcgttgacgagatggcgcagcgtctcgacgtcctggtcggtcaggagctcggcaagctcgtcgcggcgctcgatcggcaacaccgcggcaatggtatcgagttcgacggcccggcgatcagcaccgacgagtgtcgtggatttccgcttcgtcaccatcagtcgatctccacgtgcggccgccagcggcggatgatctcgacgatctccggcttgtaggcgtcggggtagacgacgtcctcttcgcgggccagccaggtgaacacggtcaccatgtcctcgcagacgtcccggtcgagattggcaaggcaggtcaggtcgaagccgccatgcacctcggcgttccaccatgcgagaatgaagttggcgacccggcggctctggccggtgtcgccatgggcgacgttgagcagcttctcgagggcaaaacggacgcgatcttccatgcgaaacgggcctttgcagagcggggtttgacctgaattagcgggtgtcgatcagcgaggtgcaccggaatcgatttcgttctaatgatagctgttttggtcttccaagatcagtggaatctgctgagttggccggaatgcgccacaagcggacattcatgcttgctggtctattgttgacttcatccaggctctcaccgcttcgagcgccgccgacttccgatgtttcggccatacaaggtagaagtccgacggaccgcgaagttcgaccttgtcgatctggaaaaggcgacctccctgcagatcgttggccacgaaattgcgggtggcaaggacgatgccctgacccgcaatcgcggcatcgatggcgtgtgatgtctggttgaaactgatgcgcctgaatgccggcatatcgatctgacccgacatcccgaactgccgctcgatgaattccggccagaaattatgcgtgtcctgcagaagcgcatatccggatagctctgcgaggttcctcggcacgccgctatcccgaaggagcatggggctgcaggcagcgatgatctcctgctcgaacagcaattccgaagcaagtccaggcccgaatggcgggtgcccatatcgcactgcaagatcgacaccatccacctggaagttcgagatacggtcggtcgcgacgatatggatgtcgaggtctggatgtttcgccgttagatccggcagccgagggatcagccacttcgatgcgaaggttggtgtcgtgctgattgcgagtctgacgggttgcggcttgaggtcgcgcgtggcgcgcgcgatgatctcgaacgcccgactgatatcagcgatgtaggctcggccttcgcctgtgagggccagggttcggggcagtcgctcgaacagttgcaggcccagttccgcctccagcccgcgcacctgttgcgccaccgcgccctgggtaacgccaagctcttccgccgccagacgaaagttctggtggcgtgccgcagcttcgaaagccttcaggccattgagagacggtagccttccgagggtattggccatacagtagattttctatcatcaatattcaggagaactgattggcgtctccgatcttcgcgatgatatctctcgtcgcagtggtaatcaatcaatgcatcgacgagacggacgagcgccatgacaatagaaaaagtcgccattatcaccgctggtggcagtggaatgggcgccgaggccgccaagcggcttgcggccgacggattcaaggtggcaatcctgtcgtcctccggaaagggtgaggctctggcagccgaactcggcggtatcggtgtgacgggttccaaccagtcgaacgacgacctgaagcggcttgtcgatgccacgatggagaaatgggggcggatcgatgcgctggtcaacagtgcaggccacggtccgcgcgcagggatcaccgagatcaccgacgagcagtggcataccggcatggacgtttatttgatgaacgtcattcgccccgtcaggctggtcacgccgatcatgcaggcgcagaaatcgggtgcgatcgtcaacatctccaccgcttgggccttcgagccagctccgatgttcccgacctcggccgtgttccgtgccgggcttgcctcctacaccaagatctttgccgacacctatgcggccgacaatatccgcatcaacaacgtgctgcccggctggatcgacagcctgcccggtaccgaggaacgtcgcgacatggtgccgatgaagcgatacggcaccagcgccgaggtggccgcgaccgtttcgttccttgtctcggaaggggcaggctacatcaccggccagaacctcaaggtcgatggtggcctgacacggtcggtctgagcatccaaccgatacagcggtttccatgcaggggccgctgtgtctcgcattgaaaggatcgctggatatgcccggatactgggttgtcaaaggcggcgatgtcgaggacgtggaggcccttgcggcctataacgcgatcttctcggttatcgccgcgcgatatggggtggagatcatcgccggtagatcacgggtcgagaccgtcgaagggcggcatttcccgcgacagttcatcctgaagttcgacagctatgagatagcaagggcttgctacgacgacccggagtatcagcaatccctcacgcttgcggcgcgggcatattcgcgtgaattgtccattctggaaggatagggatcgctccgccagcttgacaccatccagttcgattatttataaccatctggttggaaataatttggtggaacgatgggcaggaaacgggttatcgatcagcaggcagtccttgatgcggcggaacgggttgtcgcacgcgacggtgccgccaatctgacgattgacgctgtcgccagcgaggccggtgtcaacaaggcaagcgtactctatgaccacaagtcgaagcaggccctgatcgaggccattgtcgaccgagccttcgagcgcgacaatgcccatcattccggaatagagcagcagatcgatgcacccgaagatcgggctatcaggagccgaatccttgccgcatccgcgccgccacccgaagagttcaaggcagttgcgctgaatctcagcgccgcgctggcgcttgatgcgggattgcgcggcaagatgcagcagaaccaggcccggacaatcgcccgcatcgaggaaacgtctccatcaccgcacggggcgctgctcgcctatctggctctcgaaggactgaagttcctcgaacatctcgatttccatcatttcgaccgtgaagaccgtgatcggatccttcgcgaaatcaactggctcgtcacagtgcatccggaagagatcgatcttcccgttgccgagacgagctgacactctcagtaccatcaggtgaatgacatgacagacagcattgccgcccctgccgcggccacggataaacgcgtcccgttccagcgcgtcttcctcacaggagggagcggttatgtcggccgcaacctgatccgccatttcgtcgcccgtggcgtcacggtcaccgcgcttgtccgcagtgatgcgtcggcggaacgcgtccgggcactcggtgcagtcccgttccgaggcgatcttttcgatccaaccctggctgccggaatggcaggctgcaatgctttggtccatgccgcggccgataccgatcatggccccgccaccgaggcgcagcgccgcatcaatgaggacggcacgcgtgccgtgttcgatgccgcgcgcgttgccggcatctccaaggtcatccacctcagcacggaatcggtgctggctacgggcaggccgctggtcaacgtggacgagaccgtgcccttgccgcggaatcctgcaggcggatattcccgcaccaaggcagccgccgagcggatcgctcttgccgccaacggcccggatctctcagtcgtggtcttgcgcccgcgcttcgtttgggggcgtgacgacacgacggcactgccgacgctgatggaggcggtccgttcgggaaagttcgcctggatttccggcgggacctacctgacctcgatgacccatatcgccaatctctgccatgctgtcgaactggcactcagcaaggggcagggcggtgaggtgtatttcatctcggatggagaccccttgccgttccgcaccatggtctcggcgctcatcgaaacgcaggggtacgcggtgccggacaagaccgtaccacggttcgtcgttcggaccgttgcggcgatcgggaacctgcttggggccgtctcccgtggccggatcgtgccaccgcttacgcttcagacctatgcgacctccgccgtcgaagtatccttcgatatcggcaaggcccggcgcgaattgggctatgtacccgtcatgtcaagggaagagggtctggcagaattgcgtgctcatcagcactgatagtcttcaaggcggggcgcaccttccggctttcccgccttgatccaatccaccttgccacgcatgaaggatagggccgcatccagtgcggctttccgttcttccagtcgtgcaatctgcaactgcaggacctcgaccgtgcgttccggcgaatgttcgccggcgcgatattcctcattgagttccaggatctcgctgagcgaatagcccagcgtctgctgcagacggatcatgcgggcggccgtcacatcctccctcctgaacacctggtaggggttggatccgcccttggtgctgcgctcgggcttcagcagacctttggtgatgtagaagcggatcgtatcgaccggcagatccgccgctctggcaaattccgaaatgagcatgtttcaacccttgaccatggactgcactccatacttataagagatgcttgtcaagatatggagaaccggaatgacaagcgaaatcatcaccatgccgcaggtgcagctcggacagagcggccccatgatcggcacccaggggttgggttgcatgggcatgagcgaattctatggagcgaccgacgaggccgaatcccgcgcaacgctgaagcgggcattggaactcggtgtgaccatgttcgacaccgccgacatgtatggggtcggcgccaacgaggaattccttgcctccttcctcgccgctcatcgtgacgagatcatcatcggaaccaagttcggctatgcgaggtcgcccgaaaaccccaacgactggagcctcgacaatcgtcccgagttcatccgggccgcagtcgaacgctcgctgaagcggcttggggtcgacgtcatcgacctctactacatgcaccgccgcgatggcgtaacgcctttggaggaatccgtcggcgcgatggccgatctggtgacatcaggcaaggtgaaatggctcggactttcagccgtcagtgccgaagaactgcgcaccgcccatgccatccacccgatctccgccctgcagtcggaatggtcgatcttcacccgtgacatcgagaaggagatcgttccggtcgccgcagaactgagtgtgacgatcgtgccctattcgccactcggccgtggcatgctgacgggccaggcatttgccggaggcctggccggtgacgatgcgcgtcagaatttcccgcgcttctcttcagagaaccgcgaagccaacatgcgccttgtcgccaagatcgagcagatcgcatctgccaagggcgtgacctcggcacaactcgccctcgcatggctttacgcgcagtccagcaggttgggcgcgaagacggttccgatccctggaacccgcaaacgcgctcggttggaggaaaacgtatctgcagtcccgattaccctaactgtagaggagatgaatgcgctggagcctctcgcggccgcagtgcagggtatcgcagtctgagttgatcgatgcgcggtcggtggccgcgcatccgactagattgatatgtccgcaaagggcaaaaagcagccgccctcggtagaacggctttcgagacgaggcgtctttcaactgtcattcttggggagcatccttcgatctgcagtaattgatcgttgccatgccgacagctcggcgaggaggcatcaatggcgcaggcacccaacaggacgctcatcagcgatacggcttggcagaaggccgtggcccgcgaggccgtcattcggcccatcgctttcgaaaagaagttgaccggcccggagagatctgccgcgtgcagggagttgggcctcaagccaacaagattctatcaactgctcgcgcagttccggcgaaagccggtgaccagctcattgctggatgaaactcctggcccagagaaggggaggcggctcctgtcatcggaacaggaagatgccgtcacctgcgctatccaagagatctattgccgccgcgagcggccgacgatcaccgccgttcatgatcatgtcggggtcatctgccgtcagcgaaacctggctgcaccatcctggaaggccgtgaaagttcgcattgattgctccgaccaaaggaagttggccaaagcccgagagggagccaggggcgcccgtcagcacttcacgcctgttgtcgatgagtattcagtcggatcggcgatggagatcgtgcagattgatcatacgttggtcgatctcttcgttgttgacgctgtaaaccgccaaccattgcagcgtccctggctgacattagcgatcgatgtcgccagccgcatggtggccggcttctacctgagccttgagcacccgtcgtcgacatccgtggctttggccatccggcacatggttttgccgaagacatcgtggctcgcggagcgaaacgcggccggcgactggcccgtccacggtctgcccaccgccattcacctcgataatgcacgagagtttcggggaagggcgctggtgtggggagcggccgagcacggcatagatcttattcatcggccggttgcccgcccacattatggtggtcacatcgagcggctgattggcacgatgatgggcgccgttcactttctgcccggttcaacatcgagcgatattggctcccgtggcgattacgatccgcaaaagcatgcagtcatgacctttgacgagctggagcggtggctcacccttgagatcgtcggccgctatcacgccgatatccaccgtgcgctgaagattccgcctcggttggcctgggaagatgccatcctctcgcgtcgggagcccctgcggcttccctacgacgaacaccgtttcgttctggatttcctgccgttcgaggaacgtgtcattcgccgagacggactgcacctgttcggcctcaaatattgggacgatgtattgagcccatggaccggtgcgccggacaagatgcgggtccgttacgatcctcgcgacatttcctgcgtgttcgtcgacgggccaaacggcgaaagctggccggttcggtttgcagaccttggacggccacggatcacgctcggtgaacaccggcaggccgtggccgctttgagggctcgtggtctgcaatcggtcgatgaacacttgatcttcgagaccatcgaagcccagcgacagattgtcgaggtggcaggtcgccaaacacggagcatccgccggggcgccgagagacggtcgcgagcgctggcggccaccgaccggcagcatgtggaaacagtagatgatgccaacgaagacgatttctccgatctggcaccattgtcggtggaggaatggtcatgacggagtacccccatctcctaccagcctatcgccagtatgccgagatggggaccgaagaacgggtcgcctggatccgtgccgatcgttggctggaaacggccgatgcaagggctgcgctggcgcggcttgaggatctgctctcctatccgccgcgggatcgaatgccctgtctgctcctctatggcgataccggcatgggaaaaacaaaaatcatccggaagtttcttcgtgagcaccagccgatctttgatcgtggaactggggtgacgaacatgccggtcgtggcaatgcagatgccggccgaaccggtcgaacgcgatgtctacggcgaactcctcaatgcaatgagtgcaccgggtccaagcggagacgcgaccttcaggcttaagaccacttgccgcactcttatgcgtaggatgggcgtgcggatgctgatcatcgatgagatccatgccatgctgaccggcacatataggcagcaacgggtcttcctcaacgtcatccgatttctagcgaatgatctcaaagtcccgttgatctgcgccgggaccgatctcgcccgacaggcgttgttgacggatgctcagctcgcggagaggttcgaggcaattcacctgaagcgctggtccaatacacaggagctcgcacagttgctggcaagtctcggcagcattctgcctctgcgcgaaccatcccagcttggaaccgcagcagtgcgccgcaaggtgctggatatgaccgacggcgttacggttcgaatatttcgcctgatcgagacggttgcggtcgaagccgtccggaatgggaatgagaggatcaccttggagagcttcgacgctgacaaccttgtcctacctttggtcgcgatggcgcggcgcactgaagggcgcctgcgccgacatgccaacccgtgagagcggtgcggctgctggcaattgccccacggccctttgaggacgaacttctcagctgttggcgttggcgggtagcgagccattattccagctcgccccggcagatcgagaactggatacgtggcgtttcggaagtctcgaagccgcatctcttcggtcacgacgtccctaccgaacaatccgcaacccgattatgggcgcttgcctgtcgcctgcggcaaggcgatctggatcaactgtctctgcagtctaccgggcgcagcagggcgtcattcgtcaacgatccagcgaatagaggcgtttgtccgacatgcctggacgaggatgccgaggaggggagggaccactactgccgacggttctggtcatgcgtcgaagccgtcgtctgcccccggcacaagactgggctcgagattaactgtggcggatgtttccgcagtggtccgtttcagtttcggtctacacctgccgggcttgccagactgttttgccgtgaatgcgatgcgattatttcggcgaggaggtttcagcgccgcaatcaaaccgacttgctgcaggtcgcttctttgatcggcgaggccatcgacaagggcgggacggagttcgaacgcattaaaacggcaagcagattcctctggtcgccgcggccggaagggaggccatacatcgccctgctgggtttatcactgcctcatggtcaattgccatcagtcacagcaagcgcgacgccgatggccagccttccaccagcatggcgagccgtgaccattgcggccatcgcagacctcatcgttcagcgggcgtccaaaacggctctgctttctccctcggtccgtgaagcctttcgacaattcgagcgcgggccggtcctggaggatcatcagttacctccgccagcgcgggcggcgtcagtcctaaatctccgttcggaaaccgagtaccggcagttggcccgcagtattgtcgaaagcgacggatggaaatctttgccgtccaaagcagggcgcgcaaaaaacagggcaatcggcaagctgatgctccgcgccctcaatggcggatgaggccaaaccgatgagcctcatccagcaggtggcgaacagaggaaggctgccatttccgcccaccgcgcgccggccgctcacccatctgatccagttgggcggcaatgtcgcgcagcgacaggccgggatcagcaatggcaatggccgcaacaagcttcatcagatgatcttccggggcgcgccgtggcgagcgcgccaaaagctcaggctctgccagcttctcgcggaccatccggtgcaccgcgcggcgcaggcgttccaccgtccagtcatggccccggcgattgagaactcggacgacattgtcccagctgtgctgggggcgaagttgccggaccatgggcaaccaagtttgggcggaagagatcagctcgtcgagatagagtttttcacgtgccttcgataccgccttgatcgcttccggccgccgctctcgaagtccgggattgcccggcagcttaccacgtgcttttgccgccttgatgccggctttggttcgttcggcaatcagcgcccgttcgagctgcgcgacggcgccgagcacctggagagaaaacatcccctgcggcgtggacgtgtcgatcggatcgcggatcgatcggaaatgaacgccacgttcctcaaggtcctcgatcacccgcaacagatggctgaccgatcgggcaaggcgatccagccggacgacgacgagcacatcgccagcgacgaggtcgccgagcagtctggtcaacacgggccgagcccgtgaagcaccggatccatgctcctgaaaaatccgctcgcagccggcggcgcgcagctcgtccatctgagcgtcatggacctgatcgtcggtcgagacacgcgcgtagccgataagacgtttcggggccggcgatggattggtggcttgccgttttgccatggttttctcacacgtttttcaggttccttgtacagatagggaatacgcgagaaaacgaacagttgtaagcgtgttttatggtctaaatacagctccgccagactcgaaatgcgactatgaatgagcgtcgggctattgcccgcgtgaaatgcgctctgttggccatctgcggcggaattggctgaaaataagggagttcagtggagggtagggggttagaagcactgccgaagcaagcgatagcgggaaatccgatttcgctcgcaaggggacgggagcgtgccgcgactctcatagcggcagcaattccaccgatcctcgctgaattctgcctgaaagaccggaaaaccgggcgtttccgctcatctagggtgaccgacagcgggattcgcgactcgtgtcgatctactatcgataaccgatcactatcgttagtgaacgtcttcgccagatcgagtaatctacgacgctagtaaattgcctgtttgctttcctaaggaaaatcatgcagtttattttcaatggtttatgatgttaccaatatcgatctgagagagctgaattcgccggccgcccgtgctggctgtggcttttacttcccgatttcaattgaagcgctaagctgaaatttcagaccctgattttgaccttacgctttcacgcggagcaggggaggggacctgtcaaccccatccagaagtcaccaaaacttcggcaagactcggctataagcactgcagaaaatgcagtgaaggcggaagttccttgttacccagtgccgaaacgatcaccctggccgtgctcttcctactcgtggcgatcctctacgcttccgtcgggcaggccggcgcatcagggtatctggctgccatggccttgttcggaatggcgccggcggcgatgaaaaccacagccctggcgctcaacgttctggtcgcgggcatcggcacgttgcagttctggcgcaaaggcctgctttccctcaggagcttctatcctttcgccgttttgggcttcccgttttccctgctcggcggtgcgctgcagctcccgggacatgtctactatccgatcgtgggaggaattctccttttgtcggggctgcaaatgttccgctccgcctggagaccggcggtgtcacgatcatcgccgcctgcctatccaccattcgtcccggcgctgttgatcggcgcgatcatcggattggtgtcgggcacgaccggaacggggggagggatctttctcgccccggtgatcctcgcaatgaactggagcagcgtgcggcaaaccgcggcggtcactgccgcgtacaatctgctgaattcggtggcggcgctgggaggcgcataccgcatctatgacgcaattcccgaagcccttcctatctggctcgtcgccgtcgctcttggcggaacgctcggagcgttcatcggcagccgatacctgccggacagtgcgttgcgctatatcctggcgattatccttctggtgtccggggtcaagctcgtgctgagttgatctgaggccgtcgcaccaatctaaaggccgcttgccttcgtgagattgacgcgaaacctgtcgcgtcggcgctgatatcgccgcgtcatctcagcgctggcgtgcccgagctgcttctgcacgtagcgttcgtcaacctccgcagaggacgctaggccggcacgcagcgaatggccggcaaacatcaatccgcgatctccctccggcagatctccgcgcacaccagccgccagagccgtgcgcttgacgaggcgggccacttcctgatcgcgcagccgatcggggccgacctctttgccttgaccggtgacgcgccggaagagggggccgtgcgcaactcgcgcaagcctaagccacgtctgtagcgcgaccacggggcaggtcgtgtcggaggaaccgcgcccaacttcgacctcgcgccagcctgtcttgccgcgcaggcgcaacagtatgcctttgtcaaggatttccacccagccggacgagtcctcagtctggccgcggccgcaatccaggccgacaacttcggaacgacgcaggccgcccgcaaagccgatcagcagcatcgcccggtcgcgcaggccgcgcagggtcccgcggggaagcgtctccaacatggcgatcatatcctccggcaataccgcttccttttgccggggaggggcggcgtgggtgttgcgaatgccggcgagcacggtggcgatatggcgatccttgcggtcgagcggagtaccgcgttgcgcataactccagccaatcgccgacagcctgcgctcgatcgtaccgaccgaattcggcttgccgcctgcaaccgccgccccggaggcgcaggccgtgatgtaaagcccaatcgtctgcgggtcgggcggtagcgtctcgagccgctgccgccggcaccaggcggagaaatgcttccagtcggaggcataggccttgcgagtgttcgccgagctggccgcctcgacataatcgcgcgcccgatcggcaagctgctccaggtgggcaggcaaggcggtacgctcttccggaagaggggaggggagcccggcgttgggcatggaaatgctagccgacacctgcggcgctgaaagatcggcgtcggcagccgtgctgaggggcggagcagagctcgcctcgacgtgattttcgctgttttgctcgataatttgcgtcatttctttataatgacagaaatgaacgataatggaagtttatcgttcgtttgtctttgccaacggggcgtgcggttgtgcgcgatattggtggcataaaccgcgcatttggtctatgctcctacgcatggattcgctcgctccctctgcgccaaccaccccagcttggtcgccctgcctgccgggctgggcgcgcccgcgtggccgcgaccttaccgagtacgacgccgccttcgcagccggtatcgccctgaaatcgcttgacgatctgctccgtgccgacccacgatggatcggctgctggcgcgatcggcttgccctgaagtcggcggtcgtcgccgccagagttttcgggcgcagcgaggaagaagctgcgatccgtgacgcgattttgctaacggcggcgggcgacgattccggaccggccggcaagctgtttctggccacgcgaatgcttgcgcgccgatccgggacactcaccacacctttcgttagggaagtcgccgaactgctggggatgaagggggacgacagccttgccccggtttcggacttgatcgataccgcgatccagtccgggcgcgcggcacccctcgcagttaccgagcttgtatcggcgattacgacccttcgtccggacgccgaggtgctggcgcttgggctggccgaggtcgtgcttgcgcaaaagctgaactggccgaaacctgtcccgctattactcctcgagcggtttggcccggccttccgcaccatcggtggccgcggtcgcgtccgaccgggcgagcctgcctacccaaaagcgatctgcctggcattggtcgacggcgtcgagaccgcactccgctccgccgtcgacatcgaccgcctggctggacggctgctggccgtagcgccgaagctgcggaccaaaggtgccgatccggtgatccgcaggctgttgagcgaagacgctgtgccggcctcgacacctggcagcgatctttcgcgctgggcagccaaccgactgttcgagcgcctcgaaagtttcgaggcggtacgagaactctccggcaggtcctccttccgaatttttggcctgtgatgatggcaggagcgagcgtagccaaaaccagtcggcgtcaggccaaggagcgacagcaagaagttctttacgatcgggagctcgaagacttgccaccggcactgcgctggcgggaatggatgatgcgggtcgaggcggtgatctttgcctcggccgagccggtcagccgcgatatgctggcgcggatcgttgggaaagactgcagcatcgacctgttgatcgatgaccttatcgaggagctgcgcgatcggccgtatgaattggtgtcggtcgccggcggctggcagcaccggacccgaccgcggttcgccgacacgatccgcgcttcggcagcgccgacgaggggaggggcagcggcgctgtcggagttcgaggcgatggtgctgatggcggtcggatatttccagccggtaacaagaagcgagctgtcaaaaattttcggaaaggaggtcagccgcgatacgatcgcagcactccggggcgctggcttcctttcgtccgggccacgcagcccaacgccgggtgcaccctacacctatgtaacgacgaaacatttccttgccgcctttggcttggagacgttgcgcgacctgccggatcttgaagcactggatgatgcggggctcttgagccggcgaggtatggaagcagaagttggtgggttgaatgggcatcctgagagcgaagagttggatgggtcctagcgtgcgagcttccgttcatcgcccagagacaatccgcagtttttgccaagcgcccgcaaagccattttacgcttgaggttttttggggcttttgtcgtacgccaacgtcactccaaccgcgccgaagcaaagggtgggcacgacggtactccaatcagcgaagatctgctactcgtagttgttttcaaccaataggaaaactgcggcgaagccgattcgtgttgcggcataaccaaggccaaaccccacgatcgtaagacaaaagctctcaattacctaccttcggcgacggaaaacgatactcgatatttatagggcagtggctattaaagaccataaggtttcggaggctgtttagaaacttagggtcacaaggagatcaatgatctcgtgtccgacgtgcaggcggcacacctgctgaggacgatcatcgtccatcacctcaacaacagtcgctcgcaacgcatactctggatgctggaagaactgggtgtcgaatacggtatccgactttacaaacgtaatgcggacatgtccgcgcccgcggagatgcggcggatccatcctctcgggaagtcgccgatcctggaagatcaggacgaaaccggcggtcgcgtcgtcctcgtcgagacaggcgcaatttgcgagtatctagtcgacaaggcaggcgggagaatgggtccgacgggttcgacgggccgactactctaccaacaattcgttcactaggcggagggatcggtgatgcccgtgctggtcgcggccctggtcgcgtcgaaagtgccgttactcggcgcgttcgcggcgcgaaaagtcagacctatgatcgacgtgcatctcgacttcattgagtccgagcttgcgtcacgtccatggtttgcgggagacgaaataagcgccgccgacatcatgatgagctttccactcgaggcggcgaaggcgcgggcaggtctcggcacggatcgtcccgcgacaatggcgtggatcgatcgtgtccacgcacggccagcctacagaaaagcgctgaaaaggggcggcccctacgcctttgcgaagtgatggccgtcatcgatgaaaacagacatcgggacaataccgaacacaagggccgagccgtggctgacgtcgatgcgcaagcgatgtcacagcttaagtcatcgacgggcgacaggcgaggggaccggatagcaatggctggcctcggcgttctcgatcccggccgtgaaatccatgccaggggatcttgtcagtctcttcgagatctccatctcctcccgacaataaggcaacaggagcccgggtcgcttgatgcaatggctgaacattatcggaatagatcttgagttcctcaaggaccttgccacgttgatcatagcctatgtattggctcttccgatcggatgggatcgcgagcgaaacgagcggagcgcggggctgcgcacctttcccatcgtagcgctcgccgcctgcggcttcgtcctcgccgccgaaaatgtcacgcgcggcagtgcggaggccaccgccaggatcatcgagggccttatcaacggtgtcggcttcatcggcggcggggccattctcgtcggcaaggcaagcattcgcggcacggcgacggccgcgagcctctgggcgacaggtgccatcggggtggcggttggcttgggcaattacgagacagcgatcgtgctgtccatcgctacctttgccacattgcgggtcatgacaagcttcaagcaggaaggaaaggatatcgagcggccgcaccatgacgaggacgggccctatcgcaaacctgctcccggcgaaactacgatttgagcagttgggttggatcagcgaccggccagcaacgatgaaaggcttatgatagggcaatcaccatttcaaaggcggacacaagagatgcgggcatagcggtgagcacggggcggccatggcggtgaacattgtgaccgttatcgagaataccatggatcaggcggactgaggagcctcctcggtgtcgaagtcatgggagcgataatagctgccacggtcggcgtcagccttctcgtttgatcaagcggctcttccgacaaagtttcggttcagcccgccggatttttcgtcttcgagcttctttcgaagtcacgcatcaagatggccgggtgtcttcctgtattggatgcatggtcgagacaattcgaagctggagctcatcgtgcgtgagctatcggtattgtgaccggttcattcgccggtctgtgaatgcggagcggagacgggtttcgattccggagacccgcggaagcgaaggaagatcgaaagcacgacgatgaccgccgtcgacataaactcgctctgccagttctggagggattcgaaccagaacggggcgcttgtgaaatgctcccagatcgtcggaggaattttcccgtgctgtaaggcattgaccgcctcggcggccgcgctttgccaaagatgaaaccagaaactgataagaaaaagcgtaaagagtaccaacccaagcgaataggcataaactatcgaagccagacctccgcgctgcccagcggctggcgtccgagacttgccgtcctcggccgaaagatcgattttccgatccaacgggcggtccggatctcgcgattcggcggagccgcgttggtagagaaaggcggtaagcaccacatacgcgctcatctgcagaaactcgctctcccagttttcgaagagcgctcccaagaaatgacctgaagcgacataggcccagggcgtcatcggcgcaccaccatgctcggccaggtcctgattataggccgcattccctgaaatcagcattccgatcaacgtgagagcggttgcgaccaccagaacgatcgtcaggccgttgtctctcaggaacttcattccattctccttacggcagtggtggcggtcagatcatcagttcctcgatcaccagcaagatcagaaacccggcgaagaacatagccgccacccaaggacgatccggcatctcatgcgcatcgacgagaagttcttccgtcaccagatagagcagggcgatcagaccgaaggcgagaaatcccgtcatcgctgggccaggcaatgtggtgatcggagcggcaagaatagcgccgaccggaagcagcagaagcagcgccgcgatcgttgcgacgatccgcagccgcgaccgtaccgtctccgccagttcattcgcgaccgtcaatcccagaaacagcacctccagcgtcaaggcgatggtgagaagagcgcccgctcgcgcacccgccgcaaagccgatgcccagcaccaagccatcgataaggatgtcgatggcgaccgcgataagcaacccggccggccccttcagatacgtctccatctgcttaaccagcagcatggcggcgacgccggcggtgccgccgatcaccgtcgcccatgccgaacctccatgcaccacgtctggcaggatttcgccggcggcggccgcgaagacgacgcccgcggcgaagtgttggatagcactcaccggtgttgggcccggtcgcatgactgttgcgatgatcgcccccaccaaagccgcaccggcggggataagtgtataagccaaaatcggcacgtcttctctactcctgttatcgtgatatcggcaccggggtcgtcatccgcgatgtatccgacacgaaattctaaagctacgcactttaaaggagagcatcgcgacagctgcgtatgatggcgttctgcatcgaacggcaagagataacccggattgcccgacgaggttcctcctagtgatatttttactacttgcggaaccaactcacaatcaatggagttagccccgtgcaacaccaaaacatcggaggaaacaatgcctgaagaaaaagccggcaaacatcacgatcatcccggccacaagcccggcgatgtcgatcagcatggccatcgcgacaaggccgggcagaaggaagttccaggagagcaccatgatcaccccggccacaagcccggtgatctcgatcagcacggtcaccgcgacaagggcggctccacaaagaagtaatcgacaaatgcctccctcgaaactcgcgggaggcgtttttcaaggtggacgatcttttacaatgcaagacactcgcgccatttatcgattatggatggtcgaatcgttgagagacggaagatttacttgatatacgccaccaccaaaacgacgtaactcgcccttaagaaagcgcccgctgatcatggacgcttttgatttgggctagcagttacctcttaagcttgccgtagtagaactttggggcattgcaaaggtctttgttcgtcatgtcgatgcagcgttcctaggcgcgttgttcctccggttgcagatatcatggacaccgaccggaccgggttggaggtgacgagattggtatccttgatctttaaataattaagggaagcggttccctgctctcacactcggccctcgttttcagcactatatttcaaagagcctacctcgtccgcatcacgattcgaaattggcggggtgtgtggcctgcatgctttttaaaaacagcgtagaagcgtgcggcggaaccaaagccacagtcatgtgcaatttcaaggatcgggtcgtcggtctccgccagtcgttgtatcgcacgcgacagccgaaaccgggtaacatagcccatgacagagattccgagaacgtcgcgaaacgccctgttggcagttgtaggatgaacgcgagccagatctgcgacggcggtcagcgttaaaggttcacgatagtgcttgctgattatttcagtgagtgcctgcgtataccgaatgcccgatccggcaagcaccgtggcagcacggcgggtgacactgccgtccgtgtggtcgagaataagccggcggacgcgaacggcaacctcatcgatgaccagttgtcgccttgcatggtcacctgatgttaccggcgtggtcggccgttatgagaaacctcattccagccaacggtcgttgaacaatctaattttaccgaagccgcactatcgacggttcgaagaccgagcctatatggcgtcacgacacgaaagtgctcggattgtccgacttttgagaacatagagtgatcacgctgcgaggatggaaatttcccgacgcaacggcctgagatcaccgccttccgtcggagtccagatgtaatcaccggtgagactgatatgctgccagccgagcggagtgatgtgtttgatgacatcgggtggcgtggggatgccctcccggtttagttcggcgaacgccggttcaagatagagtgtgttccagtagacgatggcgttgatcaacaggttaagcccggatgcccggtagaactggctctcgaaggtcctgtcgcgcaattctccgaggcgattgaagaacagcgcgcgggcaagggtattctgggcctcgctcttgttgaggccggcggtcgcgtttctgcgcatttccgggttctgccaccactgcggcaagaagattgaccgattgatgcggccgagatcgcgcagcgccagcgccagtccgttctgacgtggaaacgcggacagcttcgccagcagggtcgaaggccggacctgaccggaacggatcgtcgtgacgagacgcagaatgtcgttccagtttgccttgatccgctcgacgttgatgggttcgccgacgaacgacgccagattcttgggaggcgtgtcgccggggaagagatacagcttgcgatccttgagaccccgcagccggggcacgagctggaacccaacgagatggcaaagggcgaagctcatgtcgctgaccccgccagtatcgacatagtgggtttcgatggcgagatcgctgccatgatagagcaaaccgtcgaggacatagatagcctcgcttgcgttggcattcatggaaacgatgtagaaagcgccgtactggtcagatgtgaaccgatagaatttggcgcctgggttgggaccatagcgagcattgaggtccccgatcgcttcagcgtgaccacccgccggaaaatattggccgtctgacgatgaggttgtcccatcgccccataggcttgcgagcggcaattgcctctgggcattgacgagaatggcgtgcgcagcagaatagccttcctcccggatatgccagtcatgcccccaggcaagctggcgcatcgtgattccgggagaaacatccgccattctggtgaggccgagattgatgccgtcggccaggatcgcggtgagaagcgcaagcttgttgtcggccgtgcgaccgctacgcagatgggtgaaggcattggaaaactccgtgcgagcgtccacttccagcaacaaatcagtgatgcggattgcaggcaggcggctttcaaccttcgccttcagcgatttggcgatatccggaaacaaggccttgtgcggcgtgacgctgaaacccgctccggtcaattcgacatcgttgagttcgccggcggcagcaagacttgagaggtcagccagcccctcgttgaggacctgacgctgctgacggagatacgtctcgacatcggtatcgacggcgatcggaagcggtccctcctcacgcatcagttcgaatgtcggcgagggaatgagaaagctctcaaaagactgaaagcgtttggctccctccacccagacatcccccgcatcgagccggcgcttcaattcgctgaacagacaaagttcataggcacggcgatcaaccttgccgtcctgcaggatgagcggcatccaaccctttggcgcgaacgaaatcggagccttgtcaggtatcgctcttttgcccgtgcgatacaaatcggcgaccacggatagtgcccgcaagaggttgcctgccaccgcgtgaccgcggaagacgagggtggaaagaaattggggcgcaagtttccggatcgtcggatagcgctggagcatgtcgattttgccgtcgatgacatctggggcgatcagcgtatcgaccgcctcgacactaagtgtgaaggctggccactgaatggctctctcgatcgcgctgacgatatcctcgcctttctctctggccgcgataatcgcgtggcagacttttgaaacatccttcagcggcttctgcacttcccggaccgattgtgtcacacgagcggttgcccggttgtcggcgcgtcgggtcaggatgcccatgatcttcttgaacatgtcgatagcgcagtcggtcaggtggcgactaagatgcaacgccgtagcggcgaggaccgcatgccggcgttctgggttgagatcgcgcagatgctgggcgctcatccgcatgccctcggcagcgaattcgtcgaagaccttagccggaatgcgttccgtcaaagctgccgacaggtacagcgaacgcagaaagcgaattcgctcagcaatccggtcgaggttggcggcggctggcgacaatgctggtgttctcgcccacgccaaaacggtcaggttcgtcccctcacgcggatcgagaagcttgtcgagatcgcatttctgatcgtctgacagcccgccagccaaagcctggtgagcgatacggatgccgcgccggatcgccacgtgaatgatggcttcgagtgacgttcgcgaaggaaggagaattctccgacgccgtaattcctcgaccaccatgtccgccaatttgtcagcctggcgtagcgtttgagctgcgggcgtcaaccaaccagtcaacgcccgcacatccgaaggggcgaacggtcgaatctgcattcgctcgaaaagcagggcgaggtgttctcgccgcgtctgggatcgctcgaaataacgatccatctcacgatgatcgacgccgatctgctgtgccaaaaatcgtagaacgccagatggcaggacctcgccgtccgcgagtggccggcccggatatcgcagcgtcgccagaacgcaggctagccccagccggttcgatgccttgttctgccgcatgatcagatcgagatccgagcggtcaagtgtgtagtgtttggcgatctgcctctcatcgcccgggatggttgtcgcttgttgccaccaggcctcattcaataatactcgtcgcgccattcgccgatcttccagattcgttgtctgcatggcagcgaaccggaaaacacctgtccgacaaacgaccgtttgacgacatccacagattttgtccgcaaaccttgtcatcttacggcaaatcggacattgtccatattgaacgagtaaacggacagatctcccctcatgacctcgattggctacgcaagggtctctaccggcgaccaggatactgcccttcaactcgacgcgctgcacaaagcgggctgtgagaagctgttcgaggacaaggcgtccggggtgaagacagaccggccaggactggcggaagccattcgctatgctagaattggtgacacgcttacggtctggaaactcgaccgactcggccgatcgatgaaacacctgatcgaaatcatcgccgaactggaggccaagggcgtcggcttccgctccatcaccgagaatatcgacacgacgacatccggaggccggctggttttccatctgttcggggctctggcccagttcgagcgcgatcttatcagggaaagaacccacgccggtttgcaggccgccgaggaacgcggccgacgtggtggtagacaagcagtggtaacgcccgaaaaactcgcaaaggcgcgccagttcctgacatctggtcttaatgttagagaagctgccgctcgtgtgaaggtcggaaagacagcgctatatcaagcgctcaagacagataagccatccgtttgatttccgcggtagctcacagctcaccgaagccggttttgctaccgcaggcgtttttcccgggtcttctcttgaagcgttggcaaatatatcaatgcgcgaagcccgccttcggcccgatttgatagtgtaagctgccccccatgggcacgaatgatggacaaggctattgcaagccccaatcccattccgcctgtttcccggctgcgtgaggtctccaggcgatagagcggctcgaaaacatgggtcaactcggcttcgggaatgcccggtccggaatcgtcgattgtaatctcgattgcccgcgccgtggtgccgatcgcaacaagggcgttgccgccatatttgaccgcattgtcgatcaggttggtcagggagcgcttgagacttaccggatcgcattcaaaaacaaccggttgtgcgtcctccatacgcacaggaaggccgccatcggccaggtcgtccacgatgctggccagcaaggcggtaagatcggtcggccggcgcggtgcctgcttggtgccctcgcttgcaaatgcaagcgtcgcggccaccattgcatcgagatccgcgatggtcgaaagcattttctcgcgttcaaccggatcatcgacattttctgcccgcagccgcaagagcgtcagcggcgtgcggaaatcgtgcgaaatggcggccagcatctgcgagcgatcctcgatcatgcgccgcaaacgcgactgcatggcattgaaggcatgcgcggcctgccgggtctcgaccgttccggcctccggcatcggcggcgcattcagatcctcgccgagccttcgagcggcctgcccaagggctttcagcggtgccgtcacccggcgcacaacccagatcgccaccaaaagggtgatgaccaccatgacacccatcgagacgaggaagcgcagcgagaaggcgccaccgctatccggcaggacggtggtgaagatgagccattgcccatcttgcagcggaacggcaacctgcatttcgcgaaacccagcgaggggacccatgccaccaaatcccttcatcatcgggttctgatccatcatccgctgggccagaccgaccataatgccgcgcggctgtgaaaccgagaccaaagggacggcgcttccatcggccgacaactgctcaccgagaagctgcctcaacgcctccgccgccggcgcatcggcatcggtcatcggcgtctgtggtggtgcggcggccagggtgacattgaatgtctcatcgctcgaggccgtcacaatgcgcgcacgccaatcgtcgggtgcatcctgcaccaagcgggtcacgttcgtgatgcgctgggcgatcaccaccccgccgaccgcacgcacgatctgcccgcggtccatgccgtatatccatgaaccgaccagatgtgaggcgatgagcccagccaggagcacgaacagggtttggccgaacaggctgcggggaatgaagtgcctcattcgctgctgacttcggggacaaacagatagccgccgccccaaaccgtcttgatgatcgtcggttcgttggggttcagttccaacttcttgcggaggcggctaacctgggtgtcgatgctgcggtcgaatgccgaagccgcacggcctcgggcaaggtccaggagttggtcgcggctcaagacccgctggggacgctcgaccagcgccaggagaagatcatactcacccgtgctgaggggaatcgtgaccccatcctcgcgcaacaattcccgcgcgccggtgtcgagccgccaacggtcgaaacgatagcccgcagcgcggttggaacgctcagcggaatcgtcgttgcgggtccggcgcaggaccgccctgatccgcgcgatcagctcgcggctgccgaagggcttggcgatatagtcgtcggcgccgagttcgaggccgacgacgcggtcgatctcgtcgcccttggcggtcaacatgatgatcggaacgttcgattgcgcgcgtagggcacgacaaagcgaaaacccgtcctctccaggcaacatcaaatcgagaatgatgaggtcgatgcgcgcatcggccatgaccttgcgcatcgcctggccgtcggcggcaacgctgacgcgaaagccctccttgctaagcgcgcgcgaaaccaggtcgcggatttcgcgatggtcgtcaacaatgaggatgtgagcgctggtttccatgacttcctacttacctcaggagtgagatagccgctgagaaaagatgaaacgaaatttgacgggcggcccatctgtaacaatttgtcacgaagaagcgctgcgctgaaaaacttgggtgacatactccggagtagatggtcgcgaacaacaacagccaaaaccgttcggagaaaaccatgacccaaagaacgaaactgaccacaattgcgatcgtcgcgctgctttccgccattgcgataatgttcctgctccatacgttcggcccgctcccctcgttcatggtgcaggcgggctttgatgggacgtccccgatggcaggcatgtggaatggaatgggctggatgatgcttgtcgggccgctctccatgctgctgggcttcggcggctttgtgacactgatcattctgttggtcacctcgcttatccggtcctgcccaaaagctgactgacgttccagaaagaacgaggattgaactatgacacatcaaatctcacgccgcggctttcttgccggatctgctgcgctgctcctgcctgcccgcgttcgggcggcttccgatgcgatgacgctcaccgccaccacgcgcacgatcgaggtcgggggacgggcggcaaccgtcatgggacttgttaacaagcaaggcagtctcgggctaacgctagaccccggacaacgctttcgcgtcgatctgaccaatacgctcgacaaagagacaatcgtgcattggcacggtcagattccgcctaatgcccaggatggcgtgcccaataccaatccgatgctggttccaggtgaaacgcgtgcttacgaatacgccgcacgccccggcaccttctggatgcacagtcatattccggcacaggaggtcggtcttctggctgcgccgctgatcgtgcgctctccggacgatctcgccgccgaccggcaggaagtggtgctgttcctgcacgacttctcgttcaaggcgcctgaggacgtgctcagcgaagtgacaggtggagcgggcatggatcacgccgcgatgggccatgccggtgcatcgggatcgggagctatgccgggaatgtccggtatgatgggcaatatgcggggcatgggcggaatgatgggcatggggtccatgcagatggacctgaacgatttcgactttgacgcctatctggccaacgatcgcacgctcgacgaccccgaggtggtgcgggttgaacgcggcgggcgggttctcctgcgcgcggtgaacgcctcggccatgacttccttctggatcgacctcggggcggtgcgcggacggctcgtcgcgaccgacggcgatgcctgcgtccctcacgaggcaagccggttcggttttgcaccggcccagaggctcgacatcgaaatcgacatgccggcggacggatctgcactgcctgtactttgcctgcgcgaaggtgcgcgggagcagaccggaatcatgctcgccccgacgggcgccgccgtgccgcggatcggcggcctgtcggagaccgaccatccagtcttttcgagcaatttggcgcaagaagcggctctgcgtgccaaagcaccgcttgcggttcgcccggcagaccgcaggcacaacatgatgctcggcggctcgatgatgccctatcggtggacgatcaacgggcagaactggggcaatcatacccccatcccagctcgttcgggcgagcgggtggaaatcacattccacaacatgtccatgatggcgcatcccatgcacctgcacggccatgtctttcaggtggtcggtgtcggcatgcggcgcatcgcaggcgcgctgcgcgataccgtccatgttccgccgatgaacatggtcaccatagccttcgatgccggtgaagctgcgccatggatgttccactgtcatcacatgggacatctggaaaccggcatgatgaccgagcttgaggtgcaggattagcaacttgggtcgcgcaggtctgtcaattggtgcactcgcactggcagtcctcgacgtgattggaacggcggcggcttcgccgtggcgatactgcagaatgattttggcacccaagcgtggcttgctacctcattcagcagactggaactgatgtctccccgttatcggacaacaatgcgatgccgagaggcatgttaatatcgaaaggagggccaccgtgcctagtttagtcgagatagttctaaaagcagcagcggtcggtgttggcgggacgattgtcctggatgtgtgggcatttctattgcagcggctgtttaacgtgtccggaacgaactggacgatggtcgggcgctggatcgggaacatgccgaagggacagtttgttcaaaaaagcatgcctgccgccacgccagtccctggcgagaccacgatcggctggactgcgcactatctgatcggcatcggctatggagtgctcctggtcggcctttggggggccgaatggctgatcaaccccaccatctttccgccgatgatcctggtggtctgcctgctcgtgctgccctttttcatcatgatgcctggcatgggcatgggcatggcgggctctaagacgccaaaaccaaacgtagcacggctgaagagtgtcgttggccactccgtatttggtcttggtctgtatggggcggcccttctgatcgcagcagcccctaatccgatcgcttgaacggtttaagtcgcacctagaatacgttctctgtccgttcttaaaaggcggacagtttcatcactttcgtgtcatgacgccttagagagtttcgacggtgacaaccttgtcctacctttggtcgcgatggcgcggcgcactgaagggcgcctccggcgacatgcaaacccgtgagaccggtgcggctgctggcgatcgccccacggccctatgaggatgaacttctcagctgttggcgttggcgggtagcgagccattattccagctcgccccggcagatcgagaactggatacgtggcgtttcggaagtcttgaagccgcatctcttcggtcgcgacgtccctaccgaacaatccgcaacccgattatgggcgcttgcctgtcgcctgcggcagggcgatctcgagcaactgtctctgcagtctaccgggcgcagcagggcgtcattcgtcaacgatccagccgatagaggcgtttgtccgacttgcctggacgaggatactgaggaggggagggaccactattgccgacggtcctgggcatgcgtcgaagctgtcgtctgcccccgacacaagactcggctcgaggtcaactgtggcggatgtttccgcagcggtctgtttcagtttcgctctacgcctgccggcctcgccagactgttttgccgtaaatgcgatgcgattatctcggcgaggaggttccagcgccgcgatcaaacagacttgctgcaggtcgcctcgttgatgggcgatgctatcggcagaggcgggccggagtttgaacgcatcgagacggcaagccgatttctctggtctcctcggccggaagggatgccatacaagccatacatcaatgcgctgggcttgccgctgccatatggccagcgaccgtcagttacagcaggggcggcgccgctcgccagccttccaccagtatggcgggccgtgaccattacggccatagccgacctcctctttgaggagaccgccacggatcctctactctctgcctctttccgtgaagccttccgccaattcgagcgcgggccggtcccagcgtatcatcagtcgccacctcagaggcgggccgcgtcagtcctaaatctccgtgcggaaacagaataccggcagctcgctcgcggcattgtcgaaagcgaaggctggaaatctctgccgcccaaaacggggcgtgcaagaaaccgggcaatcggcaggctgatgctccgcgccctcaacgagggatgagtccaaaccgatgcgcctaatccatccggtagcggaccgaggaatgctgccatttgcgcccaccgcgcgccggctgctcgcccatttggtccagctgggcggcaatatcgcgcagcggcgggccgagatcagcaatggcaatcgccgcagcgagcttcatcaggtgatcttccggggcacgacggggcgagcccgccaaaagctcggggtcggccagcttctcgcggaccatcctatgcaccgcatagcgcaggcgttccttcatccagtcatggcggcaagctacgccacgccgtatcgttaatcgcgacgatggacgcggggagccgaggggcgttttttgctcctgagcccgctgtaacggcgagatcacagggcgggcttgaaacatttacaatatacgttatattagaatgtatattgtttcgtctgactacggagccagtcatgtctgtcatcaagatttctgagaagctgtcggtctcgccgcagccgagcgtcgacgacatcaggtccctgagggataggggatttgctacgctcatcaacaaccgcccggacgctgaggacgcgacacagccgggatcggaggccgaacgccaagcagccgaacattgcggcctctcctactccttcgttccggtcacgctcggcactatcaccgaagcggacgtgcgcgcgttccagaaggcgctcgatgcctccgacggaccggttttcgcgcactgcaagtcgggcacgagatctctcagcctgtatttgatcggtgaggttctggacgggcggatggctgccgaagaggtcgctgacttcggacgtgcccacggctttgacgtcagttccgctgcggcatggctcaagcagaacgcggcaagccgaccgcatgtgaagggcttcttcgacaatcgcacctggagcgtccagtatgtggtgtccgatccggcgacaggcaagtgcgccatcattgatcccgttctcgatttcgatgagaaggcgggagccactggcaccatcaatgccgacgcgatcctcgactacgtcaaggagaatgacctgacggtcgagtggatcctcgacacccatcctcacgccgatcatttctccgcagcccagtatctcaaggagaagactggtgccagaaccgcgatcggcgaacgcgtcgtcgatgtgcagaagctctggaaggggatctacaactggcccgagctcgccaccgacggcgcgcaatgggatcggctgttcgcgcatggagagatgttcaagatcggaaccatcgacgccaaggtgatgttctcgccaggccatacgctcgcttcaatcacctatgtggtcggagacgcagctttcgtccacgacaccctgttcatgcctgacagcggcacggcgcgcgccgacttccccggtggcgacgcccgcatcctttggaagtcgatccaggacatccttgctcttccggacgagacccgcatcttcaccggacacgactaccagccggaaggtcgcgctccgcgctgggagagtacggtggccgagcagaagaagtccaacccgcatcttgccggcgtgaccgaagagcagttcgtggcgctccggacgaagcgcgacaagacgctgcccatgccgaagcttatcctgcatgccctgcaggtgaacatccggggcggtcgtctgcctgaaccggaagcgaatggcatgcgctacctcaagtttccgctcgacgcattgcagggagccgcatgggaatgagcaccaactcagagaacgtgatgaaggtgcagctctctcccgccgagatggccggccgggccggcgaggttgccgatctcctgaagacgttgtctcaccaggcgcggctgttgatcgtgtgcacgctggtcgagggcgagttctcggtcggcgtgcttgaggaaaagctcgacatccatcagccgcatctttcgcagcatctgaccgtgctgcgaaactccggcattgtcgacacccggcgggacgggaagcagatctactaccgactgaccgaggagaaggccgcgcaactggtgtccgccctctatgacatcttctgtgtaaaggaagcgacatgaccatctatctccagtcgctgagcggcggcatgctgatcggcgcctccgcggttatgctcctgcttctgaacggccggatcgccggcatcagcggcatcgtcggccgccttgcccaaggtatcggcctgaccaccaatcttgcgttcgtgcttggcctcgtgttcgggccgctcgtctacctgctggtcgttggtggctggccgaccgtcgagatcacagcgggctggccgctgataatcgtcgccggactgctggtcggcttcggctcgcggatgggctccggatgcacaagcgggcacggggtgctggggcttgcccgcctttctccgcgatcaatggtggccgtcgccacctttctatcgaccgggattatcgcagtcaccgttctacgaggtatcggattatgaacagaaacatctttcagttcggcgccgccctcgcctctggcatcgtctttggtttcggactgtcgctttcgggcatgctcaatccggttcgcgtccagggcttcctcgacgtcttcggaaactgggatccaagccttgccttcgtcctaggcggcgccgtcgccgtggccttcatcggagtaaaagtgatgaaacgattgcgccgtcccgtcttcgacgacaccttccacgtgcccacgaatcggaagattgacgtgccgctggtcatcggctcggccctgttcggtctcggctgggggatcggcggcttctgtcccggcccggccgtcgcctctatgtcggtcggtattccacagacgctcctgttcgtggtcgccatgctaatcggcatgacattctacgaccgggtttggagcagaaggacatgagtgactccattctactggccgtcggttccggcgggatcgtcggcttcatgctcggccttctcggtggcggcggctcgatcctggcgaccccgctccttctttacgtcgtcggcgtcgcgcagccgcacgtggccatcggaaccggcgcgcttgcagtctccgtcaacgccttcgccaacttcgcgagccacgccatgaaggggcacgtgtggtggcgctgcgccgcggttttttcggcgctcggcgtccttggcgcgctagcaggctcaagcctcggtaaggcgatggacggagaccggctgatcttcctgtttggaattctgatggtcttcgtcggcgtcctgatgctcaagcccaggaagccgacgtcggccgaaaaccggccgatcgaccttaggatgtgccttgtcacagcagccgtggcgctggccgccggagcagcgtcaggcttcttcggtatcggcggaggcttcctgatcgtgccaggtctgatgctggcgacgggcatgccaatgatcaacgcgatcggcacgtcgctcctatccgtcggcgccttcggattggcgaccgcgctcaactatgccgcgtccggactggtggactggtggcttgccgcagagttcatcggtggtggcatcgcaggcggcctcctcggcttgatactggcaacgcgactgagcgcctacaagaacatcctcaatcgtctgttcgcggtgctcatctttgtcgtcgcaagttacatcctctatcggagcttggcatccacgactgcaggctgaagctgcgcctactacgacgcgttggtgcggcgttgccaagcccgacgcggtgacgtagcacccgtcaaggatccatcagtcccggagaagcccgtagcgaaacgcctcgtctatgagcgctttcactgatgagggctgccatttccggccgccgcgaaccggacgctctcccatctgatccaactgtccggcaatgtcgcgcagtgacaagctcggatccgcgatagcgattgccgcaacgagcttcatctggtgatcgtcgaccggccgacggggagagcgggccaacaattcggggtccgcgagcttttcgcgaaccatccgatgaaccgcgcggcgcaggcgttccaccgtccagtcatggccgcggcgattgagaaccaggacgacgttgtcccagctatgttgaggccgaagctgccggaccatgggcaaccacgtttgggcggaggagatcagctcgtcgagatatagtttttcgcgcgccttcgagactgccttgatcgcttccggccgccgctctcgaagtccgggattgcccggcagcttaccacgcgcttttgccgccttgatgccggctttggttcgttcggcaatcagcgcccgttcgagctgcgcgacggctccgagcacttgaagagaaaacatgccctgtggcgtggacgtgtcgatggggtcgcggatcgatcggaaatgaacgccgcgctcctcaaggtcctcgatcacctgcaacagatggctgacggagcgggccaggcgatccagccgaaccacgacaagtacatcgccggcggcgagctcgcccagcagtctcgtcaaaaccggtctggcccgtgatgcacctgatccctgttcctgaaaaattcgctcgcaacccgcggcgcgcaactcgtccatctgcgcatcatggacctgttcgtcggtcgagacgcgtgcatagccgataagccgtttgggtgttgacggcggattggcggctggccgctttgccatgattttatcgcgcattttcgaggtgctttgtacaaataaagaatgcgtgagaaaatgaccagttgcaagagtggtttatagctcgaatatagctccgccagactcgaaatgcgactatgaatgagcgtctggccattccccgcatgcgacacgcactggtggccatctgtggcggaaatggctgaaaataaggagttcgtgggaggggagagagtaacaagcgccgctaaagggggagatcgcaacgaattacttttccactcgggaggagaggggagcgcaccgcggctcgcacggcagcagctattccaccgatcctcgccgaaatctccctgaaagaccggaaaacagggcgtttccgcccatctagggcgactgacatactgatttgcgactcgaaatcaactaccaacgataaacggtggttatcgatagtagataatcgaactaatgaacatatccagtgaggaatggtaacttatagatagagttcctttagaaaatcatttaccatgatttcaatgtcttacgatctcgcgaaattgcccatccagagccttctcaggcctgtttccgaggctggaaccgcgctcgcccggctcgacgagcgcatcgctcgctccgaggtcggcgccggcttcctcgaacgccagaatttcgccgacgcctgtgcctcgctctggatcgacggtgaactcgtccacctcgaggacctcgtcctgcatgacgccagccatgacatccgcacgccgacccatgaactgaccatcgcccgcgacgtcctgcgcacccgccggcggatcgtcgctcagccgcccggctgggcgcttagcaccgatggtctccgaagcctgcgcggccaggcgtggcctggaccatcatttggtatcgatggcggggtccagcgcgatggcgccccgttgcctgttgatgcggcggaggccggggaaggcgaggacaacgacgacgccagcgtcttcgacgccgagctggccgccatcgatgcggttctggcgcgctcggacgccgtgttgaagagagcgggcacaccaacaagtcggccgcgggatcgtgaccccctcgtctatgatctcgactgggacgaggatgcgcggctggaggaatggggggccgtacggcgtcagctggatcatttcccgccggtgctgcaggccttgttagccctcgatgcctggaacacgctagaggtgctacagcacaccccctggcttggccgacacctcgtaggctcgatcctgcgacaggccggcgtcacgaccggcgcccatctcgccgccgtcaatctcggcctgaaaaccattccagtcgatcggcgccggcatcgcagccgagacgtccggctgctggccatagccgatgggttgatcgcggcggccgagatcgggctgaaagaacacgaccggctggcgctcgcgcgcaaaatgatggagcggaaactgcaggggaggcgggtttcatcgaagttgccggagcttgtcgatctcgtcatggcgacgccgctcgttcatgccgggacggtcaccaagacgcttggggtcacgccgcaggcggcgcggcggattgttttggagctgggcttgcgcgagatgacggggagggggaggtttcgggcgtggggtgtcatataatgcaaatacttaggggaggggcatatgtctgtctattttctaacagaactcgataacagtttttcaggccggctgtatgtgaagataggaagatcgaaagcactgaagcgccgtattgcagatctgcaaactggtaataggcgaacaatcgcactaatgggggaaatccggacgtcttctatcaaggaagataaggagatcgagagggatcttcacgatcgcttcagtgataagtctgatacgcgtgaatggtattttctcagcatcgaagacgtaatcactggtttgaagcaatattctgccacagcctatatcacggtcggcaaggacgctttcgagattgtgtcatatgacagagacgcggtaccagaatttgctagtccgtggctgtggggggatgtcgatgtctacgagttctgcccaaactgcgggtgggcatgcgggtggacttacagcgagaattttggcggcgatttgtgcctggaatgtggtgcctcggagcacgactatgatacttccaacccagattaaacgttcagctatctacgagtaacagctatgaaacgagtgagaagagatccagccaaattcgacgccattgaattgtatacggcggtcggccgggaccggggatacaggctcaacgttgaaggcgacatggaaaacttcctcgacacagtgaaaggctctctccaggcgtcgcaaacaaacccactcttgctccatggaaaacgcgctgaggcgctcttcgctcatgttgccggcgctttgggccactgcaggctcatcaaaaaggaagactccggcgatatttttacggcggcgggaaatgttatcgctccagattataggatcgtgctcaacgacggctcgaaattgcttgttgaggtgaagaacttcttcatcaagtcgttcagcaaggaatttacgctgcccgttaagactatggccggtctcgaacattatgctgagctcaacggactaccattgaaaatcgcggtctatttttccaacgcaaatgcatgggtcttgttgtcgaagagtgcgttcaaaaagagcggaaagcattttgcgatatcgtttgttcaggctatggccgtcaacgagatggctactcttggtgatcgtagcatagccacgcttccgagattggcgatccaattttggacaacgccagaactggcgatggaacccgacgagaactcggaagtggttttcaccatcaaagcgattaaattcgagtgcgggaacaccgagatcattggtgatgatgcacgcgacatcgcattttatctaatgagatatgggcgatggtcatgcggtgagcaaacacctctgttcgacggaaataaggtcatcgcgctgcagttcgtattcgagccggacgaggtgcatgcagaccaagggttcgaaacgatcggtggccttagccaaatggtcagcagtgcatacagggagctgacggttgacgacacaggtgttatggcgctcgatatccggcatgatcctgaagtattcactctccgcattccgcaaggcttcaagaacgagaccttgccgctttggcaattcatcctgcagcctaacccgaagttcggcaaagccgatgcagagaagtctatagatttgtaggtgtgcgatagaatgggcccataagccgaaaagtagcagctgttacttttcgatccggtggtctgacaggcggctgacgcggttagcttggcggaagcaggcaacctgttgagatcgaacgaaattctcaatagagtttcagaggggactcggggatttcgaaaatgactgcgatgctatctaaagaggttgaggttgacgatgacgtcaccgggcaactgtggacggtcaaagacaggaagaagctggcgcaactgatagcggtgattgcactcggtcaagcacagcacgcggttagaataatcgacgagctcgagcccctcgcccctgccctgtcagctgcggagctctttcgaggagcccggggccaaatgcttatcagggggacgaccgaggcacagaaagacacatcgcgctaccatcgagatggctttctatttgagtgcatctcatggatcgtcgcgcgccagtcgagctcagcgcgcactttcatgaaagatccgcatatcgcagcgacgacgcagggtctggatggcctggcgattgagatggactccgagaaagacgtaatgatcggggcaaccatattcgaggacaaatgcacggataacccgaggaagaagttccatagcgaggtgatggtgaccttcggggagcatcacacgagcaagcgggtccgagacctagtcgccaatgcggtgtctctcataagagagagcgggctcaacggttcagaagcgacgaaggcggcagcaagagtgcttgaccggtcgtttcgaacctatagggcatcgctcacggtaggttcggacatctcgaccccacagcggcggaagaagctgtttaaggggtacactgacctcgaagagatcaagaaagagcaacgtattggagcaaccttgatcgtggaagaactccgcgaatggtttcagggcttggccgatgaggtcatcgtcgccctcaacgaatacgaggatgccgatgtttgacgtacggaccgcggaactgcttcgctcagcccctagcctgccggagcttgaggccgataaactcccggagatgctaactcggcactatgcggaattggtatcgactaggctccggggcggtgtcgacgagccagccatcgaaggaaactggacgctcgaccggatcgcggatgcgtacgagatagttgcttcaatcgaaagcgatgttgacttgcggcgtgctgcagctttcgttgccggaacagctcagcaaatcctcgcgcggcgagcgccgcctgcagaggagatcgagcgacaaatccctcttagtcgagacgggctcgatcctaccgctgctgctgctgttcttttcttgggggccgaacaatacgcggacgcttttgaggcgggcagttccattccgcgcgcgcggggtccttacgagaacagaatactcgcagaccatctacgcgatctagcacaaggaaggctggtagcgatcctagcgcgagccgagcgctggcgccgcgatgaaccaatcctaggcaccatccagacgcgtgcctttcgcaacctcctttcggctttgatcgagggtgtggaaaggttggcggcaaacatgatgtccgtcgatgtcccagcggcaacaccttctcgtttcgattccgccaggcacgcgtttgcaactgtcatcgaacttgcatcgtacactgacggtggtagcgccgagatgttaggagggcctctgcggacaaactatgcggggccagcgcatctggcttcgctgctcctttcggcgtctgaaggaatcgaagaggcagccctctccaggctgccgccccccgatggagcgaaagccgagttctggggagattggttaaggtttcgtgcggaagaagcgccgtacgtgtggcgaaatcacagagaggctataggcaaagggtttcatcagaccggtaattccgcggtcctggtgttgccgactggcgctggaaagacgacagttagcgttctgaaaattgcggcatgcctctcaagcggcaagaaagtggtgtttcttgcgccaacgcatgcgctcgtggagcagctcaccgaagatctgcagaagctttttccgaaggacaagttcgggttggaagtttcaagcgacttcgattcactgctacttgaagaggcgcagttgcaggacatcgaggtcatgacacccgagcgatgccttgcgatgttgtcctatttgcccgcctctttccaaaaggtcgggttgctggtttttgacgagtgtcacctactgagcccggagtcgggcaaaatcggccgagcgctcgatggaatgctgtgccttctggcgttccatgcggctgcacctaaggcggacatgctctttctttctgcgatgctagagaacggcccgaagttcgcagaatggattgaggatctgaccggacggacttgcgtccccgtcgaccttctctggaaaccgagccggcaagcacgtggcgtcatcgcgtttgaaaagagcgagatcaaccaggccattcagcgcgccaaggacacgcaaaccgagctggatgaccagaaaggaaaggtttctgcgacgctccgtgcagcctcgaaacgcgagttggtggcccaaccttatgtggtgtggggcctccagcacaattggcacaagtcgacaagatcgcatgcattcacgaccatttcggacggtgagtttcaactggccggagggtttgaagatgggagaatttgggcaacaccaaacgcaaatgacgtcgcggcctcgatcgctatcaaggcatacagcaccggcctcaagacaattatcttcgtgaataccaaggccgacgctgtcgggaccgctgcgagcgtctctgaacggctgggtcaaacggtcgtcctaaacgaaagcgagggatcgctatgggacgctctcgtgctggagcttggggacgccaagcatacgatatttcctgacggaaatttcggggctgttcctcataattcggcaatgcttcgccttgagcgcagtctttccgagaggctcttccggcgccccgatggggcgcaagtcatcgtcgcgacacctaccctcgctcaaggtctcaatttgccggcacatctcgcaattctggctggagacaaacgctccggtaagaagaagggaacaagagagccgcttgaagcccacgagctgttaaatgctgccgcgcgagccggtagggcagggcatttggcaaatggcgtggtcatcctgatcccggagccgattatgacattcaagcccggagtagcactgagtaccaagctcaaggacaagctgaagtcagttctcccggaagatgatcgatgcgtcacgatcaccgacccactggaaatggtgctcgacagggtcatggccggggcaatcgatgaccgtcaggtaaactacacgataaaccgacttgtctcgctcaacatcacggatacggacacggggtcagcacacagtctcatgtctcgatcattcggcgcctttctcgcccggaagcgagatgaacagaaggactacgagaagaaggtagagcagctctgggccgttgtgaaagaagcggttgacgctgagctcgatgctgttgtgatcctactagcgacgcaaagtgggcttccggttgacgtgctggaagcattgcgggcgcgaatcgcaaagtccctgggagacttgccgaccaccgttaaagcatgggtggagtgggcattcttgtggttaaagagcgatgctcgcgcacgggaatatttactgggtgacgtcgaaagaaccgctctggcagcagctggcagagcggcagaccagccgattgataacagtgttctggatcgcctctgctcgggaacgctagcttggatcgagggtaagccgctcaatgaaattgaacgtgccttaggcggtgatccgaatggggggcagaagaactcgcgaatttgtctgcgggcgagggagctgatctcttccttcatcccaagaggcctctcttttgcgatcggcgtcgttggcaggatggctgaggaattgggcgccgcggatgcccaggcaacattagatttggaacttctgcaaagcctttctgggaccgttcgccgaggatttgacactgccgagaagcttcagtttgcaaacgcacatcgcgagatcttaggacgagttcagcttcatcgattctatgatgagacctactcgttccctgagctggacctcgacgacgagctgtagtggccggggtgctccgcacagccttagaaggcccagtcggcccgaagctgcgatttcggccaactcgaagaacgttgtgggaacatagcttgcgggattgatccgcgacgcgcagggggtgaagcacgtctatgccttggacggctcaaataatgcagaggttcggcgcgggatgtctaaacgcccttccgtatctctcgtggaactgtcgaaaaggctggtgcgatgagctatcttaaattttgcctcggcgtggcatatgctcgctttcaagatttcagcacggcagctttcggtttccagatatccagaaaattctagtcggcatcttcacgcgacatctcggtcaattaacgagtgccgcttcgcgctgaaacgaatgtgtcaaaggagcaagcggtcaacatgcatttgccgctgagcgcggcgtgcgaaaagctgctgagagcggcggtggaaaagtcggccacggtagcggcggaataatccagccgcgggcggagtaaaatccggccacctatttcctttctgcaatgaacgcaggagggacaggggatctacaccgtggaactttatttgagggttcgtctggctgtttccgaagggatgacgcagcgtcaggcagcaaagcatttcaacgtatcacgcgacagcgtggccaagatgctgtcgtattcgacaccgcccggctatcagcgacgttcgccgatccggcgtccgaagctggatgcattcgtttcgacgatcgagcagtggctggaagctgacatggtgatgccgcgcaagcagcggcatactgccaaacgggtgttcgaccggcttcgtgacgagtgcggcttcaccggcggctacacgatcatcaaggattatatgcgcgagcgggatcaacgccgccaggaggtgttcgtgccgttgtcgcatccgccaggccatgcgcaggccgatttcggcgaggcgacggtggtgatcggcggcgtcgagcagaaagctcgcttctttgtgctggatcttcctcatagcgacggatgctatgtgcgtgcctatccggcggcagtggcagaagcctgggtggatggtcacatccatgcgttcgcgttcttcggaagcgtgccgcagtcgatcgtctatgacaacgaccgttgcctcgtcgcgaagatcctccccgacggcacgcgcaaacgggcagcgctgttcagtggcttcctgtcccactacgtgatccgggatcgctatggccgtccgggaaagggcaatgacaaagggaacgtcgaggggcttgtcggctatgccagacgtaacttcatggttccgatcccgcagtttccgacatgggatgcgttcaacgccttcctggaagagcaatgccgcaaacgccagcgcgacaggctgcgcggcgagagcgagacgatcggcgaacgcttgctgcgggatctcgcggccatgcgtcccttgccggcgtcgccgtttgatgcctgcgaccaggccagcgctattgtgacggcccagtccctggtgcgctacaagaccaacgactattccgtgccggtcgcctacggtcatcaggatgtctggatccggggctatgtcgacaaagtggtgatcggctgccgtggcgagatcatcgcccgccatccccgatgctgggagcgggaagacgtcgtcttcgatcccgtccattacctgccgctgatcgagcagaagatcaatgcgctggatcaggcggcgcctctccagggctgggacctgccggaggagttcgccacgctgcgccggctgatggaaggccgcatggccaagcatgggcgacgggaatatgtgcaggttctccgtcttctggagagctttgaccttgcggacctgcatgcggccgtgaagcaggccattcagctcggcgcgatcggcttcgatgcgatcaagcatctgatcctgtgccgggtcgagcgccggccaccgcgactggacttggcgatttatccctacctaccacgggcgacggtcgagaagacctcggcgaaggcgtatatgcgcctcctgtcgtctgacgcgggagaagccgcatgagcaccgaagcacccgacatcctgctcgcccactatctcaagaccctcaagttaccgaccttccagcgcgagcaccaaaagctggcacggttatgtgccaccgagggcgtcgaccacgtcggctacctcttccggcttgccgagcgggagatgatcgagcgcgatcgccgcaaggtcgaacgccggatcaaggcggccaaattccctgtcgtcaaaagcctggatagcttcgactttagcgccattccgaagctcaacaagatgcaggtgctggagctgtcccgatgcgaatggatcgagcgccgcgagaacgttatcgccctcggccccagcggcacgggaaagacgcatgttgcgcttggtctcggtctggccgcctgccagaagggcctgtccgtcggcttcaccacggccgccgccctggtcagcgagatgatggaggcacgcgacgagcggcgtctgctccggctccagaagcagatggccgcctataagctgctgatcatcgatgagctgggcttcgtaccgctgtcgaagaccggggcggagttgctcttcgagctgatatcgcaacgctacgaacgcggcgccaccttgatcaccagcaatctcccatttgacgaatggacggaaaccttgggctccgagcgtctgactggcgcactgctggatcgcatcacccaccacgtcaacatcctcgagatgaatggcgacagctaccgtctcgctcaaagccgtgcccgaaaggccggctaaaactcccctcaaaaaatcgccgcgccggcctgagaccaccgctcgggcttaagccctcccggcggtctcaggccggcgccacagtggccgacttttgctccgccccgtggccggtttttactccgccgttgacagttatccagaaacacgacgcgacgcggctgcattacgatctccgcctcgaactggatggcgtgttcaagtcttgggccgtgacgaaggggccgtcgctcgatccgcacgacaagcgcctggctgtcgaagttgaggaccatccactcgattatggcgacttcgaaggcacgatcccgaaaggccagtatggcggcggcactgtcatgctctgggatcgaggctattgggaacccgaaggagccaaaacgccggaagaggcgctggccaaaggcgatttcaagttcaccctggagggcgatcgccttcatggcagtttcgtcctggtccgcatgcgccgtgatcgcaacggtggcaagcgcacgaactggctgctgatcaagcaccacgacgatttttccgtcgaggaaaatggtggcgcggtcctggacaataatctgacatccgtcgcctctcgccggaagatggacgcgatcgcttccggaaagggacgcaagccaaagccatttatgttgagcgcgccgttgatagaagccgacgcggtctgggacagcaacgaggggctcgcggctgaggagcgtaaggcgggcaagaacctgaagccgaaaacgacgaaggcgtcgacgaaaacaaagcttaagacctctggcatgcccgacttcattccaccgcagctgtgcgagagccttgaccgcccgcctgctgcaggtggatggattcatgagatcaagttcgacggataccgcatccagatgcgtgttgagaatggtgatgtcacgctcaagacccgcaaaggtctcgactggactgacaagtggccggcgatcgcaacctcggcgtccgaacttcccccctgcatcatcgacggcgaaatctgcgcgctggatgaaaatggtgcgccggactttgcagcgcttcaggccgctctctcggaggggaagaccgacgatctcgtttttttcgccttcgacctactgttttcggagggagaggatctacgcgagttaacattgacagagcgaaaggaccgtctacaggcactcctgtcagatgcaggggacgatccgcggcttcggtttgtcgagcatttcgagaccggcggcgatgcagtcctgaagtcagcctgtcgcctttcccttgaggggatcgtctccaagaaggccgacgcaccctaccactcaggacgcacggatacctgggcgaaatcgaagtgccgggcgggccacgaggtcgtcatcggtgcctatgccaagaccaatggcaaattccggtctctgctcgtcggcgtcaaccgcggcaaccatttcgtgtatgttggtcgggtcggaacaggctatggcgccaaggttgtcgaaaagctgctgccgaagctgcaggaacacgaggcatccaagtcgccgttcacaggcatcggtgcgccaaagaagaccgctgatattgtctggctgaaacctgagttggtcgccgagatcgagtttgcgggatggacagccgacggtcaggtccgacaggcggcattcaaagggctgcgcgaggacaaaccggccaaagaggttgaagcggaaaagccggtatcgcctgcaaaggccgatacgcctcaaccagctcaggtcgccccaaagccgacccggcgcaagggcgccaaggccgacatcatgggcgttatgatctcgagcccggacaagcctctctggcctgatgccggtgacggtgagcccgtgacgaaagaagaccttgctcactatcatgaaaccgtcggcgcctggctcatcgaccacgtcaaaggccgcccctgttcaatcattcgggctcctgacgggataggcggcgagcagtttttccagcgccatgcgatgccggggacctcgaacctgctcgaactggtgaaggtgtttggcgacaagaaaccctatctgcaggttgaccggatcgaggggcttatcgctattgctcagatcggcggcctcgagctccatccgtggaattgcgagccggggcaccccgaggtgcctggccgactcgtgttcgacctcgatcctgggccggacgtgccattctcgacagtcgttgaagccgcacgcgaaatgcgggaccgtctcgacgaacttggccttatcagtttctgcaagacgaccggcggcaaggggctgcatgtcgtaacaccgctcgccgtcaacaagaagaagccattgtcctgggacgaggcgaaggggtttgcgcatgacgtctgccagcagatggccgcggaggatcctgaccgctatctgatcaagatgaccaaaagtctgcgcaacggccgcattttcctcgactacttgcgcaacgatcgcatggcgacggcggtggcaccactgtcgccgcgcgctcgtcccggcgcgacggtctccatgcctctgacctggacgcaggtgaaaacggatctcgaccccaagcgcttcacggtccggaccgtgccttcactgcttgcgaagtcgtcggcctggcaagactattgtgatggacagcgcccgctggagcaggcgatcaagcggctcggaaaagcacgaaaggctgcgtgagcggcggaaaacgaatgggcgagcgaagcgaaaaagaaacgcctgtcggcgcgaccatggacctgccgcatgatcggatgatggtcgagcggtttcgcgaagccttcccgcgcgcccgctggagcgaaagccggaaagcctggtttgtgccaggccgcacagcccagaggcgcatcggccggtggctggcggagatcgaggctgaggccgatgcatttgcagacgataagggtcgtgacgccttcgcttttgatccgatcgaaagccgatatcttgaggctggaaccgccgcacttttcatccgaacaccctattccaaaacgctcgtgtcggaaatccgtgagatcaaagacgcccgctgggatgcggatcgtcggctgtggactgtgccctatcggtcttacgaggatcttcgcagccggtggccggttatcgaagcgatcgccgcacggagtgagccggaagcgcgaaaggaacgacgggaagccatccgcggaacgcaagaggaggagttcgcgaaagcacggagccgggagaggcggcgcaggcgttatcctgttccctccaaccagacaccgcctttcgaccgggcgatttccaccttcgtcggcatcgttgtctttactgcactcaatggggaactggctgacgccgagacgatcaaaaccttttacttctcacccaccgcaggtagcgactacctctgggtctcgtggcgggccggcacacttgaggagcttgtcacgacatggccggccaggtctgatccgacggaagaggagcgtcatcgcggctggtggcagccgacgctagacgaattacgcatcgcgcgacgtgaggccagatcacgggaaaaggcccgccaacgccgattggagggggcgtccccggatggaccaacagacagtatttgaagagttcaggcttttgccggcgatcgcgcccgtcgagcttgtcggcctctggaaaggacgtggcattgcgaccgggcatcctttcgatggcgtcctcgagaaccttgggtggttcggtaaacgctttgctccggacctgcgagccgacgccttgctgttcagatcgagtgagcggcgtctgactgctgtcgatccgtcgctgatccccgtgggattggctcttcgcttccatcgcttcggcaaaacgcgtgccgcgcgcaatctattttcatatcttcgagggcgattgcgtgcgcaggggcccgttgcgacgctgcggctcttgccgctcgagggcgtttcaagcgctgcgatggtctatgatcataagccgatcacggatcatttccgtcgggtcgatgcggacactgtgatgggaatgatggtcatcaagggtgatgatcgccgatttttcttcgagcttgaacttgtgaaggaggatcgttgacgccacgtgcaaaacgggtttgggcaaacaatctatcgactaccgcccgttttggatgatcgcctgtcgcgcagttttcccgcagcgctggtcggccgggtcgacagggcgctccccgcaagggtcgagcgccctgtttatttgggaatggcgctgtctgtcagttctaagacggcggcattgtcctggacgtctcgcagccccttgaacgacgcgtgtctaaggttgccgtctgcagtccagcctctgaactcgatctcggcaatgagtgtgggctgggcaaaaacaagatctttgcctttcagcggcaccaccggcttttttgtcttcagtctatcaagggtcttgcggagatagtctgcgtccttggcgctgaaccccgtgccgacggagccgacagaaacccaatcgtgccctttgcgagcggcaagaagcaggctgcccagtccgccccgcgctgccgacgattgctcgtaaccgacgatcatgaaactctcgctctggacgcacttgattttcagccagtcgccgtttcgcccggagcggtacggtcggtcgcggtgctttgcgatgatcccttccaggccgagtgaacaggcgttgtcgagaagttcgtggccgtcaccctgcacctcctcggaaagctggattgctccaacttccccgtcgagcaggtcttccagcaaatgtcggcggaccgatagttccgtacccgtcagatcgtggccgtcgaaatagagaaggtcgaaggcgaacaaaaccgcttccgacgatgcgcgcttgccgccgcgacctccgagcgatcgctgtaaagcgccaaagtccgacgtgccctggtcgctcaggacgacagcctcgccgtcgaggatcgccgtgccgacgccgagttttttcgcggcgtcggcaatcttgggaaaccgggtcgtccagtcatggccgccccgcgtgatcaggcgcacccccttggggtcgatgtggaccgccagccggtaaccgtcccatttcacctcgaatgcccagtcctccccgacagggggagacggcttcagcgttgcaaggcaaggctcgacgcgatcagggataggatcgaacggcaggttcgactgtgcgggatcacgcggtttgcgcggttttgattttgcgacctggtcatcctggaggagtggcttggcgcggcggctcatttgcgagaccgggtctcggcggcgaccgacttcttcagcgcatccatgatgttgatcacattgctcgggccgggcttcgaggaaggtgaccccgatttgctgcgaatgggctttttcatggccttcttcttggtctcgatcagttccagcagatggtcctggacggggtcggcgaccatcttcggcgaccagttcttcgtttgctttttgatcaactgctgaaccagcggcatcatgtctgaatccgccttttcgtcgccaacgctttcgaagtagctgttttcatcgcgtacctcatcgccatagcgcagcgtccagagcacgatacccttgtcgcgtggctccagcatgacggcccgctcgcggcgagagatcaccagccgggatataccgaccatatcctgcgcttccatcgcgtcacggataaccgaaaaggcctcttggccgactgggtcgttgggggacaggtaataaggtgtgtcgagccagatccattcgatgctgtcgcgcggtgtgaacgtggagatatcgatggttttggtgctgtcgagtgcgacattctcgagttcgtcgtcttccagcatgatgtagtcgtcttcgccgcgctgatagccttttacctcgtcatcttccttcacctctttcccggtgacggaatcgacatagtggctgacgacgcggttctgtgtttggcggttgagcgtgtggaaacgaaccttctcgctttccgatgtcgccggcatcatctgcaccgggcatgtaacgagcgaaagtttgaggtagcctttccagtaggggcgaacggccatgaacgtatctcccttttaaccggcgcggcgggatggcgcggacgcctgcttggtcctgcctggagttttcgatgctgccttgcgtgacgttccgcggttggcattcgcagccgcgcgcttcggctcggttgactttgagcccattcccgcgctctcgcgcagcgcctgaagaagatcgctcggcttcgacgcggccggtgccttcttcttcggcaacgcgcgaccctcgatcttggcctttacaagttcggctacggctgcctcataacggtcgtcgaacttgctggcatcgaaactgccttttttggtgccgatgatgtgctcagccagttcgagcatctcgccctcgatcttcaggtcaggcatctcgtcgaaggcctccttcgacgaccggacctcataatcgaagttaagcgtcgacgcgatcaagcccttcccgtgtgggcggattaggactgtacgaagcctccgaaacagtacggttcgtgcgatggctgctaccttagcctgcttcattgcatcacggagaagaatgaacgcttctttgcccatcttgtccggcgccagatagtaaggcttgtcgaagtaggtcgtgtcgatctgggagcacgggataaaggcgtcgacctttagcgtcttgtcgctctcggggatggcagccgccacctcatcgggctcgaggatcacgtactggccgttctccacctcgtaaccctttacctggtcgtcacgctccaccgcatcgccagtctcgctatcgataaactcgcgcttcacgcgattgccggtctttcgattgagcgtattgaaggcgatacgctccgacgatgacgcgacggtgtaaagtgccaccggacaggagacttctccaaacttgatgtagcctttccaattcgcccgcggtgacaccatgacgctcaaactcctacgcaaccatggcgattcaaccgaatcactcggcgaatcgttccgagtcaaaatgaatctaaattcaacggcttagggacggtttcagtgcccgttatgcgagtctgagttaggtcgatgattccatgcatcttttggtctcccggtgcgttttctcatcgctgcacccaaaaggagaacgccatgagcaagcgcgaactgatcgataccggaaccgataaacgctatgtccgccgtgacgaggatggcaagttcaaggaaagtgtcgatgtcggcaaatccctttccgccgacaagcgccacaaggccaagaacgaagcaaagcccggcgaaggtgatcggggtgatcaccacaccaagcactgaccgtcattgaagctcgcgacctacaacatcaacggcatcaacgggcggctcgacatcctcttgcaatggctggaggaagccgcccccgatgtcgtctgcctgcaggaactcaaggcccctgatgaaaagtttccgcgacgggcaatcgagaaagcgggttatggtgcgatctggcgtgggcagaaaagctggaatggggtcgcgatcttggcgcgcgaagccgatccgatcgagacgcgtcgtgtcttgcctggcgacgcggatgacgatcagggtcgttacatcgaagcggcagtcgatggcgtgatcgtcggatgcctctatcttccgaacggcaacccggcgccggggccaaaattcgactacaagctccgctggttcaagcgcctcctgaaatacgctcaggaattgctcgaccttgaggtacccgcggcgctgatcggcgattacaatgtcatgccgactgatctcgacgtctataagcccgaacgctggcgcgaggacgcgctattccgaccggaagttcgccgcgcctatgccgcaatgcttaaacaggggtgggcggacgccatccgaacgctccatccggacgagcgcatttacaccttctggaaatactggcgcaattcgttcgaacgcgacgccggcctgcggatcgaccacttcctcctaagccccccgctcacggccggcttgagagccgccggcgttgatcgatgggtccgggcactgccccagacgagcgaccacgcgcctgtctggatcgaggtggattgaatgagttcgaagtcctcagtcgcaaaagcgggcacgatcagtggagggaccgaataccctgacacgcctgacggacgctactttattgtccgcggccggctctggcgcaagagcaatccctcgctcccgaagtcacgccgcgacgaactggtgaaagaccttatgtcggcgcgacgggatgttcgaaagttcaggaatgataaggaaggcctctcccaagcgcgcgagcgggttgatgcagccaaagtcgcgctcggcgagcgcgggccggtctggtggactgacgggacgcctgatttcaaccggcatctggtagaaacaagcccctatgccgattggtacgcccgcctcacgcgttgaaaggcggctacagcgacgttgattgctcgactggatcgcccgactttgtgacgatcgaagaaccatatggctcgcgcgaagaaataatcagcgagtcgggtgccagagggggagcgagcgctttcgcctcatcccacggtgcacgcatccagatgtctgtctcttccttcgtaagcagcaagaccggcatggctttttcgtggatcggtttgacgagcgcattggggtcagtagtcaggaacccgtagagatcgtctgtcgtcggcccatccttcactttgcgaacgctggtccattgtggcacctgcagtccggcgaaaaacatcagcgatttctgttcatccctggcaaaccaggcatttggcgtcttgccgtcctctcccactgatgccggatccggctcggcaaagctggtaaccgggacaaggcagcggttttcgatcccaaaccacttcttccagtgtgagaagttgagatcgcggacgttggtggtacctgggtcgcgctgctcgcggatcaacttgtccatgtccaccacctcgcccttggtcttgagcttgtcagccttcttctgcgcctcctttttcagggcaaagaagggggcgggcagcccccatcgggtgtggacgagctgcactcgtccatcaggagtattgcggacaatcggccccatctcgtttggattcatctggtaggccggcatgaggttgatcaggctttcggcgtcctgcgcccactttgcgacccaatccctgtcttccatgcggtagagattacacaaatgacgaacctccctctgggcttggaaaaacttagcggactattgacggcttgcaaccgcatcgggcctggaacagccttacccgactacttattttgatcgttgaggactgatagttcccaggagaccgagtgtgtgtggatcagagatgcgtgtagccggtgaatttcaggtcgagttgctcgagccgaggaaattctcttgtcgacagatgatccgctgcgattgctgtcgccgggagcgcaacgtcgaagagctcgaggctgatggttgcggcatctgcattacctgtctggaatgcgatgatcttctggtcgatctggaagcatcggcgaatgagccttacccctcgtacatccgatcactgcatctgggacggcagtagacatggaaagcgtgtctcgcagagatcgccatcagcatttgtcattctgtcgcatcccatagcggccatgcgcctaagacgtgcgaaggttatgctggcgccatgtttcttgacgatctcagcgcggacgagcgctccgttccgtccgcaacgcaagcattcgacatgaatgacaggctctctcaccttgcggagtgtggttgagagatcaagaactcccttacgtccgccggacattcaacacgtcccacgaagcggctcgagcggttcacatagccggaaagaagcccgcaaaaatttttcgcgggaagcaacccggccttgattatagctagtcgtctgaatctgctgacaatatctgcctaataccgaaaacatgagacgatattcctatttttaggtctattgactcctagtggttaccggaacagaagaagaacatcaacgttctggcgacatgaagtcgtattttttcaacgcgatctcacaggattcgtgatcgatgccggctgcctgccaacatgtccttgaagagcttcgagagcgcatatcagcgctcgaaggcggcatgtcacggagcgcaggcagcatcccctttggggtatcggatatcgacgccgttcttccggggggcggtctcgcctatggcgcgttacatgaatttgctggcggcggcgcggggaccatcgacggggctgccgctgccctgtttgccgcaggtatagcggcgcgcaccaaaggtccagttgtctggtgcctcacccgtcccgacctcttttttccggcgctcgcccaggttggtctccatcctgaccgcgtaatcttcgtggagtcggacaaggaggaagacgttctggcgaatatggaggagggactatccttcggtggactgggtgccgttgtcggtgaactcgtccgtttgccgatggtcgcttcccgtaggctgcaattggcggccgagcgaacggggacaatcgcgctcgcggtgagacggtggcggcgtcagacggaagcgaatgattttgggcagccgacggcgtcaaccacgcgatggcgggtgagcgtcatgccgtcggaggagttgccagtgccgggtgttggaagggcccaatggtggctggagttaatgcgcgtgaaagcgggtgagtgtgctgagtttctcgtgagggcgtgcgatgacaagggttgtctcgatctacctaccggatctgccgacggatcgcattcgtcgcgccgatccatccattccgcctgaacaggcgattgccgtgatcgccaggagtggtgcgaagcgttgggtatcggccgccgatgctgctgccagaaaggccggtgtgcgtgtcggcatgccggcggcgaaagcgcaggcactgttccgaggtctgatgctggtggatgcgaatccaggaatggacgccgcggcccttgagcgaattacgctctgggcgctgacgctctactcgccgatcgtggcgatcgacggtgtcgacggcatcgtcatggatacggagggtgccgatcacctgcagggtggcgaactgccgatggtgacaaagatcgccaatcagttcctggccaggaagctcacgcctcacgttgccgtcgccgacacgtggggcgcagcgcacgcttgcgcccgcgctatcagccgcgaaacagtgatcgtgccgatcggcgagaccgcgcgtgccgtcgaaaaactgcctgtatcgttgttgcgcctgccgggaaaggtcgtcaacgatctgcggacgcttggctttcagaccattggcgaactggccaacacaccgcgcgcccctttgacgcttcgctttggtcccgaaatcgccaggcgcattgaccagatgtttggccgcgtctccgaaccgattgagccgatccgcactgccgaactgatcgaggtcagcaaagcctttgcagagcccatcggggcggcggagacgatcgataaatacgttggccgattggtcatagaaatgatcgacgtcctgcaaagaaaaggcttgggggtccgccgtgcagatctgatcgttgaaaaggtcgacgggacgcgccaggcaatccgcgccggcacagtgaagccggtgcgtgatgtcccctggctgacaaagctcttccgcgatcgaacggagaagatcgagccgggatttgggatcgagaagctaaccttggtcgccgtcatggccgaacccctggaagaacgccagaagtcgtcgtcgctgattgaagacgaagtgaccgacgtcacgccattgatcgacatctacggaaaccgcggccagcgggtttaccgattggcgccggttgcatccgacgttccagaacgatccgcccagcggatcagcgccgcggccgatcctgtgggagccacctggttcagtcattggcgccggccggtgcggctcttggcgcgccccgagttgatcgaggctatcgctttgctgcccgaccgacctccggtctcgatcatctggcgtggcaaacgtcgcaaggtcaggcgggccgatggccctgagaggatattcggcgaatggtggcagcgtgatgccgagatggaggcggttcgcgactactttgtcatcgaagacgagagcggcgaacgtctttgggtttttcgctccggtgacgggatcgacccggagaccgggagccaccgctggttcatgcacgggatcttcgcatgagctatgccgaactccaggtcaccactcacttctccttcttacgcggagcaagctcggcgcaggaactgttcgagacggccaaggaccttgggatcagtgcactgggcgttgttgaccgcaactcgcttgccggtattgtccgggcacttgaggcctcccgggcgacggatttgcgtctcgtcgtcggatgtcggctcgacctagccgacggcatgtccctgatggtctacccgatggatcgtatagcctattctaggctcacccggctgatcacgcttggcaagtcgcgcggtggcaagaacaactgcattctgcattggtccgacgttgttacatattccgccggcatgatcggcattctcgtgccggatctgccggatgaacactgtgcaatccagttgcggaaaatggcggacgtgttcgatgatcgggcctacgtgtccctgtgcctaaggcgccgccagaacgaccagatgcggctatacgagatttccaatctcgcggcgcggttcaaggtgaaaaccgtcgtcacgaacgacgttctcttccatgagccggcgcgccggcagttgcaggatgtggtgacctgtattcgtacccgcacgacgatcgacgcggtcggtttcgagcgcgaaaggcatgccgatcgatatctgaagccgccgcaagagatggagcgtctgtttcctcggtaccaggaagcgctcgcccggaccatggagatcgtccgtcgttgtaaattctcgcttgaggaattgacctatcagtatccggaggaggcgatcgtgccggggaaagatgcccaagcgtccctcgagcattatgtctgggagtgcgttccgaaccgctatccggagggtctgccgcctgaggtcctgaaaacggtgcggcacgaactcgatctcatccgcactatgcgatacgcaccttatttcctgacggtgttttcgatcgttcgctacgcgcgttcgcaagggattttatgccaggggcgggggtcagccgccaatagcgccgtttgctacattcttggtgtgaccagtatcgatccctcgacaaatgacctgctttttgagcggttcgtgtcgcaggagcgcgatgagcctccagatattgatgtcgattttgagcatgaaaggcgcgaggaggtcatccagtggatatacaagacctacacgcgcgaaaaggcagcgctatgcgccacggtcactcggtaccgcgcgaaaggcgcgatccgtgacgtcggcaaggcgcttggtcttccggaggacgtcatcaaggcattgtcgtcgggtatgtggtcctggtcggaggaggtccctgatcgaaacatccgtgaactcaacctcaatccggacgaccggcgcctgacattgaccctgaagcttgcccagcaattgatgggtgccccgcgccatctcggtcagcatcccggcggtttcgtcctgacgcacgacaggctcgatgatctggttccgatcgaacccgcaaccatgaaagacagacagatcatcgaatgggacaaggacgatgtcgaggcgctaaaattcatgaaagtggacatcctggcgctcgggatgctcacatgtatggcgaaagcattcgatctgatccgcgagcataaggacgaggatctggatctgtcgaagatcagacaggaggatcaggcgacctatgcaatgatccgcaaagccgacacgctcggaaccttccagatcgagagccgagcgcagatggcgatgttgccgcgactgaagccgcggacattttatgatttggtcgtgcaggtggcgattgtgcggcctggtccgatccagggagacatggtgcatccctatctgcgccgtcgtgaggggaaagagccggtcgagtatcccacacctgaactggaggccgtgcttggaaagacactcggtgtgccgctttttcaagaatctgcgatgagggtggcgatggtctgtgcggggtttaccggaggcgaggccgaccaactgcgcaaatcgatggcgaccttcaagttcaccggcggtgtgtcgcgcttcaaagacaagctagtctccggcatggtcaggaacggctacacggcagagtttgccgaaaaaactttcagccaactcgaaggctttggttcctatggctttcccgagagccatgctgcgtccttcgccctgatagcctacgcgtcaaactttgtgaaatgccattatccggaagcattttgcgcagccttgatcaactcgcaaccgatgggcttttatgcgccggcgcagatcgtcggcgatgcaagagcgcatggcgtcgaggtacggccggtctgcatcaatcgatctcgatgggattgtacccttgagaggatcggcaattccgaccggcaggcggtgcgtttaggtttccgccgtgtaaagggcctcgccgtggccgatgctgcccggatagtggcggcgcgaatgaacaacgtattcgagactgtcgatgacgtctggcgtcgctcgggagttcctaccgaagccctggtgcaattggcgcaggcggatgccttcctgccgtccctcaagcttgagcgccgggatgcgctttgggcaattaaggcgctgcgtgacgagccgctcccattgttcgccgctgtcgcagaacgcgaaatgcatgcggtcgccgagcagcaggaaccgatcgtcgaactcaggcaaatgactgacggccacaacgtcattcaggactatagccatacgggacttacgctccgacagcatccgatcgcatttttgcgcaaggacttgcaagacaagagcatcgtcacctgcagcgaagccatgaatgcgcgccacggacgctgggtctacacggccgggctggttcttgtccgccaaaagcccggttcggcaaagggcgtcatgttcatgaccattgaggatgaaacgggccccgcgaatattgtggtctggccaacgctttttgaaaagcggcggcgtattgtgctcggatcgtcgatgatggcgatcaacggtcggatccagcgggaaggggaagtcgtacacctggttgcgcagcagctattcgatctgtcgtctgacctatcaaacctcgccgatcgggataccgagttcaagctgcccgccggtagaggcgacgagttcgcgcacggtggcgggcccgatccacgcgacaatccaagatccgtcgtacaggccagggacatgttcgtgcctgatctgcatatcgatactttgaaggtaaaaagccggaattttcagtgatttccatactcgatcgcggatgcggggttcggatccctcaagagagaggctgtatacttggcgcaacatcacggccgagaaaagttgattccggatagtgatctttaaaaatactacgaccgaattcatcaggtagatattttgcgatcctgaactcagaaagtaggtctcgaaagctcccagagactgcggaaaggccattataacagcaaagggcaacctcatggctggtcaactggctccgcaaaatattcccatatctgtccttgtcgccttgagcgagcaattcatcagtttttattctggatagtatagtatatagcaatctatagtacggagcgaaagtgctctcgtaccgatcgtggcatttatctgtataaatttttgcgagagcgcccctagataagtggccactatgtgacgtttcgatctccgcccaatatcttatctcaaactgagcgcgtttgaatgcctccgggccgtagactcgttcgttatagttttcttcttttttccgggtcccaccatcgtactcatcagtatatctaaattctacatcttctcgagcctctcgcagaagccggagtaattcatagaatgtcctctcgaaccgttgaaggtgttggtcctttgctgcttcgtcaatctggcgttgctgctgatggagtgtcagaagtatcgcaatgaacgcgagagcagagaacaaggcgttcaacccgccgaaggcgtctccccactggcccatacgatcgggcgtccactccaagccgagaaccgggaaaattgccggagttgaggcccatagaagccacaaagcgatcgcgatagccgccgctccatacaaaacttgtcggctcatccgaaagtaccttcatagcagatacgatttgcaggttcgtagatcttcatacgggcgtagaccatacagcttccattggcttacttataagaagtgctttgttgaaaggagtccacctaatccccgatcgctatgccaaatcgcgcgatctcttgctcggtgcccgccacttcaagtagcaaatttgcgcgactcgtcgcgacgtatacaagttcaggttcccggatatcttctattccgacgacgaagacgcacggacgcgatagacctttgaaccgccggacggtgtcgaaaataatccgctccggatggatattgtctgcccggcacgattcagcgcctgcgatacgaaacaagcctccttcaacatcgctcgcccgacccgtcaaaacagcaatctggccaggggttgcctggccggaacgcaccagatgtgcaacgcgctcgttgaggcgtgcaaacgccaaatcgggccgctttacgccgattgcaccgacggcttctccttccggtcccgcagcacggttcgacttcccttggtaccacctcgacatgagggcatgaatcttgcgagtattccggagattgcgggtaagcgagatactggattgcggcaaagcgcggatgaacgtgtcgtcctgagcgaaaagccgctggttgtcatcgtagaacacataaaattcgccgttaatatcacgcaggcacagcctgagggcgttgagccagctgtctcgaaaatcttgtccctcatcaatgatgactgtatcaaatccgagttcggggctcgaagtaacggcgtcaacaagagcttccggaagcgaggtttcgaaatattccggaccgctattcagtggaagtggcgttcctgattgttcggcgattgtacggcagattgagtgaaagctcgcaaccatcagattttgtcgatccttgcagagctctttgagatagttggccaagggagcgttgaaacacgtcagtagcgtccgtctaccgtccgctgaagaccggaatgccttctcgatggccagaacagtttttccgcttccagcaccaccggatatcgccatctcacgattgtcctcgagcgagtccaggagccacgcctgttcggctgtcagccgctcgatcacctgtgcatcctcggctagactcgttccaatgtgggcgcgcagttcgaaatggcccgttaccagctcgtccagcgcatgcataccatcgaggccgagtggctgctcacgggcatctccaccttccctgatccggtcaaccagccatttcccgagagtgtccatgtcatcgccgaacgcaatgatgtcgagcggtgcgtcaggaccaagtgcacgcgcgggtttcgcactgcccggcaaaacagctgcatggcgagcgcggataaatcgtcgacccagccgcctgttgtcgttcagcctcttcagaaagtgatgcttgctggtccttgcctgcgcgataggattcttgatcttgaaccggaagccatcccggtctgtgctcagccactgctcgtcttcctcgcggcaactgacgcgcccgcctttcacctcgataaacaggagcccgtactgggcgtgggccagaatgaagtctgcttctccatcatactcggcgccatctgtgtcagcctgatgccaggagcgggaatagtagcagacatagtcgtcaggaacctggtcgcggatacgatcgtacacccggacttccgaagagcgttttggatcattcaggatatgcggggccagcgttcttggatgcatgcgagccattttcagttccctttttccaggagtgtgcggaagaagccgagtgagggatcgaggggcgtacctacaagtagcccccgatcgagatgccggttgaaatgctcgcacgaagtttccggtacgaaggcgcagcagtgacatgcggcagatccggacccctccgacagggacaggatgccggtgctgcagagagggtcggcggagcaccattccatgtcgcgaagcgctgcgacaaggatcggctccagctcgtccgcccgccccttgcgcgaaaggccgcccagcgtcccgtctgcgtcaggggccgaggtgtagagcaggaagccgcacatcccgcctggtcccggtgaaacgtaaagccgctcgcgtatcgaggcagtcgaatatccgctgtcgagcgacagacgctcggccagcgcatgcgctgttgtatgaacaagaagaaatctcggtgagatttccatcgggaagggacggtccgagccattatgctcttcccaggcgcgtttggcggccgcatgagctgccgccgcgcgagctttgacttcctcattattttcccactcgctcacgctgtccggagcgaagttcagaaagataccttctccacgaacctcgatcgccgggagccagttcagcttttcgcgagacaagggagcgacttttgcgttccgatcctcggcctctgccgggctcagacgcgtgaaaccgcgcagtgcacgaacctcacgaagcctgtcgaccgatacaaggttggaaaagtaggtctcgagtgaggcggggacccgctgaggattgatcttgaactcgggaaattcctcgtcccgtcgaggcccggagcaaagcatcatgtgctcgttcaggcggagatcggctgaatcgctcgacagtattgtcagcaaggtctttatcttcgcggtgagctgatccgcggttattgatcgatccggccattcaggatggattttttgacggacataccggggcagctgttccggatcgtcaagctccttcaggtcgtcccaaaaccgctcaaggtcgtcgcggaacgaaccaccgaaggggggcacatccagtgctgacgcaataaccggaaaataggcattggacgcgccgcgctgaatcgccaccggctcgtttgcacattcacaaccctcgcccttgagccaaggttgaagaccatcgcagcggatcttcatggatttgagcgtgccggggctcaaagctccatcgagatctctttctgccgcgcattcggtgcagtgaacccgcaatcccttcaggccggacccggcgcccttgagctttagcggtctcttgcggcacccttcggcatggcggggccaggatgcccacggaaagtcctggagatgtccatccaaacaggtgaccacaaatctgacagggacaacaaatgcttttctggctcgtcgcccgcgacccgtactgcaggcggagcagaaaagttcgggccgatcggtttcctttccccacgagtgactacgttgcagaagctcgcatttagggcacacatgccagtcaggaaaccggtaggcaggtaatagccggtcacgatttacattgttcacccgctcctggcccacaggaggaaggcgaaatcctcgaacgcccagtcgagcctgaagtggttcgtgagagatgcgctggtcgttcaatagcccttgccgggctgaaaactgatcccatgcctcgagccccgcagcgacgacagaaagtggcgcacctccgtcgccgcgaaagtcgataatcgcacccggtccgttgccggaaaggacctggctccgtctgatgttcccgatcggtttcattgtctgtcctctctactgcgggcctgttcgaccagaacaaatggagtcgatgcctcaacggagcgaaggctgttgggtgtgggcctctggtaccggtaacggcttttgtttccccgggcagcagccgtttcggcggaggtcagaagagccggattgtggtcgtcccagtatgaattgagcccctggaaatcgaaccagtcattcaggaactcatccagctgctctcttgatgcgtctgcttcaccggggtctattctgcggacgcgttcgacgatgcggtccagcaaggcttccgcttctctctggtgatcgtcaatcgcgccgggatctgccatgccggccaccagatggcgaaccagtgcaacaaagggagcgtgtaaggccctgtctctggcgcgtggggcgaagggggtaacgcttgtcgcctcaacctctctgtagagactgttatgccagcttgcgaatgtctcgtagcggcttcggtctcgggactttgccgcgttgaagagagtgactacgagccccggccagcgccgatctcggcccacgcggctcgtggcctggatgtattcggcgattgtctttggctgtccgttgacgagcataagccccagccgtgaaacgtccattccaacggagatcatgttgcttgcgagcacgatgtcgacatgctcttcatcctgccagccacgttccagatttttgagatatcgcgggatgtcgtttgagcggacccggctggtgagctcgatctggttgtcggtaaggcgctcgctctcgccaacgcggcgtgcagcatagtcgccaatgcttctcgtgacgtcatcacgcatcagaacgagcgcaccgccgagctcgcgcaacgagttaaagtagttgatcagtgtccagtaaccgtcacggacatgatcctggattgccggatccgttgcagcctgcaggagagtagctgaggcggcttgctgggtgaatttggcagaccggccgacagtactgatgccgacataccggcgtccgggaagcgtcctgtcctcgacggcaaaacccgagtcactgtagtccagaccgggtggcggaaactggaaggaggttctgtcgaaaagcgcgcgtatctgttgggacgcgcgtcggatcgttgcggttgaaccaataacctttgcgcgacgcccgtcggacgtacggcaaagctcgtcaactgcggtttcataaagaccggccaggcttccaagcggtccggagataaggtgcaattcgtcctgtatgataagatccggaggcgccgcgggagtaccgatgccaaacagcttgccagtgtgctgattacgggtgatctgcgcatacttgtccacagtacctattaccagggttggctgccggttgtagacatcttcatcgacagtccacaccgggaggcgctccataccggaagagacggcgcatcccgtggtctcgcaacgcacttccacgcagctgcggtcccgagcaacccgccagtcaagggtcccgtggcagcacgggcaagcgcgaagctgcgccggcgagttctcgctttcaggcaagagggctgcctcggcatccttgacgaaatttggagtggcgccctgacctacccacaagccgagagaaatcggtgtgtcggtcgcgaagtgcgaaggagcctctgcagcaccggcttttgcccggcctttccggatcatttcgcatgcgagcaccagagctgcagcgcgctcgaactgctgtaccgtgagaaggcgaagcgtataacgcatgaaggttgtaacgccgcctccggccggatcgcccgctgcccggagtctgcgaaggaagatcgtgaaagcggtcagcaggagatatgcttcagttttaccaccgcccgtgggaaaccaaagcaggtccatggtctcccggtcgtcatcctcggtccgggcgattgaagacaggcacagaagggcgaaacccaactggaagggccgccatttcagtccgtcgggactggcgtcacttcgccaggagtattgaagggccatggcagcattggccatacgaaaagccgccagggcatttttgtccgatcggacaaggtcgatccccgatctcatgcgagtttccgcagaacggcaggtgcgcatgtgaatattgccctgcccagcgagagccggcggcaaatcggcgacccgccgttccgcctccgttatccagtcgccgtaggcatcaacgaatgaggtcagtcccgagaccagttttacgtcatctgtttctgcgaggacggatgcggacaggattttgtcaacggaacctgtccggaagttgccggcaccgcttgcgctgacaacgtacacggtggattccggaaaccagctggtggaaacccagcccacggtaccgtcagtcggctcatcccagatcgccgaacatgtgtgccctaccgcccattgctgggcctgacgatacagcagggcagaactcgaccgatcttcatcgtccagatcgggcgcgccagcgggagccggttttggcacgaaactgcaattggcctcacaccacaccgtcatctttacctgaaaaagcgcggctttctcattcgcagtgcggctgaccttctctgacgggccggtgtcgttggcgatcgcgagagtaaccagcagtactgatttccatggggcgatccgcaaatggagcgtgacgcccggttgccccttgtcgccgaggtttattccgggaaagcccggttgcgaagcaacatcaaggtcaacaaggatctcggcgcgtcgcgggtctcttttccagttctgctgtttccgtgtcccgcgctccttatcttcttctgtctcgtgctcaacatagcgagcgccatcaacccggaccctcagaacaggattgcctcctgcaggcgttattgcaaaggacagtccagctgtgctcgggcgaaaggtggatgcggcctttacgctatcaagggcagtaccgttgatttccgcatcctcactctcggccgcctcatcgtcctcttctgcggggatcgccgttctcggcggaaagagaataccggtaaggtagcgatcggtaggccggtcagatattacctcttcgggtgcctccggacccatcagatccactttcatccggtcaatcaatgtgtctcgcgcatcggacataaacttgccccctcattaaatttaaccggaaactctggcgaagccgcccagcaagggcatcagtgtcagggatggctctctcgtggctgatcccgccaccacaaccgttgtggcccccgtaatagaaatcccggatacctccggcagcgcggatccctccggggctctgattatgtctcgaagcacgtcagtgaattgctcgccaagtacgccaatcggcgttccgtcggaatgcaaccgaaccagtaactggtcactgctgattggcaccgcatccgcagtcaatcggtcagctgacgcgcgccagatagagtcgagaacatcttgtggaggcgcaccgtggccagatttcataaatctgctccattcgatgaggtctccctcaaggccgatttcaatctctcgataatcccgtcgcgcccgccagtgtcgttcgggagtcccggctgtgtagaagcgacctgtgggcgcccatcccgtacgaagctcatcgctggcacgcgtggccgctacatagaggatgcgtgcctcctctgaccagtcaacaccttcctcccggcgttccgcgttaaacagaaccaggacgcgatctgactgtcgccctttaatcgagtgtatggtcgacagaagcggcccggacgttccctcatgatcactgattaggtctggtggtgggaactcaagcccctcggcgattcggccaacggcaagctcgctgcggcctgtgtcgtcgagctcgcgcagaatctcccagcactcatcgggcgatcgggaaatcgaggctcggtaacccgcatagatctggccgaatgcttctctggtcagtcttgtatccggagccagtccaccgaggcaggcgccaatccatggttcgatacgcaacggcctgtcgttaaggcggatgcgaaagggccttttcttcatgcgcatcgcttctgcggcttcaagaaggctcgaccggtaccgggtgaggatcaggccgcgggaggttgacgggtgtccggtgtagtcgcgaatccgtgtttccgaggcgcttttttcaatcaggtcacggagttcgaaatatttgtcccgggttacagggtcgtgatcgcgaagaaaatcgcgggctgaccggaagaacgaccgaaggctgtttgttctggcgcggtgatccgtcgatatccgcatcatgcgaaattccgataactgctggacatgatcaagaagcgtatcgttctcgttccgggagctctggtatccatagatcgcttgggcaaagtccccgaacactgtcaccccgcatttcggatggacttcattgatcagtgcttcacaaaacgcctttcgcgatccgacaaggtcctgcgcctcgtcgatgattacgtgttcaagcgggtcgatgagatttcccacaagggggtctcgcgttcgcaaaaggctcgccgcagcctgaacggtcgcaccatgaccgcctgccattctggcgccggcggccacaagtaatcgtgcagcatatgaatcgaatgtatgtatctgcaccattgcgacgccagggatggatgaaaggcgattcttgatcctctctctcagctcggcgactgcaacgcgggtaaaacttaacaggacaatccgggaaggcgccaatccttcctccacgaggctcatcacgcgctcggccgcagtgttcgtcttgccggtgcctggtcctgcctccacgacaatgcgctctgtacagcctgctcctgcgacaagcttctgctccatgtccgcggtaaattcagcttctgtttctttcttcgacgggacaccgaaccactctctcaggaaagaagcattatgctcccctatcgaccatgaggccgagcccggattgaagctgccgcagagcgaaagcacgatgatggttggcaacggaacaacctcaccggaagggatttgcccgtcggcggtcaggaagcgtgaggagacctctgttgtcgttcgccgtgtttcaagcaaatcaacaagtgttgcggtcgcctgtccggagactgtcgggaaaagctcgtgagggccgcgattgattgtctctccatggtcgccaagcccgataacccgaccgtcaggtagcgcaatgcgctggtgcggcactgcgacaagaactttctcaccatgcatcagcccagtgccgatgtctccggctccgcaaagtacatccataacagattcaattaccggtcggcatgctgcacgatgattttcaccgacaaagctcgagatccattcgcggacagaatacctgctgaccccccttcgagccctgaccatggcgcgaacaagatcggcgataacaccccggtcgaactcgttgtcccgatagattttctccagtcgggcaaggtaaaaggattttgattccaagggctttactcagcaaccacacattgcgaagattgtctgccggagtgattcccgtcaatgaatttcagttggtggacgcacaaattgtcactcatcgccagttcgacgttgttggaagcccgccatgccggttgatacgcacctgaaggattgccatgaagcgtttggtgatcgcttcaggcaactgtcagttgcccgctcaggtctgccggttttcgcaatcgagcatggcctcgacgctactgccatgccggtgctccgtcggcaggtttccagacagctggaaattgatccggacctggcaggagtgggttggggcgtcagctaccttccgcttgtcgttatcgcgactgaggtgggatacagatatcgtgggaccgggactgatttctggccattgctcgcgcgagatcttgaactcgatgtgcggtcaatttctcctgcgaatctgtcgcatctcttcgaattatcgcaccggaaatttggccttgcccgacccggcgacagtccctgggaacaacacttcccccacatttcctggccgatcggcaatgctgcagttccacttgaggtgcaagggccgctcgcctcggctttaagagccgctgtccgggccggtatttccccggacaacaaggatactcttctcggctatgtccgcaatgtcgcttcggggcagtcgggtcgacgttttgaaaactggttgcagcgaagcgatctgccgcgcgaggtgatggcgcgactgcttgaccccgctgcagatggctggcttaccgagatgttcgtccgccggctggacgcagacgtgcgtcgcgatgtcgagtcacggcgggctatcggcgaagcgaggcgcctgaccgcgcgaagatccgggcggcaggctgaggttccggcgtcgagattcctggttgcgctcgacggcgatatcgtcgtcaggctttcagtaagagggcctgtcctgactgctgaacttcgtgatcaggttatcgctaccctgcgaatgcagggagattttctcggcactataatgtcacgggacgtcatacagcttcgccactttctggcggggggcgagctggatctcggtacgaccgcagattggcccgattcacccttgcggcgcggggatggagcgacagccctttcgtcacaggccgcacagctcatggacggcctgcagcctgaacagacagaatttttcctgctgcaaaatgaaacgcaagcagccgttgcactattgcacggtgagcagatcgagcaagattcaaagattgtcaggatccggaatgacggcgacggcctgtctatcatccagaggcttgacgcatcttcgacaaaagatgtcgagatactcagaaagcacggtcggagtgtgcgtagtggccgccccatcgtcttgtcgggattgcccttggcaggagctggcggtcacttcgcgaccggctttccggtactggcaagaaaaacatccaatcagacagcgctggtacttgatcagaaagctgccgcgaacgactgtctggccattgatggatgcgaatgggcaatattcatgcctgagaccggagagcatacagtaggtccggaaggttttgatgaggcttcccacctgccgttctggatggtcgatccgcctgacatcgacgcggcgagtattgccctccatcccgccggtgccacgcttaccgacctgattgaaggaacactggaaatccggatccgggcgcctctgccgctcgagaatgttcaggtccagattagacttgtggtggctggtgaagaggatctcgtgtcggaagacacgatagaccggttgccagtccacatcgccggacgcatgcccctgctcagggatctgagaacatcgctgacaaagcgaggcatcgcttctgcagccgccgcgtggctgcaagtacgtctggagggggtgctggcagagcagtttgcgcttctgccgacgacacatcttttcctctacgatgagcaccgccggtcgtggagcgacgcgcaggacagcgagcgggaagtcgcctcgcgggtggcaacgctttcaaagctgtttccgtcaaaatcggctcctgccaatgatgaattcacgctgcttctccctgacagtgaaaactggggagctctcggggcaggcaagatttttcatcggaagaacctgtttcgtttggggcagacggcatacgtccagcctcaaactcctcgcacagtgagagaggcaacctcaagggatggtgttcccggtctcgatgagatgacaggcgcctatcttgcctggcgccttgcagaggccggcgatccggttgctcattggttgcagcataagggtgctgacagccttgaagccggtctggtgggtctcctctgcggggacaggtggcgccagatcgaggagcgcctgaacctttcagtcctctcgcccgctggtgcactctacgtgagtgcggaacgatacgggcttctgtccggcgacgatctgccatcggtcgtacgctcgcctgatgctgactttcttgctcgaaggatcaggatccgtctccatcaggcaattccggatcacgagactgcgatagccgaatggaatgacgacctcggaggcgagctcgatctcgctgtgatcgaagcctatgaggatttgcgcaagcacatgcttgacgagggtcgcgatgccttcgaagagcctgacatgaagcgggacgcgcgcacatggttgcttgcgctagagcgtgcgcgcgacattcctcgtctgccgatgttccaggcgcatgtccttccaaactcgaggtgggagtcactttccacgttttcttacgaaacggctaccgaggatgagatcatcgatctgctcgacagctgccatgtcgacgcttttcgccgacctggactgcgctggatcggacggccggagctacgagcaagtctggaactgtggatctcaccacgaagccttctcgaggcgggagaatggcagcgatatctggcaaagagcctttccgacatgcagacggcgagggcggtgcgctacgcagctctgaggcggaagctgtcaagactcgatttccctgaagaaagcctggtttgatggatcactacctgcgttttgtgaattgcgttcaggcactgaggcgtcgaactgaagcactggcggtcgcgatgggaggcgctttgggtgttgcagccgatccgttaccccaccagatcgcgacagtgcgtcgcgtgctttccgatacagatgtccgccaccttctgtctgacgaggtaggccttgggaagacggttcaggcgctgatgataatgaacgcgctcagatggcaatacccaaagcatcgagcattgattgttgcgcctgacaacctgctcgcgcaatggcaggaggagtgctggatacgtggccatgtcatgccagcactggcaggtgtcgcctctgacgaggattccgaaaagacaccggttttgctcgcgaggcctcgtgacctagttcgtcgtccaggagaggccgagcgggtcgtagagctcgatggccgcaagtttgatttgcttgttgttgacgagccccagaccatgccgcgggagattgtacaaacgatctcccaagctgctgacggcttccgtcaggtacttgtcctttcagcaaccccgagactgggcgatgcagcatggcgtgatctgatcatgcggatggtcgagccggcgtccgccttcagggcccgctttgaggatcgcgcgatcgcagacatactggctgaccgtgagactcaggcgcattcacgacaggatccggatccttccggaacctatttgcagtttgcagcaacgcgcagggttatcaggaatggcagagatggctggggagcctacctcccggtaaggcgcaatacacaggtcctgatccagccactggcggcggaacgtgaacgtcatgaaattgctgcggagttgcttgtcagcaatgatcgcagtggggatatgcaaggtcgaccctggacgtctgtgcgcgctttgcaaagaagtgcccgggccgcaagagatgttctcgcggagattgccagccaaggcggagcgctgggtcaaaaagcggagcgtgcccgttccgcatccctcgatgaccccggtgacagcagacttgaggccttgctcgatcttctatccgaagagtggcaaaaagacacgtcaagagcctttatcattgtctgtggggacaatccgacaatcgatatgctgagaaccgccctcccgcgttactttcctgatctgacggatggcattggtattctgaggcggccggccactgcagaaattgaggccgttacgaatttgcgtgaggtccaggagacactagcgccttttctggatggatcgacccggttgctcctcgtcggggactgggtgcaagcggggctgaatctgcatcacgctgcaagcagcgtcgtattttattcaatcccctgggaaatggagagcatcgaccagttgatcgggcgcgttgaccggctgggctcggcatccaggcgcgagagacggcaaagacaggttcgtatatggcaacttgtgcacgagggagcccaggaggcggcgattgccaatgttgcgtcgcagctgggggtttttgacgcgccgttgccgccgctgtctgatgatgaacggaaagccgtgtatgaagtcatgtcacaggccgccatccgccgcactgcgccccccgggcttgccaagataaaccctgcatctaccggccttggcacatcccttcaggatctggatccgtttaccacagagaacgcaatcgccgacttcgaagcgtggcaaaaacagcctgtcgttcaaccggcgatgctgaagcgaaaggtacatgggcagatcgagaattcggagggagcgatgcgctcctggctcgagatcattaccagatcaggtgactttgaagttggaaccaggcctgacgggcaggatcccgaattccggttcggaacgttctggtactatcgcatgaacgggagggggcgcccggcctacataccgttcacccttcccgggaccagggccgagaactggatgtcggatcaccagccctatattatccaccgctcccggataccgtcaccgccacggaaaactgtggtgacagataccggagaagatgctggccggcctctacactttctcgatcatggcagttttcttcatgatgcgctggtcgagggatacatttcggaaggccgaaagaccttcgggagagcccagcctgtcgttcattccacggtgacgcttcccgaaggacacccggcgaaagggcagcctccgacgatggtcaccgtggtggactttgatccgttccctgacgaaatgctcccggggctatggtctccggctgccaaggcaatcttcgcgactgctgcatcagatacccagcgcgagagcctggcggacgatcgactgtctcttcatttcatggcgcgcgctgctcaacggtgggttcgtctcatggtgccagcgcaactttgcaaggttgcgtcatccgagacggccggaaagtgggcggatgtcgcgcctgacaaaatcgatgcaattctgaggccattggtgttcggggagcatgtgcaatgcgcaaaagggcgcacaccggtcaggccgctgttgcggtccgagattgctggagcagtgagacggcagcagattgacacaatgaatatcagggtcggagagctggatgatgaggcgcgaaccatcatttccccgcttattcactcattgcagtccagactagcctttcattgggaggaagaaacgcgaaaccgtgaactaatgctagaacgcaggaaaagcgcgccgatggatgccgggccgcgcgaactccggctgggccagattgccgcgctggaacgatctctcgagatgtcgcgcctgtgcgagcacgagagtgcgaacattctcagcaacttcatggcaatgaagcggtcgcccgagctcgtaaggcccttgaccatcgtggttgcgttcgcggagcaggcttgaaagcaagtggcctcccttatcaggtgagttcaaaacaaggccatacagacagtctcttttggtcccgctgaagcgagggcctaaccttatgaccgcgccacgagcctaaagttgtctggtttttgagggcacaaggcaatgcggtaggactatcatgacagccgacgtgaaatctcccgctatgacagtaatattgcgaaccacccgggagcggctcccctagtttcggaaccggtgggttgagcgatatggctcaatgagagcaacgctctccattgtctggatgttgctccctgagcaggagactgatacgcgagaccgggacatttggcaggaggtttcgcatggatatcgcattgcctgatgggcaatatcctttcattgatcggcgttacccgctcgacgagctcgtgatgatcgagatgccgccagcactggaagaacttctgcgagcccaggcggctcgaaacgggactccgattgtccgaggacaccctgtcgagttgcggtgtcagtcggacgaatatcctgacgcgactttcatggtttactggccctttgaggaagatcgcctgcatatgctcgcgccaaaggagttttcgaaggggcgtgcgtgattgcgcgcatgactcaatttacctgtgcaagccttatccggtgggcgaaaaacaacggaacattttgcgaacatggcttgttgtctgggaagatttttgtcagtctggcaaaaaaagtcccagacaatagcaggtgattcgtgcagcagacacaaccggacggaaacgagttcaatcatttgtgtcagcgggcggggcttaccccgagcgaagcaggtccggttctttcggtttcggatcgtaccatcgcccggtatgtgagcggaacgggccgcccaactgaactggcgataaaggtcctgaaagaacttggcgacaagcgttgtggggccaaaggcccgatttcgtttcgttttatcgaccttttcgccggtatcggcggattgcgggtcggattccaggggattggcggccactgcgtattcacgtcggaatgggatgccaacgctcagaagacctacggcgtgaactttcgcgacaatcatcatcttgcaggagatgtccggcagtactccgaagcccccgacctaatccccgaacatgatatcttgcttgccggcttcccgtgccagccattctcgatcgcgggtgtttcgaagaagaatgcacttggtcggcctcacggttttctatgcgatacgcagggcacgctgttttttgataccgcccagatcatcgcgcatcatcgacctgcagcttttgtgctcgaaaacgtcaagaaccttgaaagccatgacaagggccggacgttcgccacgattatcaatgtgcttacgaacgagcttggctatcacgttcagacacgagtgatcagctccgagcactgggtaccacaacgccgcgaacgtattttcattgtcggtttccgtgagccgaccaacttcgatctgaaatccctcaagcttccgggaaatggaccgaaacttggcagcattcttgagcctcatgacgaggtcgatccgaaatacaccctgaccccgcgcctgtgggaatacctgcaggcgtacaaggaaaagcacaattcgaaaggcaacggcttcggctacagtctctttggccctgatgatgtgacgcggacgctgtctgcccgttactacaaggatgggtcggaaattctcgtcgcgcaacctggcaagcgaccacgtcggctgacgccgttggaatgcgcccgtctaatgggctttgaccggggcgatcgccgctggaaaataccggtttcagatacccaggcctaccggcaattcggcaatgccgtcgtcgttccggttgtagagttccttgcggacgcgatgaagccatttatcgagtccgcgttgctgagaggcgccggccgttcattggcagcgcctgtgactgtaactcgccccgaccgggagccggtaatcgcgcatggctgacatcgtcacggctgaagttcgcagccggatgatgtcaggtatccgtggtaccaacacgaagccggaacttctgctgcgcaaagggctccatgcactggggtttcgattccggctgcatgaccgttcgcttcccggaaagccagatattgttcttccgcgctacaacgcggtcatcttcgcgcatggctgcttctggcatggccacgattgccacctgttcaaatggcctacaacccgcccggagttctggcaggcaaaaattgcgcgaaatcgtgccgtcgatgagcgaacacatgcagttctgacagaggccggttggcgccaggcggtcgtgtgggagtgtgccctgaagggcaaaacgcgactacctctcgaggatgtcattcagtcatgtgctgagtggctgagatcggaccagccgcgactcgaaatcaggggagggtagaaatgcgccgcgggcttttgtcagatctcttcaccggagtcgtcgccaagcgtttgacgctggtggaaaccatcacgcaaaaatccaaccagcacgagtttcagggcacgagaccacttcgccggcttctgggtgacgatgatcgcagaggtatcacgacacgcttcatctggatatccggcgagcaggaagccttggcggaagatggcttcatgagctggtctaatgtccgcaaaggaaagccgcgcgcaccggagtaccacctctactattcctcaaacgccgtcaccgagctgatgcagcctggcgacatgctgtttctggctttgcagcaagatggctcgatcctcgtcgttgtaacgccctctgctacaatccagaaccagctcgtctggttattcgccctggaggagcagcccgaattcgccttcacattccaggggatcgacggcgcacataacgccgaactcgattttgcagcgcgctatattcttgatgagctggggatcgagccggaggagcctgaagccgatcggctcgatagtcttatcgaacgctttggtctcgacttcccgaaaacacgtgtgttttcggagcttgcgcggacatcgatgcccgaggtttcggctgcagataatccggaccttgcgctgatctcatggatggatcgcgaggagcagcttttcaaaaggctggaacggcgtatcgtcgccgcacgtattggcagcggctttggtgcgcttggcgacgcagacgttgacggatttctggcgttttcgttgagcgtacagaaccgacgaaaggcgcgggcgggacaggctctcgaaaatcatcttgaggcagtttttgccgcccagcagattcgatacgttcggggcgcggaaacggagaaccggaacaagcccgattttctgttcccggggcagaatgagtatcgtgatccgctgtatccggaagcaaggctgacgatgctcggtgccaagtcgacgctgaaagatcgctggcgccaggttctttcggaggctctccggatcccggaaaaacaccttcttacccttgagcccgggatatcagaaaaccagactgacgagatgcaggccaagaagctgcagctcgtcgtgccgaagcggttgcacgatacctaccggctgacacagcaggcgtggctgatggatgttgccgactttatctctgtggtgcgatctcgtcaggagacctgatccactcgcttggaggtcagcaactgcgtgcggtcgcactcacacaggccggcatacggaacgtgccatgcggggtcagtcggtcccgcttctcgtgcgaccgctatgctgaagctcctgcggctgacctgttcccgcatggcccgtgtcgagaactcccgaaatcccgcctgccgcggcgctatgctgatttctccggtattcttcattgttcatctgagcgaccgcctgcaggcggtcgaggcaatccgccgtacttcgattggtacctgtcgccaggtgccctccagtttttgatgaactccagaggatctatgctacccatcatctgacgagcaagcttcacccgctcctttaggaactgtctttcctcttcagttgcctcggccagtcgatcctcgacatcattgaagaagcgttcaaggaccattgccttaccccagctttcgatgatttctgcgagttgctgctggctctccttgatcgcctcggcaatcttgcgctcatcttcgcgacgttcgtaacgctcccactcctcctgccgctcctttttccgcttcgcctcggcttcgtcttcagctgtcatcagcgcttgcagtttgtccctgcacgcctgcaaggtccggagaatctccggaattactcccgtcagcggttcagattcagtatcctgccatgacagggtccagtcgacgcctctcttgggagagtaggccacaatgcggaagcgtccggagggcatgtcctgttcggttgtccatgagtgggtcagttgccaggatttcatcgaccggacgagcttgctgtcttctcggtagtattcgccgttcaggtatcgcatagttacccgttcggtcatttcggtgacagcgaggccaatcgggacgttgtcgatgtagactattgtcggccggtcaggtccccagatactgcctgaatggtaacgaccgtatttccggtccttgcgctccacctcctgctccttgatatgcatgcggtgatggttttctccagctgctgcaatgtgcacgcgatagccgaggcggtcgagcgcgaggtagaggtgatttgcgatcgataacgcgcgagaaagtgatgcttccgatgaaattacgtcgggcagaagtcgcttgtaggggcggagaaactctccatcttttgcggttcgcgacttcctaagatgcgcttctgcaccaataagcaacgggtgatgttcgagccggcgggtctttgcagcaggctttggcttaagtcgtgcaccggcatccgtagcaggcgccctcttttcccggggcttcggtgtgaccggaatgatttcgattatgtcatcagtgccgtcgggcagggcgggcagctctgctgcaattcctagtgatttgcgtgtccagtaccctgatccgggatatggtacctgatgctgcctgcagatcgcggccaaagccgtccctgtaaggccgagctccggagcaagcttgcttaatggtgcttcgcacacccggttgtaaagttcgcttcgtgtcagctgcaaacgccagctcctgttttgccaggccggatatcgtagctctgtgacacgatggcgaacgatagaggcgggtcacggaaaaagtcttgtgtcccgtccaaccttgcgcgtcgcggaaccaaccggatcctgtatttggcagcgcatgctttatatctctctgctgagagcgcataccgttctctgttgttctccagtttcccttagatttgccaggcgggcggccacgcatgcggataatagcactcgagcgcaccggcaacacgtagcgccacatcctcgcgatgcggctgcctggtgacgtgcaggccgatcggaagcgtgtcaagggaccaagtgagcacgcccacgacacgccccgtggaacacggagcaaagtgacttgtgaaagtcggtcccgcttcttttcgggccgctatgctgaacgatatgcggctgcccagctccagcaccttgcacggtgagaattcccgaatcctgaccggcggccggcgctacgctcattcctccgatgcccttcatctttccgaatgcgctggggtcatttcactcagcctaggcgtaaagacaaagcctgcatgcagctccgtccatttcggttccgagccgcaccgctgagggggcgtactgtggccgaggtttcggaccctcgtggaagtgaccgccgtgtccgcgcgcctacatgtcacgccctgtatgtctgttgcgcagggccggcttgtggtcgtcagcctttcgcattttatagaaacggttgtcgccgacgcacgccgtcatgtcggatcgacggaaccagatcgcgcggccgcacctgagcggcgggttacccgacgtgaacacgatctgctcatcgccgcgcatctgcatgacttcgtagggtaggatcagtggacggcggctcagctgcttcgatctcgaaagcgacgagccggctgactggctcgtgcggctgacctgatcgacttcgatcgtggtctcgccgcagcgccgcgacagatagtcggccgtctccggatcattgattgcggcaaaggaaatccacgatgcggattcgaaccatttcgaactggcgtcacgaccgccataggcttcgcgcatctggccgatcgactggaagatcagcgtcaggctgatcccgtatttgcgtcccgcatcccgcgccgtttccaggatgcgcaggaagccaagccgcgccacttcgtcgagcaggaacaatgtccgcccggcggtcttgccattgcgattgtagagcgcgttcagaaacgagccaatcaccacccgggcaagtccgggatgggcttccagcaccttgagatcgagcgcgataaagatgtcggtcttgccgtccgcaagctctgcagtagagaagctgtcgccggacacgagtgccgcgtagttcggataagacagccagtgggtttctttgaccgcattggcataaacaccggagaaggtttcgggcgtcatgttgacgaacacggcaacattctccttcacaaaatccgaccctgatccctcgtagatccgcgttagccgctcgcgcagttttggctccggctcggacagattggcccgcacctgccgcagcgtctggtgtttctcatcggtattgccggacaggcatacgtcggcgatcagcgccgtcagaagctgcatcgccgaggcacggaagaaatcgtcacgggccgaggcggcgcgggcgttatcggtcatgatccaggtggcgaccgcgacgatatcttcttccttcgtcccaccgaaacggccgatccagtcgagcgcgttaaagccgatggccggcgtctccggattgagaacgatcaccttgcgcccggccctgcggcgatgatcgatgaccatcggcgccacctcgctggacggatcgagcacgacaagactgctgccccatttgagtgcggtcggcacggtgaccgatgtcgtcttgaagccgccggagcccgcaaagacgatgccatgcgacgagccgaacgacccgtcgaagcaaagcaaggacgattgaccaccggccccccaggtttccggcgtatcggcgcgaaacgctctttccgccacgctgtcacggtcgacgcggtagcgttcgccgatcacaatgccgccgctgtcgggaaagagcctggtcgcctccgtcatgctcatccagtcggcgtcgccatggacggcgcgcattccccgcaaccgccgtggctccggctttgcgaaagcggcatttcctgtcagcacaacgcgcgttgcgaagatgccggacaggatcgccgctgcagcaccgatcccggtcaccggatcgagataggcaaacacggattggccggccggcacacggcctacaagaccgatcagccggattgcctcgcgcaggagcgcgaccagaatgacgcaaacgctcccgacgacgacgctccagccggccgccttgatctgcgatgaaccgttcgccgcgaacaatgccatgacgccgataccggcgccgatcgcatagggaagcgtcaggccgatgcggccgagcacgagctttgcctgtgccgtcttgccgaaaccggcgagccactgctcgatgcctgggatcactatgacagcgacgatcatgctggccgccgggatcaaagccagagcgagcctattcaccgccatcgccgaacgcctccgcaccgatcgcagctaggcgttcccgctctttctcatcacctcgaagtcgactggctgcatcgatcagcagtccaagcaacagcgcccttttctcgtagcgcagacccgccttgacgatcaggccgccgagctcgatcttttcccgcgcgtcttttcttcgtgcctctgtcgtcatcgctttcgccattcgctcaaccctcgccagcgttgctctgagccgcgccagtctcgaccgccgcggtttggctgctgggggcgctgcctgtccctgccctctccttcccgatcgtatttgcttttcctccgcgaaaccgtttcgccacgtcctcgaacgcggcctgcagctcggtctcgtcgatctcgatctcgccaaggcctgttttcagggcgatccggccaatgcgttcagcatcgcgtgtttccgcctgcttcagttcttcctgcaggcgcgcgagcttttcccgtatctgcgatgtcgattttctcattcggttgccaatccttggggtctctggtgttgcgtcagcagcaccagaatcctccgattgggccgtcaggccaaggtgcagatctgcatgtcggcaaagccgacgccttcgggcatgatcccgccgctcggatagagcggatccaagggcgcaattatacgtcgctgtcgcgacgtggcgtttgccaccctggcggggccgttcttccgagcagaacaaggttcgaacggaaggattgagtcgccgtggccattgcccatttctccgtcagcatcgttgcccgcggctccggccgcagcgccgtgctgtcggcggcctatcggcattgcgcgaaaatggagtatgagcgcgaggcccgcaccatcgactacacgcgcaagcagggtctgctgcatgaggagtttgcgcttcccgccgatgcgccggactgggccaaaagcctcattgtcgatcgctcagtatcaggtgcgtcggaagccttctggaacgccgtcgaggcttttgagaaacgcagcgatgcgcagctcgccaaggatctgacgatcgcattgccgcttgagctgacggccgaacagaacatcgcgctggtgcgggatttcgtcgacaggcatgtgctggcgaaaggcatggtcgccgactgggtctaccacgacaatcccggcaatccgcacatccacctgatgaccacgttacgccccttaagcgatgacgggtttggcgcaaagaaggtcgcggtcctgggcgaggatggccagccgctgaaaaccagggcgggcaaacaagtctacgaactctgggccggtggtacttcggaattcaatgcgctccgcgatgcctggttcgagcgtcagaaccatcatctggcgatgaacgggatctcgcttcgtgtcgatggccgctcctacgagaagcagggtattgaattggagccgaccatccacctcggcgttggcgccaaggcgatagaacgaaaggcggcgacgcagggctctacggccgagctcgaacggcttgagcttaacggccagcgtcgcgcggaaaatacccgccgaatctcaagtaacccggctcttgtgctcgacctgatcacgcgggaaaaaagcgtcttcgatgtgcgcgatgtcgccaaggtcctgcaccgttatgtcgacgacgccgccaccttccagcagttgatggcgcgcgtcctgcagcatgccgaagtgctgcgcctgcagcgcgacaccatcgattttgcgactggggaacgggttccgtcgcgctacacgacacgggcgatgatctcgctcgaagcggagatggccaatcgcgctttgtggctggcgcggcgatcctcacatggggtgaaacagaccctcctgcaatcgacctttgcccgccatcagcgcctgtcggatgagcaaaaggccgcgatcgaacatgccaccggtcctgcccggatcgccgcgatcgttggccgcgccggcgccggcaagaccacaatgatgaaggcggcgcgggaagcgtgggaacaggccggttatcgcgtcgtgggagcggcgctcgccggcaaggcggccgaaggactggagaaggaagccggcatcaagagccgcacactgtcctcctgggaactgcgctggagcagaggccgtgatggcatcgatgcgaagaccgtcttcgtcatcgacgaggccggcatggtcgcctcgaagcagatggcgggcttcgtcgaagctgttgtcgaggcgggtgccaagctggtgctggtcggcgatcccgaccagttgcaaccaatcgaggcgggggccgccttccgggccatcaccgagcgcatcggatatgccgaactggagacaatctatcgccagcgcgaagactggatgcgggcggcgtcgctcgatctggcgcgcggcaatgtcggtacagcacttgccgcttatggcgcgcaggatcgggtgcatggatcaaagctgaaggcggaagccgtccaacacctgatcagcgactggaaccgcgattacgatccggccaagacgtcgctcatgctcgcccatcttcgccgggatgtgcgcatgctgaacgatctggcgcgggcaaaattggttgagcgcgggattgttgccgaaggtcatactttccgcaccgctgacggcgaacgccgtttcgacgccgatgaccaagtcgttttcctcaaaaacgatacaaccctcggcgtcaagaacggcatgctcggcaaggtcgtcgaggcggctgagagcaggcttgtggtctcggtcggtgagggcgagcaccggcgccaggttacagtcgaacagctcggctataacaatctcgatcacggctatgcgacgacgatccacaagagccagggcgccacggtcgaccaggtcaaggtgctggcgtcgctgtcgctggatcgccatctcacctacgtcgccatgacccggcatcgcgaggatctgcagctctactacggcagccgatccttcggcttcaatggcgggttggaaaaggtcctgtcgcgccgtaatgccaaggaaaccacactagattaccgaaatagcggtctctatcgccaggcgctttcctttgccgaaaaccgcgggctgcatctcatgcaggtcgcccgcacccttgtgcgcgaccgggtcgactggacgctgcgacagagggacaagatcgtcgatctctccaaccggctccgtgccgtcggcgagcgcctcggcctcgcccaatccgccatccagaaacagaagaaggagcttgcgcccatggtggccggcgtcaaacagttcgcattctcggtcaacgacacgatcgatcagaaacttggcgatgatccggcgctgaagcggcagtgggacgaggtctccacccgcttccgctatgtgttcgcctatccggaggcggcgttcagggccatgaacttcgatgcgatcctggcggacaagcagaccgccaaagggggcctcaagaaattggccgaggagccggcgtcgatcggcgcgctcagcggcaagaccggacttttggccagcaaatcggaaaaggaggcgcggcgtgtcgccgagctcaaccttccggccctgaagcgcgacatcgaacgctatctggtcctgcgggagacggcgcgcgccgggatcgagatcgaggaaaagtccctgcgtcagcgtgtgtcgatcgacattccggcattgtcgccggaagctcgaaccgtgctggagcgcgtccgcgatgccatcgaccgcaacgacctaccggcggcacttggctacgccatcagcaaccgcgaggccaagcttgaaatcgacggcttcaacaaggccgtggctgaacgcttcggtgagcgaaccatgctgaccaatgccgctcacaatcctgacggacccgtctttgaaaatatggcgttcggactgcagcccgccgaaagggacagcctgaaggaagcctggccagtgatgcggacaggacagcagcttgcagcacatgagcgcacgaccgcgactttgaagcacgtcgaggagctcaagctgtcgcagcgtcagacgccggggttgaaacagtgacctcatgtagaaacatatcgcgtcggatcgtgctgcttgttgccggatcgatcatcggcctcgcggggctattcgcaacggcgatcgtgggcgggtttcggctgaacctgacgccgagcgagccaatcgggctttggcggatcgaggagcccgacggagcgattgcgacaggcgatcttgtctttgtctgcccgccgcaaataccggcgatcgaggaggcccgtcgtcgacgctatctcgcccggggcctctgcccgggtggccttgcgccgctgatcaagatggtcgccgcacttcccgggcagcgtgtcgagatcggcgatcatgtcgtcatcgatggccaggcgttaccgtcgtcaagcctgcgccgcatcgatggcgccgggcgtccgcttcaaccctttgtcggtggcgtggtgccggcaggcacattcttcctgcactctcaattcaagagttcctatgactcccgatattttggacccgtccccgcaaccggcttgctcggtcttgcgcggccaatcctcacatttgatccgtgaccgcatgcgttcggtactgctgattgccgcgtcgatcgccatcgggacgatcggttggagcggcttcgtgctcgctctgccctttgccatactgtttccggtggtgtgggccttggcaccgtcgcgcttcgtcgcggcacttgtgtcgctcggctattttcttgcggcctcgcgcggtctgccccagggcgtggccaattattatgccgccgatctctggccgggtctgctgctctggctcgtggcgtcaatgtcgttcgtgaccgtgcatgcggcactgtggacgccgcggcccggaaaggctcggaccgcacgttaccttgtcgcggccgtcctgctggccctaccacccttcggcatcaccggctgggcgcaaccgattacggtggctggtgtgctatttccgggatggggatggtggggactgactgctaccgctgccggcctcgcaatgatgacattgcgttcttggccggcagcagcagcggtcatgctgagcctctggctctggtccgccgcattctggacggaaccgaaactaaccgagggatggagcggcgtcgatttggaattcggggaaacgctcgggcgagatccatcattgcagcatcagcgggccctgattgccacagttctggcgcaggccgatgacgtcacgcgcattctggttcttcccgaaagcgccctcgggttctggacgccgacggtcgagcgcctgtggcgcgatgcgctgcgcaatcggaacctgactgtgattgcgggggcggcggttcttgaaggcaatggctacgacaacgttttggtggcgatctcggcgcaaaaagcagacgtcctgtaccgggagcggatgccagtgccaggatcgatgtggcagccctggcgagccttcaccgggaactctactggcgccagggcgcacgtcttcgccaatccggtcgtcgagatcgatgataccgggatcgctcctctgatctgctacgagcagctactggtctggcccatcctgcaatcgatgctgcattcacccaaaatcatcgtcgcggccgggaatggctggtggacaacaggcacctcgatcatggcgatccagcaggcgagtacggtggcatgggcaagattgttcggtgtgcctctcgtcgtggcggtcaatagggaggcgaaggaaaagtgacatggtcgatgctgcgctggtcaaggaatgtgccgatccgtcgctgaaaccggcaatcgtcgagaaatttatcgcttccgctggatcggatgatcccctcgcggtcacggtgcgcgctggcaatcgcgtggtgctggtgccgaggcctgaaacgcctgaagcgtctatgacgctgatccgcgacaatatcggccgcaatgtcgtgcgcgtcggcttgacccagtatcccgctgggctcggcgtgctcgaagctggcgtcctgaagccagatctggtcgatgcctgcgccaacctgcgcatgggcacggcgctgtttgccaaagtctatcgtatcgtcctcgaatggtatggcaacccaaccggcagagaggcccaggcccaggttttcgaggatgccattctggcgtggcagtcgggatatttcgaaggagaggcggtgttccgcaccccaagcccggacgaaaagaacaatgatgcccctgttgggccctctccggccgatgcgtccgagaacgcgacggacgagtccgacacagaggaccgagccgcggtcgcgggagatcaatcatccgaagacccgaacaaggctggcatccgtgtcgatctctcgacgatcggcgtgaagtagtgtctagcgacatgcagatctgcagtgccaagcgggcgattatccgtctgtttgcactggcgaaatccgacttccgcctctataagtgcggttagggcagtacgcgctgccccggggtgtggaaacccttgctagcagttgatgtcggctgtgacgacatcgaaatcctctgaccattgtggccgggggcctgtgacgtatgtccaggcttcggctaaaggtctcaggactgtctagcacagtttccaacccccggcttgggatcagggattgacgtttgcgggggcgaaccgcagacaatcccctaaattggaaacgaaatggacccgaaagacgcggcactcatggaaaagctggagttgcgaccggtgttcgggttgacgcaagggcttccggcctcggctctcgaaacgctgacggtcgacgcaatccgcaaacacaggcagctggtcgaaaaggccgacgcactttaccaggctttgccggaagactatcagacaggcagcgcgaccggtggcgcccagcatctcggatttatcgaagccagcattgagatgcacgcccagatgagcgcgctcaataccctgctcgcaatcctcggctatatcccgaaggtgacggtaaactgaagttagatcagctttttcctgatcgcggtcgccgtcagatgcgcgatggtgtgtacgttgaactgcttgcgagcatgttcgatcttgacccgcacgctgttgtatttgacgccttcgaggtcagcgacctcttccattgttttcccgtcagcgatccagcttagataggttgcgcttttcggatcgagccgcagtctctcttcagcggtcggcgtcgaattagcgaactggatgcgcgagtgaagctgggcaagcgcaacggcagctgccaccggatcgatctcccgttcaagactgacttttgtttttgaggatgcgaacgtgaaaagtgcgaaagcaccatgggcaattctgatagggacagaaattcccgatcggattccgaaatctccggccagggagaagaaggagcgctcttcctgagagagacgcggcccgtcccactctgcgctccacgcaaacgcctgcctcaatgtccgcgcgcgtttgattacggggtcgagcttgttgaaccggcgatcaaagtattccgtctgccaatccggatggtagttggagattgcagttgtctggcttggctgaacattcagataggcgtagccgttgaagccggttttcgcgataaccgcctccaacccttgtttcacgagatgctcatcgcccgggacggcggcaagatcggtgagttggtccagccagtgctgcattttcccctctgcgtcgatgtaccatggccccccgttgagtgcgaagcgttcatcaaacgattggaaaacacagcgctgtaataatctccgtatgagcctggctatcccaggttacagatcgaaatgccagacctttgagacgatttgccatttgccgtcgatttgcaccagcgtgagatcgtcgacgaatttcttgggcaagtagacatccttgacgcgaacgtgtgcggttgttggactgccaattgacaccgatatgatttcatcttggcgaatatcgcccttttcttgaggggaggggcggttagcaaccagatcgagatatgcatcgagtttcagattgacgagcttcccctccgttgccgagtacaactgagcctgaggatggaaaactgcgcgaaatccctcgacatcgccaaagtaaagcgcatccagatatgcttgaacggccgcacggacgttcccagtcaacgtgttatcggtcatgtcctgtctccctctcatgccgcaccgcgttcaaactcggcgtcagcaactgacagaccgtgatcaagagcggcaagcagcgtgtcgagttcgctgtcggaaatgataaatgacggggcgagaaacagcgatgtttgctcgccgctcgtaccgatgatcgcgcctgcctcgatcgcgcgtgacgctacgcgcgaagcaagtggagaaaccgcagtgtctgcataccagctgcgccagtcgggaccatggagttcgacggtccaatgcagaccgaaaccatccacgcgcgccacgctcggatgccggcgagcgatctcgacgaggccctgctgcattttcgcttccagcgtcttgacgcgccggatgatttcgccgtccttcatcactgacagatatgcccggatagcggcgacagcactgggatgcgcacggaaagtgctataggtctgccagctcttgtccttcatgctttcgactatgtccttggacatgacgaccgcgccggcgggagccgaaccgccagccaggcacttgcccagtgtgacgatatcagggcgagtttggccgccctggaaggcgaaccagcggccgctgcgcccgaggcctgttacaacttcgtccgcaatccaaagcgaacccgccttgcgggctgcattcgcgacgtagtcctgatattcggaatcgtagtaagttccgccttgagtgtagtcgatgatggtcgccgctacagcagacagcgctccctcggtcccagccatgcgctctgcgagagcccggttgtcactaacagcgccgtacttggcattaaccggtcctgggatgatgcggacaggaacctgcgccggtaccggtttgcttcctccactctgaagcgcaagaccgccatgccaatgtggctgaacggtcatctgtcgggacaggcctgtcatgccatgataggcccgttcgcgggttgcaagttcagtgcgaccggtcagggcctgggagaacgtcagcgcaagatcgtttgcttcgcttcccgaaataaagaagcgaacagcgcctacccagctcttttcctccccgaaagcgatatcgatgagatcctcggcggcagcttcacgctcggcccagaaccacccttcattaatgacggggttcgaagcagccttgatcatcgcttcgaccataactgggtgtttatggccaagcggtccaccggtgttgctgccgtcgatcaagcgtcggccgtccgccagaatgaagtatacgccttcgccgtcgacaactttgatgaccgggtctttcccggcattgagtccggtttgcagaagtctgctcatacgagcctccctgtattttagcgattgattggggttttcagctgtactggcgcgatgcgctatcagtggctgtgttcgtacacttgccgcaggaattccttcgtgcggggatgcttcggcctggaaaaaaatgaagccggagcgtcttcttccacgatcacgccgccatccataaagatcactcgatcggccactgtccttgcaaatcccatttcgtgagtaacgacgatcatcgtcatgccttcacgggccagatcgatcatgacatcgaggacttccttgaccatctcggggtcaagggccgaagtaggctcgtcgaacagcatcaccttgggctgcatgcagagcgcacgcgcaatcgcgacacgctgctgctgtccgcccgacaactgtcccggataagcattagccttgtcggcgatcttgacgcgctccaggagccgcattgcctgagtccttaccacctcgaccggggtgcctcggacgatacgcggtgccagcatcagattctgcagcaccgtcaggtggggaaacagattgaattgctggaagaccattccgacctctccgttgaggtcggcgatgttttcacaattggggtgcagctcgtggccatttaccagaatttgcccgctggtccgcgtttccaagccgttgatgcacctgatcagggtgcttttccccgatcccgaggggccacacaggaccacccgctcgccggcacggatgccgaggcttacacccctgagcacttccaaggccccgtaggatttatgaatcttgtcaaggctgatcattgttgggcctgaggtcattgttcacctcgaccagatcgttcttgctgcgcgctccggacggaagtcatcggatcatcgacgacaccacgattgaaaggcgcgacggacccatctctggtagatttcagaaagggcctaaattcccttctcgccaatggtaacgcggttgcaactgctgacgcgtcaccgaacggctcgaagttgatgttgatggcatttttaaacattgcaattcccgcatccgacacgacttgtgtgagtgggaacaggctagcgatcgcaatacgccctcgtctatccgatctttcaggctcttacatcggaaaaggagatatataaacctagcgtcttttcttcctgatgacgctttcaaggggctgtatcgattgcgggtactccttggatttcagaatttttgcttcgcggaccctgttgatgaaatttctgatgagaagattctcttctgcgttgttcttgtgaagaagataaaaaggcgaataatattccacgctttccttggttctgaccctcgtaagcgacgggatagtttccccgtagtgcacaggcagatagccgatgaagcgacccgattggatcaggagcgcctgggattcgatctcttccacgactgcgccggaactgacatgcccaacgcgctcaagatcgtatcggtgtagataccgacgcgcgacaaaagcataccgtttaagctcggcgatctcgacggcttcccggcctgccaaagcatgctcgttcgaacaaaagagcgcatgctgctcattgaacagagggatatagacaataccggtagttttgcgggtaaaagcaccggcgatagtgacgtctcgtgccccttcgattaccagccgctccatattgccgggtgaatccgtataaacttcgattacggtcttcttggcccggtcgttgaactcgccgataattgcggacaagtcccatgtacggtttgtgatcatcgcgtccacaatacctagccgcaatacgcccttgagttcacccgagatcgaggcagcggtgttctgaaacctgtcggctgcggagaacagatcctcacatgcgtcatagatctgctgcccggccgtcgtgagcgcaaatccggaacgacctcggtaacagacgcgaaatccaagtcttttctcaaggtcggccaattgtgtcgagagcgtcgattgtgacacgtttaaagtaagctgagcccctacgacgccgcccgcctctacgatcgcgcggaatgtacggagcaacttaagatcaaagtcgtgaacgcgcatctcaacctccccagttatcgatcaaggatgttacatcggccaatccgatgcaatatggcctaaccactatttttctgaagcaacaaattcctcatagatccggtgttgatgggcattcgagttctgagaattctcggccggcccactgcacatgccgacttaaaccaaggatctggagaagccttatgacaaccttcaatcaaccgctcgggggtaatgaaatgccccgcttcgcgggtattacgacgatgatgaggttacctcacgcgccggacgccaaggggctggacgcctgcttcgtcggcgtacctatggatataggtacgtcgaaccgtagcgggacacgctttggtccgcgtcaggttcgtgctgaatcggtaatgatccgcccttacaatatgggaaccggggcggcgccattcgacagtctgcaggtggccgatattggtgatgttcccacaaacccgtacgatcttaaaaagtcggtgcggatcatctcggaattcttcgacggcatcttgaaatacgactgcaggccgctctcaattggcggagaccacaccctcacatatccaatcctgcaagcaatggcgcgcaaatatggcccggtggggcttatccatatcgacgcgcacgcagacatcaatgagcatcagttcggcgaagccatcgcgcatggaacacctttccggcgcgctgtcgaagaaggcctgctggactgcaagcgtgtagttcagatagggctgcgaggctccggctatgccgctgaagatttcgattggccgcgcgggcagggctttcgcgtcgttccagcagaggattgctggcataactcgctagttcctctcatggatgaagtccgccaacagatgggtgaaggtcctgtctatgtgagttatgacatcgacagtctcgatcctggcattgctcccggtacaggaacaccggagatcgggggtctcacgaccatccaggcccttgaaatcattcggggatgccaagggttgaacatagtcggcgccgatctggttgaagtgtcgcccccttatgacgccgcgggaacaacagcgattaccgccgccaacctcctctttgaactgctttgtgtcttgcctggcgtggttcgccgatagcacgatggagttggcgcgcctcagggcgcgccaaccaggtccagatgtggctggagctgccgggcgaggtgcttgccggtgtcatgtgtgcgctcatcgcagaccggagacagagaaattgaccgcaggacttgctcagctttgtccgatgcagttggggccgctacgagcctagaaaccgatcgagcacatttttggtgatctggatgacgatctggtcatcgcggaccagccccatgatccagtccgagcttccggcatggaaaacctcaccctttccgcgctgaaagtggacgatcgctccgcatccccgtttcgtcttctcgatgcttgcctgatcagcagacccggtcagaaccatagccacatactctgcgtcttcccggcccaggaacgtgtagcccggcttgatcgattcaccctcctcgatggtcgatgagagacccagtgccagtatttccataccgtctggtgcgagcgcttccggtgcaacgaaaggtaagccgccgcggatttcatagccgatcccgtcgacctcgtagccgaacacgccgctctggccgccgatgatatctccgtagtaaaggccggtttgcgcgaatgcccaatgatccggacgatacaacgggaatcctttggctccccggggcgaacacccggaccaactcgcatacatgccttgcgttgcgttcaggccaaacgttgaagctcccggtcgccctatctcaccagcttcccatgactctgttacaagatgccttggccccgtgttcattaacgggtctcgctcacgagccgtgtatttgtagcaaacctgtgtacttccaccgtcctctagccggatctgccacatgaagtttccggcgaacctggcaatgcggccgccgcaatcaacataagcatcaatcgcgtcgcgcatttcccaggaccagtactcgtcatggccgatcgttgccacgcatcggtagccagacaggatggttggatcctcatgcagatcggtttgagatatgacgtcgacctgatagcccgccttttcggcccaaatgacaaattggcgctcgaaactcgcccatcccgcggagacgtattttttgctgtatccattacgataggcccactccatgtgcgggtattcaggttctgccagaatgccgggctgatccagcagcacggcgcgtggagcctcaatgggaaggctgacgaaaccacgcgcatatggtcgctggacgctaagacgcggggagaattcatttccctcagacccggagaggccctggtaatgattagagccgccccaatcattgtatgccgtccatgtggctgttgccgctacgagcagcagtctgtcgttgacctccgtcgttcgcgtttgatggccgggcccgatgatgacgacatgttcgctttcggctgcaacgccaccatcatcggatgaaacgaaggcccttataacgaacccgccggaacgccagccttctgtctctgataggattaccgaagccggccagccgcagcccacctccgaacaatcgttgtttgtgtcagaccaggtgcctggaattccctcacggcggaacatcgcctgacgatgggcgccgtcgcggtatacttcgagcgaatagcgttgtgcgttcgtgtttaccgagatccggatggggtcgcccggtcggtatgaaatccggtctgcatacaaccagatccggaccggcccccccggatcggagggggccctttctgcgtagtttccctgcacggcctcgtgccgccagtcggcaccaaggggcatggtttgagatgaaccgttcatggtgcgagcaccccgcttacttatcgtttccgatgcggaacgggaagtatttggcccaaagcgtatcaaactcaccatttgaccacatcagatcgacggccttctgaacttccgaacgcaacggctcattgcctttcttgatgactatcccggcgccatctccaactgccgggtccgtaatcttggtctctgagattttgcagcagtccttgccctcgctttgcacccaggtatagagagtcggggtgtcgcccatcacggcatcaatccgacctgagctgagatcggcgtatgcttcaatctgggagggatagaatttcagcgtcgaacctgaaaatttttgctcgagatacgaagcatgaacggttcctgtctgggctcccaccgattttcctgcaaacgcttccggtgacaggtctgatccatcgctgttcttcggcacaaggaagctggctgtattgttgtagtacttcaccatgtccacggccttcttgcgctcatccgtgattgaatgtgatgcaataaccatgtcgtaacggccgttctgaatggccgggatgagtccttcgaagtcctgggcggtccattcgcacttcgcggtgagcttggcgcagatcgcattgccgatttcgatatcaagaccggtcaccttgcccgagttgtcgacgacactgaagggcggatagagaccatcggttccaattctgagcacacgctcctcggccattgcagaagctacactgagcgatagcattgtcgctgcaagcagcactttattgtgatttacccgtttcatttggtcctcccatttaacattgcttcacctgcggtcgcgtcatgccgcccgcttattgctgtccgatattgctcactcagacgaagtcttgaaatcatcgacttaggcttctggatgagatcgatcaccatcgaaaaaaggattgctctattgccctgaaggcgagtctgatggccgatacaatgcaaatatatataaccgctgcccaaatatagattccgatatcgaatgtccgtgagtatataactttgactacccctagtaattcatagagagttacagccattgtaatggagctagccttgatcaggagaacgatctcgtttccatatcccggcagggctcgccgaatggcttgcggcatgattacttttcgaagcgtagtgaaccagccaagcccaagggcagtggcggcctcccattgcccctcaggcaggccatcgattgctcctttcaccaatgcggcagtgtaggctgctgaattgagggcgaaagcgagaacgctgcagaagaaggcgtcgcggaaaagccaccagacgccaagatcttctaataggggtcgaaattgaccgctcccgtagtagagcaggaaaagttgagccaggagcggagaaccgcgaaagaaggtgaggtaggtttgggaaacagcccgcggcgcccaagcattcgaacgcaatcccaaaaccagcggcacggttaaaattgcggcgcatatggccgacaaccccaccaacgcaagcgttagcttgaacccatcgtagaggcgagcggcgttctcgataacaagcgaagtgtccattataccgtcctcacaaggtgacggctcgttctgaggttcaatcgttcgagagcaaactccgatatctttgtcaggaggatgtaaccgaggcaggcaaacagatagagcataaagtatctatgggttgccgccaccgccaggttcacttctctcataaaatcggagacagatatcagcgagacaagcgcggtatctttgaggaggatgatccagagatttccgagtccaggaagagcaagccgaaatgcttggggtaatattacaatacgcagggatgcgatgcccggaagtccaagagatattgccgcctcgtactggccacgcccgatgcccgccagagcacccaaccatatttcgcttgaatacgcagcgaacaccagactgagagcaaaagatccggccgcaacgccaggaacggtccaggacgtctgaatattgagttccgacatcaggaattgaatcagctgcgagcaaccgtggtatatcgcaaagatagtcagcaattctggtatcgcctggaatgcattcgcatagccaaccgatgcggccctgacgaggcgcgatttgctccgtctacccaatgcgattatgagtccgaaaaacagacccagcggtaaggcgagtattgccacttcgacggtgacaagcagtccactcaggaacgaccagccccacccacctgcaccaaaacctaataactccatgcagcatgcctccccgtcaccaaccacatggagtggattagtccctgcgcctataaaatgttaaatccgcaacgtgctgcagaaacatcgtaattctcgatgtatccaattcgttcggggcaaatacttagagcgcgtaaagtcaattgaagcgcaggtgatttgggtccctctcacacggtactggccaagctattgtcccagcgttagcgctgttctgacagcacggtattcagggcttgaccggttcggtggtcactgcaaagcagcaaggcgctccgcctcggccatcgccgcagccttggttctgaatggcccgatatcgtgctcctcggtatctggcagccatttcgccaggaaccaccatccgccggggcgatagctggagttgctgcgaaccgacccaatgtccttggcaaagaaccagccggaatcaattccgtcctgttcccaattgatgcttttctcagtcatggcgtacccgttggtggagctacctagccatcttatccgggcgatatgaccacggcaacaactggtcgatctggctgttgggatggccattgacgatcttggtgatcacatccgtcagataggccatcggctcgacgccgttgagctttgccgtttcaatcagggatgcgattgtcgcccaatgttcggctcccgcgtcggagccggcgaacaaggcatttttccgattgagggcaatcggcctgatggaacgttcgacggtattggagtcgatctcgatgcggccgtcatcaatgaagcgtgtcagcccatcccagcgcgacagcgtgtagcggatggcttctgcgagcttggtcttctggctgataagggcgagttgctcggccagccatggtgccaggctgtcagcgatcggacggctatttgcctgtcgcctagcctggcgttcctcgtgggtcgttccccggatatcgtcctcgatcctgtagagttcggcgatgcgcctgagcgcttcgctggcaatcggtgctggcccggcggcggcgagctcatagaagcgcctgcgcacatggctccagcagaatgccaacgacacgctgttgcctgcggcgatcgcgcgatagccggaatatccatcgacctgcagcacaccaacaaagccattgagatgggctatcggacgttcgcccttgcggtcgggggcatagacatagacgacacctggcggatcggctccctgccatggcctgtcgtcacgagcataggcccagagctgaccggtcttggtctttccacgacctggatcaagcaccggagcggtcgtctcgtcggcgaagagcttggacgaggccttgagctgttcgagcagcctctgctgcagcgggcgcagatgccaggcggcacggccgacccagtcggcgagcgtcgaacgatcgagatcgaccccttggcgcttgtagatttgcgcctgcctgtagaggggcaagtgatcggcatatttggagaccagcacctgggcgacggttgcttcggtcggaatgccgccttcgatcagccgcgcgggggctggagcctggacgacaacctcctcacaggctcggcaaccgtattttggacggcgcgttaccaaaacgcggaactgggcaggcacgatgtcgagcttctcgctgacatcctcgccgatccggtgcaggccatggccgcaacaggggcagtcatggctctcgatgtcgatgaccatatcgatgcgcggcagatgggtgggaagtgaaccgcggtttacccgccgcttcgcagtcctggccccgcgcagatcgctcgacgcttgctccttggcttccaagccatcggcctcgacctgttcggcctcttcgagcccaaggagaagctgatcttcgggaagtgtctccgcgcgacggccgaagcgatggcgctgcaattccttgatgatctgacgcagtctggcgttctcaagctcgcgcgaaagcaccatggctttcagcgcgttcaggtcgtcgggaagctcgtctgccgtcatcgtcatggaccgacaacagcacaatctgccgaccaagacgagggtgtggatgaggctgattcaattggtcgcggcgactaccccgccgccgccgggacacgcacctcgggcggcgcatgaacgcgcttccagtccagcccctcgaacaaggccgagaactgggcggccgtcagacgcatcgctccatcctgcattttgggccaatggaactcgccatcttcaagccgcttggagaccaggcacacgccgctgccgtcccagaatacgagcttgatccggtccgcccgtttggcccggaacacgtagattgcaccggagaacggatcggcccccatctcggccttgaccagtgccgccaagccctccgcgcctttgcggaaatcgacaggccttgtggcgaccatcacccttacagctcccgaaggtccgatcacgacgttgccttcacagcctggatgacggcagcgattgtcgcggcgtcggtgccggatgcgatccggacgaccgccccgccgagctccagttcgattgcgccgctacccgacttccttctcgcttcgcgcggcgatgcctgctctttcgccgccggcgtcgtgagcacatccaggaccgccggcgcaaacatcggaacatcgacatcaggcgcagcttcgagcggcttgcgggcgaggcgacgccaagtgaacaactgctgtggggtcaatccgtgacgccgagccaccgcgcagaccttgatgcccggctcgtaactctcggcgacgatctgcgccttctgctcgtcgctccagtcgcgacggcggccgctgccggtaaaaacctcaaacctgcgcaccggttcttcgtcgctggatttaagcgtaagctgtgaaatcgacatatgtccaagccctcgttcgggctcaacatcgtcaatcacgcactgatccggaaggtgtggtcagaacgtcgcttacgtcccagccaaccgctgcgtaccttttcgaacccatgcgatgagcgcctcgccagagaaaatctactttcaggtgagacctgtcccgtcacatcgatcaatccgatgcgatgtccaacctgtcgctatttgtctctcttccagcagcgatagtttggcggaacacacagctttgggaggtttggcgtgcttaaaatattcattacgggcgtgcttgccgcgtcgctgacgagcgccacggcgttggccaatgaccgtgctcgcgacctgggtgtcgaattcgaagggactccgggcaaattcaacgcaattaccgacgtgcctggcgtcgaggtcggccatgtcagcttgatcgaaggggatgggcggactgaggtggggcgaggtccggttcggacgggcgtgacggccgtgctgccgagagggcatgccagttcgaagccggtgaatggtggtttcttcaacctgaatggctacggtgaaatgactggccaatcctatctccaggacctcggccttgtttacggccccataggaatctcgaacaccaatgccattggacaggtctacgccgggatacagcgctggaccgcggagaaattcggcgaggcgtcgacgcctgtcgttgccgagacctgggatggcggcatcaatgacattcagggctttcatgttacgccagagaacgcgatggaggcgatcgaacaggcgaagggcggtcccgtcgccgaaggcaatgtgggcgggggcaccggcatgcgctgcttcggcttcaagggcggtatcggaacagcgtcgcggacgatatccatcggcaagaagtcctacgttgtgggggtgctcgtccaatgcaacacgggcgcgcgcgacgtcctgcgcatttcaggggttccggtcggccatgaactgaacgcaaagtggctgccctgctacgcgccggttcaatcagccgagaaaaaggagccggaatgccaggccgatggcaccggcgggaagcccgttactgacgacgggtcgatcatcgtcgttgtggcgaccgatgtgccgttgagttcgatggttttgaatcgtgtcgcgcgacgcgcgtcgcttggtatcggccgcctcgggtctttttccggcaatgggtccggcgacctggtcgtatccttctccacgacctccgccgcgaacgatgtgccggacgagcaactgaaggaaggcccgatggttgccacgggacaactcgatcccgtcttccaggcaacggtggaagctacggaggaagcgatcgtcaacgctctggtcgccgcccgcacgatgacgggcgcggacggctacaccttgttcggcctgccgcacggtgagctgaagacgcttctgggacggtacggcaggcagcaggcaaagtgacggtgtttcgctcattgcctcggatcaggcatgcaagcctacaggacgaccccgcgaatttcagaagcccacattgaccggcggcgttctcaccaatgccgttcggttccgcgccagatcacaatcccggacaatttgttttgcgggagcactcaatatttcttttgaagaaatgctccgcgaatatgccagagaggctactcttccatgaccatttcccagacgctgtttgccaggctgaaggatccgtccctcgtcatcgacaaggcgcttatcgctggtgagtgggtcgccaggagcgataccggccagaccttcgaggtcgtcaacccttccaatggcgaggtgattgccacgctaccggacatgaatcgtgcagaagcgtctcgcgccatcaacgcggcctacaaggcccaaaaggactgggccaggaggacaggcaaggagcgggcgggtgtacttcgcaagctatatgacctgattgtcgcgaatgcagacgatctcgccgcgatcctgacgatcgaaatgggcaaaccattggctgaagcgaaaggcgaggtgctctacggagcgtcttatgtcgagtggttcggtgaggaggccaagagggtctacggcgacactattcccggtcatctgcaggataagcgcattattgtcatcaagcagccagttggggtcgtggcggcaataacgccgtggaatttcccaaatgccatgctggcccgtaaattcgcaccggctgtggctgcgggctgcgccatagtctcaaaaccggctgccgagacgcctctttcggcgctatcgttcgcccttcttgcccagagggcaggcgttcctgacggcatcttcagcgtcatcctttcgaaggattcgccgtcggtcggcagggagttcaccgagaacgagaaagtccgcaagctcacgttcacaggctcgaccggagtcgggaagatcctgatgcgccaaggcgcagagcagatcatgaagctcggtctcgagcttggtggaaacgcgcccttcattgtctttgaggacgccgatctcgatgcggcggttgaaggcgcgatgatttcgaaatatcgaaacaacggccagacttgtgtgtgcgccaaccgcctgtatgtccagtctggcgtctatgacgccttttccgaaaaactcgccgccaaagtcggtataatgaagatcggcgatggcttcgagcctggtgtaagcgcgggcccgctgatcacggaggccgccgtggcgaaggtcactgagcatatcgctgacgcacttgaaaagggcgccaaggtggctgttggcgggaagccagacgcaaggggcggtctgtttttccagccgactgtcctgaccggcgtcacgacggaaatgaaggttgcgcgcgaggagaccttcggtccggtggcgccgctcttcaagttcgatacagaagatgacgtaatcgaaatggccaacaacaccgagttcggtctggcgtcctacttttactcaaaggatatggcaaagatctttcgtgtggcagaagcgttggaatacggcatggtcggtatcaataccgggctgatctccactgaagtcgccccgttcggcggcatcaagcagtccggccagggccgcgaaggttcaaaatacggcatcgaggattatgtcgaggtaaaatatctttgcctcagcgtgtgacgcctatcgaatggcgcgggaagccgttcgggctattagtaaggctcatccagcaactcgtgaacagatattctccggaaaaggcaaaacttgattatcagtttcacccgcgacctcggtgctacgctgatcagcgagatgggcgggcgtgacgaggggacgaacccgacgacggtccgcgctgcagcggtattgatacattgaaggggccaatccgtatctacggaaagaattccagcgctctcaactgaccgacagcttgtgtgataaagccgccggtcgggacaaaggggacaatggttcgttacggcggcctgcggatcggatggtcggaaacacttctcgagccgacagtcgtcatcagttttgatcgtttcgatgcggatcactcaacaatcatctggctcgcccggattgtgcagttcgaagtagggcgagacggatctcgccagtgtctctaagctataatgaaatgaaaattgctgaacggaggcttttattgatcaggctgatgcttcgccaatagcgctgaacgggtcaatcccggtacgctcgtggaaacacaacatcctgatcgaccagtacattgaacttatagcccggccgaatctctagcgtgggttgcacgttgaggtttcggctgatcgtttgctcggtaacacggccgaagctttccgcgaaatttcgccgcgccgcatctgaggcagtgtcctgcgtggccagtgtcgaacgctccggcatcgacgcatcaatccctgtcccgatcaatgcgatgagcgccgccgagccgaaagttcgcaggtagtgattgttgaccgtgtcgttgaacccgccatagccctgtgcgtccgtgccggccatgccgccgatctgcagcgcggatccatccgggaaaatcaggtcagtccagatgacaagcacgcggctctgcccgaaggaaaccttgctgtcatagcggccgaacagttttgcaccctgcgggataagcaagatatgcccggtggcgctgttatagacgttctggctgacctgcgccgttatccggccgggaagatcggaattgatcccggtgataagcgtcgcaggaataacggatccacgcttcagctcgaagcgcgattgctgtgggacgacccggttcgggagatagccgagctccttcaggtcgctgttgaaaaaatcctccttcgaggtctgtccgttctgatcgacattttgaccaagcacaccgttcttcagggcagcggcataaaggtccggcatagatgagcgtgtcgatgacgctgtgtcggtggtggccgagcgctcatcgtcggtcttagcagccgcctccagtttgctgcgatcgatgaccagcggcgcatcataggcggcgtcgctggcttgtagtcgcgccattcgctggcgttgctgttcgcgcaaatactgctcctggtgttcacgattgagccgcgcccgccagatggcctccggttccagctccggcttttgctcctcaaccgccgtctgctgtgtcgggaacgggtttgtgacccgctcttcctttttctccaacggagtcggctggtagttcaactggctttcgggatcgccgatgatcccatcggtcacaccgcgcttgatctgatcggcaaaggtggaagcaggggtgcccgtgttggtctcaagccctgcgtcttttctgaagaacattccgcgagaggtcaggccgtagaagatgatgccgaggaaggcgaccagcagcacgatgacgataacaattggcagtcggttgatccgacgcatgcccgactgcgcttcttcactggtggcgccaccgagtttcagcgattgtaccatgatcctctcccctcacccgcgcttcaggagcgataaagcgcttgccggcgtcgcgccgtttgccgtgacggtgtaggcgcgcccgagctcaatgtgagacgtcgatagacgtgcgagcacctggccctcgaacggcataatcacataggcaagcgtgatgaccttctggtcggccttttggtcggtcacgaccgcatagccccagcctttcagagctgcttcgagcgcctgaccgaagggagagctgtccggcttaagcgccacagtcgctttgccttgtccgatctcttcagcgagccggctgaccatgtcgccggcgatcgcactcgccgcaggcccggagagttcaggcggggcgtcgctcaccacaaggtcgtcgcttccgacgctctggcatccggacaagagcacggcgataagaccggcgacgacaagccggcgagacgtaaggatctgagaggctcgcattaccgccctccccgcttgatggtcaccttctcctgtttccagccgacacctgcgaccaaaacggccttgtcgacattgtagtcgacgaccatcatgtcgttcttcatgcgataattgacgatccggttttggccgccggagacgacgaacaggaccggggcatcctggctggaaatccgtcggggaaactggatataggtcttctgcccatcgctatagactcgggtcggccgccagccggctcgaccggatacggaataggagaagctcagctgctccgccggcacattggcgccgggaatggtgcttgcctccagtcgcgcgttgatatcggcgagcttcgccgaaacgtcttcaggatattcgaaaccgacgcgcgccatatactgggtcggatgcgatttcagctggatatgataggtgcgccgcgatgtggtcacgaccatcgatgtgaccagtcccggttcggacggcttgacgatcagatggatcgcttgtccaccggcggctccggacgtcgcgggctcgaccttccaacgcacggtatcaccgaccagcacatcgcgaacgatttcgcccggctgcagctcgatgtcgcagacctgaagcggtgagcagaccaccgacggctgcacctcgccaaagaggaagatgatctttccgtcgtcgcccttggtgaccaagccacgcgtgccccgccacttgcccgaaatatcaatgccctttctctcgttcgcggaaacctgctgggcctcagccgtcgaaacaaaggtcgagctggcaatcaggctcgtcgccaaagccagcgccaagtatccacccacgcgtgcgccgccagtccaaaaattctcaatcatgtggaggccatgcctttcaaagctgagcggtccaatcgaagtctttgagataaagaccgatcgggttaagccggatgacgccctcgtcctggggcggtgtcagggtgacggtggcaatgccacgaaaacgacggagtgcggtttccttgcccttccggtcgcgctcgaactcggtccagtcgacttggaaggattggtttgacagcgccacgatgttgttgacctcaatggcgacggtggagttcttcgccttttcaaacggcgagctggagcgataccaggcattgaccttttcggtcgccggatcggacgtcctgagcagagcgtaggtccggtcgatatattgcttctgcacaaccgcatccggtgttaccgagcggaagctggagacgaaaccgccgagggtggcgcgcacgacgcgcgggtctgcatactcgatttgctgcgggaagccggctgtcgcggcggttccgagcttgtcgacctcgacgatgtagggaacgagcttaacctgcgtcgactcataaagcgcgtaggaaaagccgacgacggccatcagcatgccggtgatgccgacaatgcgccaggccgaggccgccttcacataggagccgtagcgttcgctccattcctgacgggcggcaagataggggttatcgggggcgcgattggcggccattgtcccgtccttttttacgatttgtcattgcgttcgggaggtggagcgtgccggcttgagccgccgcggctgccatcgagcttggcattggcaagtccaaggagcgatccggcataggcgcccggcgaaccgatcgccttttccttggccgccgatcctgccgcacttcctgctgaccagacaccggaccccatgccacggagagcagcgcccgccatcgaggatcccgccgatcgcgcggcctgaccggcggcaaagcctgcgccgactgcaccggcggcgagtgctacgccgcctgcggcgaacgatgcggcctgtccaccgtgcctgaccgcctccatcccgccggaaaccgatgcaccctgcaccacgccttgaatgattggcggcacatacatcgcgatcacgaaaacgacgaccgagatgccggcgattgccagcgtgttgatgaattggtctgacgtcgttgacggcgtttcggccaggcccagcaggatgtcggagccgatcttggagatcatcaccagcgccattaacttcatcccgacggagaaggcgtagacgagataccggacagcaaaatccttcgtgtacgacgagccgccaagaccgagcatgatcatgccggcgagcaggccgacatacatctccaccatgaccgcgacgaagatcgcggcgacgagactgaaggcgacgacaaccacgaccatcgcgaagaccgcggcgatcgccagcgcattatcctcccacatcccgaactttgcttgctccgacatcttggaagcgacacgtatcccggcgtcgaagatgttggccggcgacgcggacccgccgcccgcgccgatctggtagaggctatcgacgattgccttgccaagcgccggaccgcgatcgaggataaaggcgaagagccctatgaacatgatccggcgcacgagttcggcaaaccaggcatcgagcgaggctgcgttgatcgcgagccacacggcggcaatgccaatttctattccggccaaaatccagaacagggatcgagccgcttcgattattctcgattcccagcctttaacagctgctgcgacggaattctccaacgtcgtcagcacctgcccctgttgcgcgagcgccggcgcgctggcaagcagaacaataccgatcgcgatgaaggcgagctccagcttgggggatggacgagcgattaccatctcggtttcaactcctgtccgcctcgcacatcgcgctctgggtcaccgtggaagaatttctcccgacgctcgcgctgcgcttcgtcggtcaatggctgagtgacaccgccgccggcgccggacacttgcatcgaggaggattgccacttcatccaggtcgcgccggcgccaaagcaaatgagtccggcaagtgcaagggccatgataagccgcgcgctcaccagcgtggctccatggtctggccactgcgaatatcgtgctccggcgcattgaaaaacttctcccgccttgcctgcgccaaatccttttgcgcctgctctgactgataccaggtccccatcatggtcatctgctgcgagaccagtccccgcagcttttgcatctgcgccacctcttgggccgcgatctgatggccgacctgcagagccttcatctggccatcggcgctctctgacattccgcgcagcgaggacatggtcgactcctcatttgagaattggtcggcggtcaggttcgccgccttcagcgtgccggcgatcgtgtcgcggttggtgtcagaccaggactggtaggtggtggaaaaattcgtctgtgtcggcagatttgcctgcatgtcagcatagctctgaaaccgctgcttcaactgatcatcgatattgcccatcgaaaaggcgatgccctggccctgcccgacaatgctctgcagctttttgagatcgccttcgacctgtccccagatgtgatccggcagctgcgcggtgttctgcagcatgttgtcgtagatcttaagctggttctggatctgctcggccagctggttgatctgggtgatctggttgttgacctgctcggccgacttgccaaccagcgaaatcaactcggcattgttggcaagctgcgtgaactcggtcgcttcgccggtaacaccaccggccgacgtcagggaaggctgggccatcgatatgatgatcgcgatcgccgcgatcgcctgaacgcgatcaggggtcttgaagataggtttctgcatgagcaatccctctctgttgcagccagtgaagcgaccagtgttcgccatgatctgagacaagcgcccgaatgcgctttaggtcttccttgcccgacgcgccgacaaaggagagtgcgaccggcccgagcgccatgtcgaacagacgccggccgtccggggaggcgacgtaatattcgcgcttcggcaatgcggtcgcgacgatctcgatctgccgctcgttgaagccgatgcgttcgtagaactcgcgggtgcccggctcgcgcgccgcgccgttcggcaggcagatcttggtcgggcagctttccttcagcaaatcgataatgccggagcgctccgcgtccgagatcgactgggtggcgagcaccaccgcgcagttggccttgcgcagcactttcagccattcgcggatcttgtcgcgaaacagcggatggccgagcatcagccacgcctcgtcgaggatgatcaggcttggcgcaccggtgagccgcttttcgacacgacgaaacagataagtgagaaccggcacgagattgcgctcgcccatgttcatcagctcttcgacctcgaagcactggaaggcgccgagcgtcaggccgtccacttcggaatcgagaagctgtcccatcggcccatcgacagtgtaatggtggagcgcgtccttgatctcgcgcatctgaacgccgctgacgaagtccgataacgaccgggcgcgagactgcgccatcagggcgatctgcttcgagatcgcgttgcgatggtccggggtcaccgtgaccccctgtaacgcgaccagcgtctccagccattcgcatgcccaggcgcgatcaccatcgttcgagagttccgagagcgggcagaaggcgagctgcggcgagctcccctccccttctccgccgatctcgtaatgatcgccgccgacggcaagtgtcagcggcagcatcgagcggcccttgtcgaaagcgaagagctgggcgttctcgtaacggcggaactgcgcggcgatcaatgccagcagcgtcgacttgccggagccagtcggaccgaagatcagcgtatggcccacatcgtcgacatgcaggttcagccgaaacggtgtcgatccactggcgacctgcatcagcggcggcgagccggccgggtagaacgggcacggtgctacagggcttccggaccagaccgagttcagcggaaccagatccgcaagattgcgggtgttgatcagcggctcgcgaatgttggcgtaggagacacccggcaggctgccgagaaaggcgtccgttgcattgagcgtctcgatccgcgctccgaacccttcggcctggatcagccgtcgggtggcctcgcacttttcctgaagacgcgacggcacgtcgtcgaagaggacaatgaccggtgtgtaatagccataggaaaccagctgcgaagcggcttgcgcgatcgcgtcctcggattccgccaccattagcatcgcgtcctggtcgagcgagcggctttgggtctgaaatagttgatcgaagaagggtcgcaccttctgctgccacttcttgcgcgtgcgttcgagccgaacccgggcttcctgttcatcgagaaagacgaagcggctcgaccagcgataggtcagcggcataaggtcgagagagttgagaatgcccggccagctttcggccggcaggccgtcgatcgccacgacaccgaggaagcggttctcgacggttggcgtcagaccgtgttgcagctcggccgtcaccagccagtcgaggtacatggggatttcgggcaggcgcaccggatggttctcgccggtcacgcagaagcggatgaactggaagagctcgtcatagcgcgcaacccgaaacccgccacgctcttcggtttcttccgtcagcatgcgccgaatcgccacgacgttggcgagatattgttcgacctcgcggatcgacgtccggaaactatccagcgcactctcggcataggtggctgatcgactgccctcatcggcatagacatagcgagccagccccgatcgtcgcggttccggcggccgccaggtcagaatcagtgcatgccggctctcgaaatgtccccgttcccgctcgaaatgcgcccgccgctcggcgtcgatagcgcgggtcacaggatccgggaaatggcaactctcttcagtggcataatcggtcgttggcacgcgggccgcctcgacctggatcatccagccggaaccaaggcgcgacaggatggcgttgatctgccggctgacctcgttgcgctcggcgtcggtcgaactctcgccgtcagggccggcaaaataccacccggccatcaggcttccgtccttcaggagcatgatgccgttatcgaccagaccggcataggggaccaggtcggcaaaggacggaccggactgtcggaaacgcttgagggcgaccatggcgtatccctcagtaacgccgccagggcgtcgaggtcgcccggtacgccgatttatacgagacgtggcgaagatagacgcgccgcatcaacggatcggccttcgccatcatccgaagggcggcgatggcgacgagccagagggccaacccgaagatcgccgcataccaggtcagcacgacgaagatcaggatgattgctgccaggccgctcaaaagcaccagttcccgatcggcgcccatcaaaagattggggcgcgagagggcgcgatgaatacgcgagcgagcaaggttggagccggtctcagccacgagccccctcccccacccgcgtgagcgtggcgaactgtgcgatgctttggctcctaaccgcaggctcggcgcgactgatcgtggccccggtcgcaccgaacaggccgacgatctgggtggcaccgaggagaacgccgccgaccagcgcgatgtagcacaggcgtcgcgcgaaatcgttgagctcaccgccgaagatcagcatgccgccggcgatcgccacggccgccagcgcgatgaagccagcgaccggacctgtgatcgattcctggatttgctgaagaggtgactcccacgggagaccacccccgcccgacgatgcgagcgttggcgacgaaagagcgatcagcgcggtcaaggcgacggcgccggtgatgacattaagatgcttacgctgcatggctatcctcatcgatctgggcatagtgttcggtttggtaggttgagcccttgaagccttcgacgttaatgacgtcgcgcacgcgccggccgcggccggtccgttcaatcgaaacgacgaggtcaacggcctctccaatcacttcatgcattggctgctggctcgcctccgcggtcagctgttcgagccgccgcagcgcagacatggcgctgttcgagtgcaccgtcgtgaccccgccggggtggcccgtattccaggccttcaggagagtgagagccgcgccatcgcggacctcgccgacaatgatgcggtcgggccgaaggcgcatcgtgcttttgagaagtctcgccatatcgacgctgtcgctggtgtgaagcgaaacggcgttttcggcggcgcattggatttcggcggtatcttcgaggatcaccattcgatcctcgggagcggtcgcaacgatttcggcgatgaccgcattcgcaagtgtcgtctttcccgagcccgtacccccggatataactatgttcaggcggttggcgatggcgctcttgagcaccgaggcctgcgcctccgtcatcaccttcgtcttgacgtagtcgtcgagcgcaataagccgcgaggcgcggcgccggatggtgaaggtcggcgcggagacgacaggcggcaggagcccctcgaacctgtgaccgccgattggcagctcgcccgatatgatcggctgctcgtgatccgcctcagactgcaatgcgtgggcgacactgccgatgacgacctcagcggccgccgaggtcatctcgccggcgggggcgataccgtggccgagacgctcgatgaacaggcggccgtccgggttcagcatgatttcgacgacgctggcatcatcgagcgcgacacacaggcggtcgccgagcgcatcctggagtttgcgcacgaggcgggaatgggagagcaactgggtcacaccactctccgcgtcgcggcactctctgtcggaacgatgtccgagcggtatccgatgggccgcagccggtcgaagctagcctgatccgcaggcaagcttccggccaccgcttgcgtgtcgccaaggggcgtaggctcacccaagcgggtcatcggccagccggcgcgcttgaagatgcgctcgatgcggagatcggttcccgtcacgatctcgcggtagccgtttgccatcgaccactcgacgatgccggcaaacatggtgagcgtggcaaggtggagctggccgcctcccctcctcgcgtccagcgccgtgtcgacgcagaaccgggagctttcgatcatcgcgggatgtgcggcgagatatccgttcgcgagcaggtgtggaaacatgtccgagagcatggtcggacccatggcagggagaagacgggcgcagcctataacccggtggtcgtcgttaacggccaggacgtaggacggcccgaacgcatcgtagcgatcgcgctcctccccgtttttgacggagacctcccagcccatgcgcaatccgaagaccttggcgcgaagccgatgcatttgcgccagcaagccaagatgctgcccatagcgatccggcgaaacgactgtgatgtacatgcttccactccgagaatcgaacccgggcacacaaaaatcatcacgaatcgtgtgtggctatatgcagatctgcacctacgcgtcggcatcgaatcggggtttagtgccggccaatgaaatgattgaagtgtggatcaacaaccttggctgcgtttttgggctagccatcacgagccgagttagttcgcctaagtcatggaactgtatgcatgaatcgaagtgaccgcaaaattcgaagagaaagcgttaacttcttgttaaccttaaatgtcttgcgactcgctgggaatcgggagatagtttcgcaaatgatggcgttctagccattttttcgaaagtgacgacgtccgggaaatacttcgcgaaatgagcaatatgttggccaacagatttgatatcgagatcgcccagcaggggtcgaagatctcaagtgccttgcacatgttgcgcagccagcagtacccgcctgacgcccgcaaggggctgcgcaaattccagcttgcggaggttgctgacttcatcggcgtaacgcagactcatctcaggcagcttcacgctgacggaaaaggtccagagatcgagtcgattggtggacgccgatactacacggctgaccagatgctacagctccgtgattatcttgaggccaacaagaaatccgacaagagattttatgtccccaagcgccgggagggcgagccgatgcaggtcgtgtcggtcgtcaacttcaaaggtggcagcggcaagaccacaacggccgcacatctggctcaatatctcgccctcaccggccaccgcgtgctcgcggtggacctcgatccccaggcatcactcacttccctcttcgggatccagcctgagcttgatgatacggcgtctctctacgaggccctccgctttgatgacgagcgcaagtcaatcagcgacgtcatccagccgaccaacattccggggcttgacgtcgtgccggcaaacttggttctccaagaatacgaatatgacgtgccgctcgcaatttcttccaagaagggtgaagacggcagactgttctacatgcggatcgccagcgctctcaagcaggttgaagacaagtacgatgtggtcgttatcgattgcccgcctcagcttggctacctgacgatcacagcgcttatggcgtcgaccgggatcctcatcaccatccatccccagatgctggacataatgtcgatgagccaattcctgatgatgcttggcgggatcatggggccggtcgccgaggccggcgccgagatgcgcgttcaatggttcagatatctgatcacgcgatttgaaccgacggacattccgcaggctcagatggtcgggtttatgcagtcaatgtttgcccagcagatgctgagaaaccacgtgctgaagtcgaccgcgatttccgatgcttcgatcaagaagcagacattgtacgaggtcgagcggggcgaattcgtccgcgcgacttacgacagggctatggagagcctgaatgcggccaattcggagatcgttgagctcatccacggtgtctgggggcgaaaatgatgcccttgtcagccgtttttttcgacattttgcgtattgcattcaatagtttgtcgcctttgacagcacgatcggagggcagtcatgtctcgtgaaaatccgtttgcgaaacttgatcttgcggcgatttcggcaaaccaaactccgaccaaaccgggctacggtatgacgggagcggccaagactgttgtccgctccattgaggacatggccgagaacaccaagaagcttatggaaggcgaggtgatcgttgatcttgatccgcgactcatcgacgtatccttcgttgccgaccgcctgtctgacgatggagaggaattccaggagttgctccaggcgatcaaggaagcaggacagacgacacctatccttgtccggcctagctcgacagatgccaagcgatacatggtcgtgttcgggcatcgtcgcctgcgggtggcacttgagcttggcgttccagtcaaagcaatcgtcaaaaagctcgacgacgcgacttcggcgattgtgcaggggcaggaaaacgcggcccgttcaaacctgtcgttcatagagcgtgcatacttcgctcagaacctgattgcgtctggaatgacgaaggacgtggtccgatcatcgctcgccgtagatgaagcgatgctctccaagatgctggcagtcgttgaaaccgtgccggcagcagttatcacggcgctcggcgcatccaagaaaatcgggcgagaccggtggctgagccttcgccagctggtgcttgcccctgccctgtcaaaggtcgccctggagtattcgaaatccggcgaactccagaagctttctgaaagcgaacgtttcgatgcgctccacaactacctgaagcgatacaagtcgaagtcagccgcgaagaagccgaaggcagacgtccccgtccgggactggacgtcggacgatcgttccctgaacgtggtgatgaattcgaaggcaaagaaagttgctatcgagcttacgaatgttgaagcgcggcccttcagtgaatggctgtcttcgcgcatgagtcgtttgtacgaagagtacaaaggatcgaaaaccgaaacagacggagactgaaccgcaaaagaaaaaggcccccgaacggcgaaccgtggaagcctctctcgtcatctctagcaggatcgagaatcgcatttcccggaatcacagtcaagagtcttggcgccgatttggtgagcggatttcctttgcctgaagcaaggtgaaagaaaaatgcagacgggacatgtgacgacgccctttgggcggcggccgatgtcgctcgccctggtacgaggacagatggcgatcgagaatccgcagccgggcacgcgtatcgaaaagtggaaggtgtttcgcgacgtgtgtcaggcacgggaacgcctgggaatccaggaccgggcacttgccgtccttgatgccctgctgacctttcaccctcatgcggagctcgatcctagccacgggttggtagttttcccatccaacgcccagctatccgtgcgggcccacgggatcaccgagacgacattgcgccgacaactcgcggcgcttgtcgatgcaggccttattctgcggcgcgacagccctaatggcaaacggtacgcacatcgtaaccgcgatggcgaggtcgagcaggcctacggatttgacctgacaccgctgctggcccgagccatggaactcgcactgatggcccaggacatcgccgccgaacgcgttcgtttccgtagagcgaaggaagccctcacgatctgccgtcgtgatgtgcgcaagctgatctcggctgctgtggaagagggagttacaggcaactgggagcaggtcgaagctgcgtacatcggtattctttcccgccttccgcgccatccggaccggacgcaggtcgagatcacccttgatgaaatggaactcctgcgggaagaggttctcaacatcctggaactgcagctgaaaactgaaaatatgcatggcaatgccggtcagaatgcctgccacatacagaattcaaataccgaatccattaatgaacttgaacctagctctgaaaaagagcggggcgagagcgcggtggaagacattcggccgacaagtatgtcgccgaaaagggcgaaggtgaagcctgaaccaatcaaagcgttcccgcttggaatggttttacgcgcctgcccgcagatagcggactacggccatggcggccgcgttgagcactggcgagaattaatgcaagctgccgtcgttgtacgttcaatgctgggtgtcagcccgtcagcctatgaagaggcttgcaatgcgatgggtccggaaaatgccgccgttgcgatcgcctgcattctggagaggtcgaattttataacatctgccggcggatatctgcgtgatctgacgaggcgctcggagcgcggggagttttcgctcgggccgatgctgatggctctcatgaaggcaaacgaaagggggaacaggaggtctgcctgactagagaggcatgttgtcgacgatggtcacaaaaccccgctaggatggagcgtggcatcgggtgaagcttgtcagccgttttttttcgtgatttcctcttgtgttacagcaggttattagcgttgaacacccaatttccgacagggacccgaagcaatgtggaaggcaaagcagaaacagctgggcgttgagcagatcaatggtcatgtcgcgaaacgacatcccctgatcagtggccgagcacctgagaacaccaaaatgcttttcaccccagcggaactatatggtgcgatggcgcagtgctcaagcagggcgaagatggaccagcgtgcggcgcgagcccaggttcagatgtgccgtcatctcatcgcccggcacgtcgacgacaagaatgatcgtttcgctttgctggaaactgcccggaccctgaaagactatgtcggaaaagccatgaccgggcttgttggcgacggtatcgcctatctccacatggtccgtgatggctaccgttgggtggatcactttgaaaaccatgccgtccatggcaagcccccgaccacgcgttctccagattacgtcttcagccgaagcgacgatctgttcgttgccctcgcagagtccaaggcgaccaagggggcgtccaaggctgctttcacaaagacggtccgaaaaggctacaaggaacaggttgagccctatctgggccgcaagataggttcttgggttgcgtcgcacggctacgcagtcggcagctggatgaaatcggtgaagaaggccgagatattcatcgatcatacggcgagcccgggtcatcccacggaccaggagggggatcctaccgatcggtctgatccgcggatggtccggttcggcagctactgcggcgtactaactctcctgtttggacctgacattggagaagcagcacgcgctcgtagctggcgaccgtcggagcagaacttcaccactgtcgaatggctcggtcggacgtggattgttggagaagacgcggattgggagcctctggtgattattcccccagagcacctgattttcagaccgggttccgtgcggatcatgaacggcatggcgctggatttcgaaatcgcacagcgcgtctttgtcgcgatcgaggacagtgacggcgccctcgacctgctgggagagctccccgagtttccggcagaccttgttgaagccgcaaaacgctccggaggcgcgatctttccagacgggtttgctgtactcggtcgcgacgaagaactgagccattacgctcagatatcgatcaagccgccggcggaggccgcgcctgccttggttgagagcgagccggcagccgaggtggtggtcgcagaggagatccgggggatcgatactcaattgcgctcaggttccaaagtcgatgtcgtcgaggataagcatgcactgctttacctcacgcatgagtagacgcagggtttgcccgacgcttctaccgaactgatggagaaacacaggtcaagtcacgaccaaaatggaactagcagtcgacatatgaaaccgttgtagccgcagcgaggatcgaggacgttgatgagtgaagagaagcccgagaggtccggacccagcccagaagagcaagtgcggatatacgctcggcggcagcgtgaacgatatcgtttcgaatgaagcaggatcgcccgcgcggaaaatgtctatgtggcctggatcgacctcatgggagcaggacaccttatgtctatttctcttgagaaacaggccaacgcgcttgtccgactgcatatggcggtagaacatgcaatcgcagggaaggcatcgattgagacgctgccaatcaacgacggagtcttcattctttccccgcacaaatcggacatcgaaaaggtcgtaaggtcggtaatgatcgatctctcatcgatattcatatctacccctgatcctcagaacaaggtcctgcttcgtggtggtattgcttttggtccggtctatcgcggcgaagcgattgccgccggccttgcgactggcaagcgcgaaaagcatagggaggcgctgagccgagtggctttcgggccagcaattattcaggcgtatcgaggggagggcgccgccccgccttatggtatcgcagtccatgaatctgcccgatctttcgcgccgcctgcgaccaccccttttctgatgacccactggttatggtggctgacgcacccggatctcgagcatcccgatggcgcgccgccactcaccgtcctcaaggatgttctgtgcagtgatctcctcaagcattttgcctggctgcgttcgaccctgctactgcatggacttccttctgaaaagctgacgcaatgggagcatatggcgcagcagtatttcagactgaaagcgccctcatgaaacgtctgaacgatatgcactccgggcaacgaattcgtcctcctcgatcctagcggaacagagcacccgaagcggcagagatcttcccgggcctgatggcgctgattgccatcgcccatcttgccgatgctgttacccgtcgaagcaccagtcaatcaagtctgatcgaccgaactagggaggtgcgcttcgcgatgattcttgagcagggtatctggacagggactttctatgggaaggcatcagggaacataggtgcttcagcccgagaaccggcggggaaaagaactctcgcggatctttgctatttcgtcgtgcctgctcgattgacgcctccttccagcggaagcgagttcagaagtacggtatggatcggcgctgtgcccaatagtatgaaaagcggtggcgccggaagcctcagacccgacttcaatcctcgtctgctttctctgacgttgaaaacgagttttctgcacatgggtcagcttgtgaaccttcttcgcagcgggctcgtccgcgaaatccagtttgaaatcggcgaaccgggcgacaatggcgaaagcgtggtgacaggctggaatgcaggcttctcgttcccgattgtgaacactttctaggccagttccaattttgacgagttgcaaaactcttagcgcggttcttcgccgggcattctcccgcctctagcctatcggagattccctcagagctcccggatttacctcagcgtggttgctggagcgccaccgtcagcggagatcagcgctgcatcaaccttgtcgccattggctgcggcccatgaccacagcgcttcgaatggctcccgcagcgaagccggttttcctaaaggcgtgggattgcaaagccttgaccggcccattgctttcttaaaggagctgacacgagcgagcacgatccccacttgcggacacttggataaagcgcgccatggcgatgctcagaaagctatcgcctctgactccagataacgttagcggcaattttgagaaggctgggacgcggggagggtctccatgtaagcctctcacttctgctgatgggagcattgacatcaagcagatggaaggcggggtctgtctttctggaaaggtagcctttgtatacaaagtgaccttcagtgacaaagtcattcggtgacactgccgcctcgacaacgtcacggtgatgatacacgccacaagcggcatagcattcgacaatgagctgcgagcaatacgttgaattgcgccggggaatatgccgcctagcgaaaagggctaaccgcgcaaaccaatcccgcttgctgaagaaacgtagcttaccgcgtctcctgacggcacgtcgacggaagggaagcaaagcagcatccagcttggcatatttcatgccccgcatagatgtggcatgggcgaccgcttttgcaatgctgtgttcaccctcccatcgcaagacgttcgcgacctcgaagtcgttcatgaggtctttgaccgaactttcttcaataccgttaaggccggcgtcgattgcttggccctgtccgatgtaaatcgcagcgtgcgagtatgcaccgtttgtaagttcgcggatcgtggtgtgtaactgatctgggtcagccatgtaccatacgagaatgtcaccaggttgaagtgagctgggatctatgctgccgggcggtggatcgtgagagaaagtaatggcaggaacgtaaatttcattcccgtattggtcgaagtccactgcgtaaggcattcagcttccctgcaagcaaaggtgttcgctatatccatagctactaaggacttgctaccgcgcaaatgtaaaataactgatgcctcctatgtccttcgtctggctcgcttctttcacagttagcggtcccagcgaatcctgcgcattgggctctacatcgagttcaaagcaatctcgctgcccgaccgcttcgccgggttgtgttgttatagtagctcgaagcctgctgcattgatctatggcgtgactgttccatggcctctggaagggggatacctcggttggcggcttcggttaaatatcccgatcgcagcccatgcgccgaaaactccccactgtccaaccccgccatctccgcccggtgcttcaggatcgcattgaccgactgcggatcgagcgcgcgtttggccactgtgccccagcgcccgatcccccgaaacacgctgcccttgtcgatcttcgccgccactagccaggcatccaatgcctcaactggtcggccggtgagatagacgacgtcatcctgctcgccagtcgtggtcttggtgcggccaagatggatggcaagcgaggggaggggagggccgtcgggcacctcgatcggcggctcgacggtcagctgttcgcgccgcagtccggcgatctcgctgcgcctccggccaccggaggcaaacgcgaccatcaggatggcgcgatccctgacatcacgcaggctgtcggttgagcaggtggcgagaagctttaccagaatatcgccggtcacggctttagcgctcttgcggcgccgggtccgggggaccgcgcgcacggccaggcggatggctgatgtgagggcaggggaggcgaaggcgccgtcgaggccgcgccatctcgtcagtgtcgaccagtttgcgaggcggcggcggacggttgccggcgcatgcggaccgaccgatttaaggaagccttggccgcgtagattgtcggtgacgtcggccggcatgccgtgtccgggatcggttgcgcgcttttccggatcccacaaatgctgcgcgacgaatttcagcagcagcgcctcgggcgccggccagggcaaggaccggccagtagccgccaaaccccaggcttcgagataggcgtcacgacacgaaagtgctcggattgtccgacttttgagaacatagagtgatcacgctgcgaggatggaaatttcccgacgcaacggcctgagatcaccgccttccgtcggagtccagatgtaatcaccggtgagactgatatgctgccagccgagcggagtgatgtgtttgatgacatcgggtggcgtggggatgccctcccggtttagttcggcgaacgccggttcaagatagagtgtgttccagtagacgatggcgttgatcaacaggttaagcccggatgcccggtagaactggctctcgaaggtcctgtcgcgcaattctccgaggcgattgaagaacagcgcgcgggcaagggtattctgggcctcgctcttgttgaggccggcggtcgcgtttctgcgcatttccgggttctgccaccactgcggcaagaagattgaccgattgatgcggccgagatcgcgcagcgccagcgccagtccgttctgacgtggaaacgcggacagcttcgccagcagggtcgaaggccggacctgaccggaacggatcgtcgtgacgagacgcagaatgtcgttccagtttgccttgatccgctcgacgttgatgggttcgccgacgaacgacgccagattcttgggaggcgtgtcgccggggaagagatacagcttgcgatccttgagaccccgcagccggggcacgagctggaacccaacgagatggcaaagggcgaagctcatgtcgctgaccccgccagtatcgacatagtgggtttcgatggcgagatcgctgccatgatagagcaaaccgtcgaggacatagatagcctcgcttgcgttggcattcatggaaacgatgtagaaagcgccgtactggtcagatgtgaaccgatagaatttggcgcctgggttgggaccatagcgagcattgaggtccccgatcgcttcagcgtgaccacccgccggaaaatattggccgtctgacgatgaggttgtcccatcgccccataggcttgcgagcggcaattgcctctgggcattgacgagaatggcgtgcgcagcagaatagccttcctcccggatatgccagtcatgcccccaggcaagctggcgcatcgtgattccgggagaaacatccgccattctggtgaggccgagattgatgccgtcggccaggatcgcggtgagaagcgcaagcttgttgtcggccgtgcgaccgctacgcagatgggtgaaggcattggaaaactccgtgcgagcgtccacttccagcaacaaatcagtgatgcggattgcaggcaggcggctttcaaccttcgccttcagcgatttggcgatatccggaaacaaggccttgtgcggcgtgacgctgaaacccgctccggtcaattcgacatcgttgagttcgccggcggcagcaagacttgagaggtcagccagcccctcgttgaggacctgacgctgctgacggagatacgtctcgacatcggtatcgacggcgatcggaagcggtccctcctcacgcatcagttcgaatgtcggcgagggaatgagaaagctctcaaaagactgaaagcgtttggctccctccacccagacatcccccgcatcgagccggcgcttcaattcgctgaacagacaaagttcataggcacggcgatcaaccttgccgtcctgcaggatgagcggcatccaaccctttggcgcgaacgaaatcggagccttgtcaggtatcgctcttttgcccgtgcgatacaaatcggcgaccacggatagtgcccgcaagaggttgcctgccaccgcgtgaccgcggaagacgagggtggaaagaaattggggcgcaagtttccggatcgtcggatagcgctggagcatgtcgattttgccgtcgatgacatctggggcgatcagcgtatcgaccgcctcgacactaagtgtgaaggctggccactgaatggctctctcgatcgcgctgacgatatcctcgcctttctctctggccgcgataatcgcgtggcagacttttgaaacatccttcagcggcttctgcacttcccggaccgattgtgtcacacgagcggttgcccggttgtcggcgcgtcgggtcaggatgcccatgatcttcttgaacatgtcgatagcgcagtcggtcaggtggcgactaagatgcaacgccgtagcggcgaggaccgcatgccggcgttctgggttgagatcgcgcagatgctgggcgctcatccgcatgccctcggcagcgaattcgtcgaagaccttagccggaatgcgttccgtcaaagctgccgacaggtacagcgaacgcagaaagcgaattcgctcagcaatccggtcgaggttggcggcggctggcgacaatgctggtgttctcgcccacgccaaaacggtcaggttcgtcccctcacgcggatcgagaagcttgtcgagatcgcatttctgatcgtctgacagcccgccagccaaagcctggtgagcgatacggatgccgcgccggatcgccacgtgaatgatggcttcgagtgacgttcgcgaaggaaggagaattctccgacgccgtaattcctcgaccaccatgtccgccaatttgtcagcctggcgtagcgtttgagctgcgggcgtcaaccaaccagtcaacgcccgcacatccgaaggggcgaacggtcgaatctgcattcgctcgaaaagcagggcgaggtgttctcgccgcgtctgggatcgctcgaaataacgatccatctcacgatgatcgacgccgatctgctgtgccaaaaatcgtagaacgccagatggcaggacctcgccgtccgcgagtggccggcccggatatcgcagcgtcgccagaacgcaggctagccccagccggttcgatgccttgttctgccgcatgatcagatcgagatccgagcggtcaagtgtgtagtgtttggcgatctgcctctcatcgcccgggatggttgtcgcttgttgccaccaggcctcattcaataatactcgtcgcgccattcgccgatcttccagattcgttgtctgcatggcagcgaaccggaaaacacctgtccgacaaacgaccgtttgacgacatccacagattttgtccgcaaaccttgtcatcttacggcaaatcggacattgtccatattgaacgagtaaacggacagatctcccctcatgacctcgattggctacgcaagggtctctaccggcgaccaggatactgcccttcaactcgacgcgctgcacaaagcgggctgtgagaagctgttcgaggacaaggcgtccggggtgaagacagaccggccaggactggcggaagccattcgctatgctagaattggtgacacgcttacggtctggaaactcgaccgactcggccgatcgatgaaacacctgatcgaaatcatcgccgaactggaggccaagggcgtcggcttccgctccatcaccgagaatatcgacacgacgacatccggaggccggctggttttccatctgttcggggctctggcccagttcgagcgcgatcttatcagggaaagaacccacgccggtttgcaggccgccgaggaacgcggccgacgtggtggtagacaagcagtggtaacgcccgaaaaactcgcaaaggcgcgccagttcctgacatctggtcttaatgttagagaagctgccgctcgtgtgaaggtcggaaagacagcgctatatcaagcgctcaagacagataagccatccgtttgatttccgcggtagctcacagctcaccgaagccggttttgctaccgcaggcgtttttcccgggtcttctcttgaagcgttggcaaatatatcaatgcgcgaagcccgccttcggcccgatttgatagtgtaagctgccccccatgggcacgaatgatggacaaggctattgcaagccccaatcccattccgcctgtttcccggctgcgtgaggtctccaggcgatagagcggctcgaaaacatgggtcaactcggcttcgggaatgcccggtccggaatcgtcgattgtaatctcgattgcccgcgccgtggtgccgatcgcaacaagggcgttgccgccatatttgaccgcattgtcgatcaggttggtcagggagcgcttgagacttaccggatcgcattcaaaaacaaccggttgtgcgtcctccatacgcacaggaaggccgccatcggccaggtcgtccacgatgctggccagcaaggcggtaagatcggtcggccggcgcggtgcctgcttggtgccctcgcttgcaaatgcaagcgtcgcggccaccattgcatcgagatccgcgatggtcgaaagcattttctcgcgttcaaccggatcatcgacattttctgcccgcagccgcaagagcgtcagcggcgtgcggaaatcgtgcgaaatggcggccagcatctgcgagcgatcctcgatcatgcgccgcaaacgcgactgcatggcattgaaggcatgcgcggcctgccgggtctcgaccgttccggcctccggcatcggcggcgcattcagatcctcgccgagccttcgagcggcctgcccaagggctttcagcggtgccgtcacccggcgcacaacccagatcgccaccaaaagggtgatgaccaccatgacacccatcgagacgaggaagcgcagcgagaaggcgccaccgctatccggcaggacggtggtgaagatgagccattgcccatcttgcagcggaacggcaacctgcatttcgcgaaacccagcgaggggacccatgccaccaaatcccttcatcatcgggttctgatccatcatccgctgggccagaccgaccataatgccgcgcggctgtgaaaccgagaccaaagggacggcgcttccatcggccgacaactgctcaccgagaagctgcctcaacgcctccgccgccggcgcatcggcatcggtcatcggcgtctgtggtggtgcggcggccagggtgacattgaatgtctcatcgctcgaggccgtcacaatgcgcgcacgccaatcgtcgggtgcatcctgcaccaagcgggtcacgttcgtgatgcgctgggcgatcaccaccccgccgaccgcacgcacgatctgcccgcggtccatgccgtatatccatgaaccgaccagatgtgaggcgatgagcccagccaggagcacgaacagggtttggccgaacaggctgcggggaatgaagtgcctcattcgctgctgacttcggggacaaacagatagccgccgccccaaaccgtcttgatgatcgtcggttcgttggggttcagttccaacttcttgcggaggcggctaacctgggtgtcgatgctgcggtcgaatgccgaagccgcacggcctcgggcaaggtccaggagttggtcgcggctcaagacccgctggggacgctcgaccagcgccaggagaagatcatactcacccgtgctgaggggaatcgtgaccccatcctcgcgcaacaattcccgcgcgccggtgtcgagccgccaacggtcgaaacgatagcccgcagcgcggttggaacgctcagcggaatcgtcgttgcgggtccggcgcaggaccgccctgatccgcgcgatcagctcgcggctgccgaagggcttggcgatatagtcgtcggcgccgagttcgaggccgacgacgcggtcgatctcgtcgcccttggcggtcaacatgatgatcggaacgttcgattgcgcgcgtagggcacgacaaagcgaaaacccgtcctctccaggcaacatcaaatcgagaatgatgaggtcgatgcgcgcatcggccatgaccttgcgcatcgcctggccgtcggcggcaacgctgacgcgaaagccctccttgctaagcgcgcgcgaaaccaggtcgcggatttcgcgatggtcgtcaacaatgaggatgtgagcgctggtttccatgacttcctacttacctcaggagtgagatagccgctgagaaaagatgaaacgaaatttgacgggcggcccatctgtaacaatttgtcacgaagaagcgctgcgctgaaaaacttgggtgacatactccggagtagatggtcgcgaacaacaacagccaaaaccgttcggagaaaaccatgacccaaagaacgaaactgaccacaattgcgatcgtcgcgctgctttccgccattgcgataatgttcctgctccatacgttcggcccgctcccctcgttcatggtgcaggcgggctttgatgggacgtccccgatggcaggcatgtggaatggaatgggctggatgatgcttgtcgggccgctctccatgctgctgggcttcggcggctttgtgacactgatcattctgttggtcacctcgcttatccggtcctgcccaaaagctgactgacgttccagaaagaacgaggattgaactatgacacatcaaatctcacgccgcggctttcttgccggatctgctgcgctgctcctgcctgcccgcgttcgggcggcttccgatgcgatgacgctcaccgccaccacgcgcacgatcgaggtcgggggacgggcggcaaccgtcatgggacttgttaacaagcaaggcagtctcgggctaacgctagaccccggacaacgctttcgcgtcgatctgaccaatacgctcgacaaagagacaatcgtgcattggcacggtcagattccgcctaatgcccaggatggcgtgcccaataccaatccgatgctggttccaggtgaaacgcgtgcttacgaatacgccgcacgccccggcaccttctggatgcacagtcatattccggcacaggaggtcggtcttctggctgcgccgctgatcgtgcgctctccggacgatctcgccgccgaccggcaggaagtggtgctgttcctgcacgacttctcgttcaaggcgcctgaggacgtgctcagcgaagtgacaggtggagcgggcatggatcacgccgcgatgggccatgccggtgcatcgggatcgggagctatgccgggaatgtccggtatgatgggcaatatgcggggcatgggcggaatgatgggcatggggtccatgcagatggacctgaacgatttcgactttgacgcctatctggccaacgatcgcacgctcgacgaccccgaggtggtgcgggttgaacgcggcgggcgggttctcctgcgcgcggtgaacgcctcggccatgacttccttctggatcgacctcggggcggtgcgcggacggctcgtcgcgaccgacggcgatgcctgcgtccctcacgaggcaagccggttcggttttgcaccggcccagaggctcgacatcgaaatcgacatgccggcggacggatctgcactgcctgtactttgcctgcgcgaaggtgcgcgggagcagaccggaatcatgctcgccccgacgggcgccgccgtgccgcggatcggcggcctgtcggagaccgaccatccagtcttttcgagcaatttggcgcaagaagcggctctgcgtgccaaagcaccgcttgcggttcgcccggcagaccgcaggcacaacatgatgctcggcggctcgatgatgccctatcggtggacgatcaacgggcagaactggggcaatcatacccccatcccagctcgttcgggcgagcgggtggaaatcacattccacaacatgtccatgatggcgcatcccatgcacctgcacggccatgtctttcaggtggtcggtgtcggcatgcggcgcatcgcaggcgcgctgcgcgataccgtccatgttccgccgatgaacatggtcaccatagccttcgatgccggtgaagctgcgccatggatgttccactgtcatcacatgggacatctggaaaccggcatgatgaccgagcttgaggtgcaggattagcaacttgggtcgcgcaggtctgtcaattggtgcactcgcactggcagtcctcgacgtgattggaacggcggcggcttcgccgtggcgatactgcagaatgattttggcacccaagcgtggcttgctacctcattcagcagactggaactgatgtctccccgttatcggacaacaatgcgatgccgagaggcatgttaatatcgaaaggagggccaccgtgcctagtttagtcgagatagttctaaaagcagcagcggtcggtgttggcgggacgattgtcctggatgtgtgggcatttctattgcagcggctgtttaacgtgtccggaacgaactggacgatggtcgggcgctggatcgggaacatgccgaagggacagtttgttcaaaaaagcatgcctgccgccacgccagtccctggcgagaccacgatcggctggactgcgcactatctgatcggcatcggctatggagtgctcctggtcggcctttggggggccgaatggctgatcaaccccaccatctttccgccgatgatcctggtggtctgcctgctcgtgctgccctttttcatcatgatgcctggcatgggcatgggcatggcgggctctaagacgccaaaaccaaacgtagcacggctgaagagtgtcgttggccactccgtatttggtcttggtctgtatggggcggcccttctgatcgcagcagcccctaatccgatcgcttgaacggtttaagtcgcacctagaatacgttctctgtccgttcttaaaaggcggacagtttcatcactttcgtgtcatgacgcctatatcgcggttgcgagaagtatgcctgtcgttggcatggacacatcggtccgaaaccggggccgcgatttgagggctgtaatggcatccatactggtcgagaaggagacctgctggcgggtgaggcctgcggagcgggcaacggtgatcatcgatgccgccggcttcttcgaatatgcgcggagcgccatgctgaaggccgagcggtcgatcttcatgatcggctgggatttcgacacacgcatcgatctggtgtccggccaggcgacggatggcgctccggagaggcttggaagttttctcaattggctggcgaagcgccgcgaggatctgacgatccgcattctcaaatgggatatcgggctgatcaattccatcacgcgcggcgagacgccgacctatcttttgagctggatgttttccaagcgcgttcaactgaagctggatggcgcgcacccgcctctctcggcgcatcacatgaaactgctggtgatcgacgacaaggtggctttctgtggcggcatcgacatgacggttggtcgttgggacacgcgcgatcatctcgacaacgacaagcggcggcgctcgccgatggggttcgcacaggggccttggcatgacgcgacgacctgcgtttcggggcccgcggcggcggcgctcggcgaactggcgcttatccgatggaagcacgcgacccaggaaaagctcgaccccgtcgaaaccgactccgacccgtggccggacggtctggatgccgatttccgcgacatcgacatcggcatcgccaggacactgcagcaatatgaggagcagcaacaggtctcggagatcgaggcggcgaagctggcgatgatcgcgggcgcgcgcgagtgcctctatatcgagagccagtattttgcttctcggaccatcgccacggccatcgccgacaggctgcaagagccggacggccccgaagtggtgttgatcaacccggacggcgcggaaggatggctcgaggcgaaggccatggattccgcgcggatccgcctgatgaaactggttcgcgacgcggatcggcacggccatttcaagatcctctatccggtgaacgacgcccgcacccctatctatgttcatgccaagatcatgttcgccgacgacagggtgctgaagctcggatcggccaatctgaacaatcgctcgatgggctacgacacggaatgcgacattctgatcgaggccggtgagggacaggaccacatcgctgaaaagatcagggcgcatcgcaacgggctgatcgccgagcatctgggctgcgagccccgcgagatcgccgcgcaattggccgagcatgggtcgctgatcaggacgatcgatgcgctcaacagatccgatcgccgtggtctagtcgaggttccgatgcgggaactgacggcggacgaggaactgttcgccgaatccgacatcgatcccgagaggccgaccggcgtcgccaagcggatgtccgtctatctgcggcgccagcgctatcggcacgggtagcgtaagctcgcgccctggtttgccaggtcaacgcggctcctccgagcgggcgctgatggattcgagcgtctgagagatgccttctatccgatggcatgtccgcaggcgttgccgggcggctgaatttctgcacttctcaagcccgacgcggtgagccctggggttggacgctccggtgcgacttggttgggcaacgggtcgccctgcgtgttgtgctacggcctatcctgccgcagcaatgattttcaatccccatttcatattatcggcgatggcggtgaggcaaactgaacgcctgcctttgcaagccctcgccatcgcatccggcgcaagccgtagcttcttttccatgtgccgaagatcttctcgatccggccgcggatacggtggatcggctggttccaggcatcaagacgtgcccggacttcggcttcgtcacgggcccacaggaggccagatccggtgtctgccggccaagggatgaatgtgggcgtcggcctccgctacccttctgtgggcttggagccagacctttcatatttatcgaacgccagagcaactcgacgaagacgttgccccgccaccttcccgtgcgttgaaatggcaatctcagccttcctcagcatggccgcgaaatcgagggatgtgaactgtgatccccaatccgcatttttgcgaacagctctgttcggggacggcggttatcaacatccgacaggatctggaaggtaggtcttgctggcgatctatcgaaaaagccgcctgatcaaaccgagaaggctgaaacgccgaccgtggccgctattatggctaccgtgatttccgccacctaggaggctcctcagtccacctgacccatgatgtcctccatgacggtcaccatgtccaccgccatggccgctcccatgcccaccgccgtggccacccctatggccaccgccatgcccggatctcttgtgtccgcccttgaaatagtggttacccatctgaaacactttcatcgtagttagccgattgctcacgaacttctatctggggtcgcgattgccacagataaatcccgatgcggaaacttattgcattctgacgaaattttgatgtggccgtgaatggcatggccagatacgaccgccatgatcaggtcacgattgcacagacttgaaagtcaccaccctgtaagcatacaccagaaggatccgcaccagaacggccgtcgagaccggatcgacatagtccttgacgatcgtataggcctgtccgagcgcgtaaccggacaaagccagcgcagtggtccagataacgctaccgatggcggaataaagaaggaactgccaaaaaggcatacgggtgatccccgcgggaacggaaatgagcgttcgtatagtcgggacaagccttccgagcagcacggacagtcgaccgtatttttcgaactgctctccggcacgatcgatatccgctggcgacattgtcaaccatcgcccatggcgggaagcgatagctttcaggcgcgccttgcccaataccatgccaagcacataccagggaatgatgccgaggagagttccgattgaacccacgacgatgaccgccacgatgctcatgtcgccctgtgaagcgagatatcccgccagcggcatgatcagttccgagggtattggcggaaaaatgttctcgagaaacatcagcaacgctatgccggacacacccaaggactgcattatcgaatttatgaaaccttccaagagaaactccccaatcgtaatgagaaccgaccagccttggaagacgtgccgggttcaacgaaaatttatcagccgttaattggtcgccgtcaccgctcgcttcaatagtgagtggtgcttgcggatgctttctggctttattcgttgacacaatgtcgaggcaatccgcgttcgcacgcgttgccgcgcggtcgtatttccctcgatggtttaaaaaaatggaaatgccgccatattgtcaaaactgaacgatgtcgcgtgtccgcgatcagacaggagacatgacagtgacgaacaagttgagcctcgagatcccagtccttcttccagacgttgccgatgcggccgatgcctgtgtggcacggctcgtgtccgatatcggcgcacgggaaggcgtcgaaaacgtccatgtggtgccggccgcaggcgatgcgcatgccaaggtttgcgttcacttcgatccggaaaccgtgccgctttcccgcatccgcgagatcgcccgggcggcgggcgccagcatcactggacgcttcggacacgtgaactggcaggtcagcggcgtcgggcacgaacgacgcgcccgaacggttgccgaaaagctgcgttcgatcaacggggtcattcaggcggacgcaagctcgtccggatcggttcacgtcgaattcgaccgggaagccgtctcggagcaggcggttgccgaagccctgcggagcctcggggtcgagcgatcggagaaggtttcgggaacgccgtcgaaaggcgatgacgcgcatgccggacatgaccatggtcctgacgagacgaaacacagcgagggggatggccacgaccattcccatgcggagttcctcggacccaatacggagctgatctttgcgttggcgagcggcgcactgctcgggattggcgtcctcatcgaaaaactcgtggcgggggcgccgggatggttgccgacgacctgctatatcgcggcgtatttcttcggcggctttttcacggtgcgagaggccatcgacaacctgcgcatgaagcgtttcgagatcgacacgctgatgctggtcgcggcggccggtgcggcggcgctcggtgcgtttgcggaaggggcgctgctactcttcctgttcagcctcggtcatgcgctcgaacattatgccatgggccgggcgaaacgggcgatcgaggcgctggcggagcttgcgccctccgtcgccacggttcgacgggacggccagaccagcgaaatcccggtggaggaactggtcgtcggcgacacggtgatcgtccgcccgaacgaacggcttgcagcggacgggttcctgaccaagggcaattcgagcatcaaccaggcgccggtaacaggagagagcattccggtcgataagcggccggttcaggacgtcgccgcggcccgcgccaggcccgatgccgttgacggcaactcgcgcgtcttcgccggcacgatcaacggctcgggggcaatcgaaatcgaggtgacgcgccggtccaacgaaacggcactcgccaaggtcgtcaagatggtgagcgaggccgaatcccagaagtctccgacccagcggtttacagagaaattcgagcgcatcttcgtgcccgcggttctggcgttggccgtgctgatgctgttcggctgggtggtgatcgacgagccgttccgcgacagtttctaccgcgccatggccgtgctcgtcgcggcaagtccctgcgcgctggcgatcgccacgcccagcgcggtgctgtcgggcgtcgctcgcgcggcgcgcggcggcgtgctggtgaagggcggcggcccgctcgaaaatctcggctcgctgaccgccatcgccttcgacaagaccgggacgttgaccgaaggcaagccgcgcatcaccgacatcatcacggcagacggcgtgaccgaggaggaactgctgtccatggcggtcgcggtcgaaagcctcagcgatcacccgcttgccgaagccatcgttcgcgacggcaaggaaaagctgggcggcagggacatcgccagtgcgtccgatctgaacagcctcacgggccgtggcgtcacggcacggctcgatggccagacagtgtggatcggcaaggcggaaatgttcggcgccgaaggcatcccgccgctcggtgcggcgatgaccgaggcggtagcaggcctgcgcgaccgaggacgcacgacgatggtcatccgccagggtgatcgagacatcggcgtcatcgcactgatggacacgccacgggctgccgcgcgcgatgcactgaaaaccatgcacgacatcgggattacccgcatgatcatgatctcgggcgacaaccagaaggtcgcggaggcgatcgccaaggatgtcggtctcgacgaggcatggggcgatctcatgcccgaagacaaggtcgaggccatcaagaagctgcgctcggagggcaaggtggcgatggtcggcgacggggtcaacgacgctcccgccatggcaagcgcgacagtcggcatcgccatgggcgcggccggctcggacgtcgcgctggaaaccgccgacgtggcgctcatggccgacgatctctcgcacctgcccttcgcggtcggcctcagccggcagacccggtcgatcatccggcagaacgtcttcgtcagcctcggcatcgtcgccgtgctgatccccgccacgatcttcggcctcgggatcggtcccgcggtcgccgtgcatgaaggctcgacgctactggtcgtcttcaacgcccttcgcctgctcgcctatcgcgatccctatcggaacgccagtgtcaaacctgtttcaaaggatgtatgaatgaacgagaaaacagtccatcaggaccagcttgactgcctcgtggtcgggggcggtcccgcaggcttgaccgcagcaatctatctgtcccgcttccgtcgccgggttgccgtcgtggacgacggcaacagccgtgcactctggattccgaaatctcacaactgcgccggctttcccgatggtatcggcggcgcggaactgttgtcgcgcatgcgcgaacaggcagaatgcttcggcgcgcggctgatcagcggccgtgtggagcgcatcgagggcgaggccggagattttctggcgcagtgcggcccgacaacgctaactgcccgcacgatcatactcgcgacgggcacggtcaaccgcagtcccgatatcgataccgccacgcatgatgcggccatggcacgcggccagttacgctattgcccgatctgcgacggtttcgaggcgaccgatcaggcaatcggtgtcctgggcgcggactcgcgcggcgtggcggaagcactcttcctgcgcacctattcgcaggacatcacgctgctgacaatggaggccgcggacatcgaagacgacgatcgcgggcttctcgagcgggccggcatcaagctcgaaacacgccggctttcacgtctcgacttcagcgagcggcatgtatcggcttttctggaggatggcgaggcgctgcgcctggatacggtctatcccgccctcggctcggactccaacgacatgctggcccaggccatgggcatcgagatgggtgacggttgctgcatcgcggtcgatcagaaacagcgaaccagccacgaaggcgtctatgcggcgggcgatatcgtccacgcgctcgaccagatcagcgtcgccatgggacatgccgccatcgccgccaccacactgcacaacgatctgcgcgagcgagacgagacgaatctggcccggtgaccgtgcggctttcgtgacaccatgtggcggagggacaactaatcgcaatgccctcccgttgcttagaacgggatggccctgacggctgggcagaacagtcttgaattcgagccgccgcctcgacatcgattcgatgtcaatcagatggagaccctgcgccgacgccagttgccttcagcgtgaatagtcagctaggaacctcaatcgtgcgcgacggctgcatcgccgggccggggcagcaacgtttcgatgatgcggcagtcggccacggtcccgcagctgcacagcgaaatcatccggtcgagttcggcccgcagcgcgttgagatcggccaatttttgttcgacctgcaccagatggtcttttgcgatacgatcgacggcctcgcaggagcgagacctgtcgtcggaaaggttgagaagagtgcggatcgcctccaatggaaaaccaaggccgcgtgcgcgacggataaagctcaggcgcctgaggtgcgagggttcgtaagtgcgatagttgccttcggtgcgatccggcgttggcaggagcccgctcttctcgtaaaagcgaatggtttcgacttttgtgtcggtctccttcgacagtgtgccgatcgtcatctggcggcgcatcgggctctccttgtagttcctacagtgttgccgaacagatagtgtatgcggtcggaattttccaggcgcttgggatatcgccgacatctggtgccacgcgccagggacacggtggacgatagtctgcattcctgcccgacatgtttcgcaagacgctatcgcgcgtactgctctttcaggaaggcgatgagactatccatgtcggcgtcggacattcccccgaatgccatgcgcgtccctggaaccaaagattgcggcgccttgaggaagttacgcaacgtctgctcgtcccagacaatgctggctgcgcgcatcgccttcgagtaggggtagtcggtcgttgccgccttgcggcccagcactcccgccagcaccgggcccgaagagttgcgcgcccccggacctacctgatggcagtgcgcgcaactgcggaagcgcggatcgaaagtcgtcgccggaggtgctgacggttgctccgccacttcggcctgcgagatatcggcagaccgcggacccgttgcggcaccttggccgaagtcatgcatcagaaccgcgaagaccagtcccgcgaccgcgccgagcgtcgctgtggcaatcaacagacgattggctttcacggtacaggctttcgactggagatttcccggagcgactgcgtcaactgatgagctctcggagcttgcgcatacgctcttcacgcggctctttcatccgcatcaaatcgacatacttgccggcggcatccatcaggtagacgccggccgtatgctccatcgtatagttcccgccctccatcggaaccttgatcgccgccgcggcgaacgacttgagcacggcgtccgtctgcttccgggtgccgcgcagggcgacgatccggggatcgaacgcggtcatgtattgcgcaagcatttcctgcgagtcccgttcgggatcgacggagatcagcaggacgttgaacttgtccgcgtccgctcccagctcggccatgatctccgacagttcgaacagcgtggtgggacagatgtcggggcagttggtgaaaccgaagaaggcgagatagggtttgccgcgaagcgactggtcactcacgacctcgccgcgctgggaaacaagcgagaaggggccaccgaccgggggcgttccagatccggtcggagctggcaagcctggattttcagacttcagcaggaccagggccacgagagcgacggacacgatcacaacggcgatccacgtggccagtcgaaacgctcagcccgttcatggcgcggaggtttcatgtgtgccgtgattaggcgtttcctcggcttcgcggctgcccatgccttgcacaagaaacttgatctccacggcgcccgccttttcgaaggtcaacgtcgcattgaaagtcttgccttttcgcagggtccgcgtgggcttgacgaacatgatgtgattgccgtctccgatctttaccgtctgaccggccggaatattgagcgggcctgacatcggccgcatcctcatcatgccgtccgtcatggtcgactcgtgaagttcggcgcgggccgagatatccgacgtcaccgagaccaggcggtccgcctcgccgccgacattcttgatctccatatagccaccggcgacaggtgcgcccggaggggtcgcccgcgcccaagggtgttcgatttcgatcgaaccggccttgtactcacgggccgtcgcctgagtcgtgggcaccaaagtgcctgccagtaagagcaccgcgcagcaaagtaatttcaagcccaccgttccaacctcgatcgatcattatgttcgacgccgtctacagactgcagtcacttcagtgtcaacgaacatctcgggacaaaatgtcccgccaccagaagcccgtccgaggacatgttctcgttcatgcgtctcttattccgcattcgcacgtgccgtgatcggacagccctttcatcacggtgcaatccacgacccgtcctatcgcgtgaggcctgttggaaaagcatttcagacgcgtttcgaggcctctcagatacgcgatcttctcccgcacggcggcgagttggcgagcggggatgcgatgcgcctgcttacacccggcatccggcagatcgtcaagggtaagcacatcacgcactgcttcggtcgagaacccaagctctcgggcgttcttgatgaacaacagccgttcgcggtcgtcggccgcgccgtatcgacgctgattgccggccgtacgtgccgcttcgctgatgagacccgattgctcataatagcggatggtcgggattttcacgccgctgaagcgtgagagttcgcctatcgtcagcatgtcgggttccagcttcgatcctccttaagtcgccgggcaggtgtccgtgtgttgccaagtctacaccctgcagcagctacagagtcaacgatggtttggacgagcttgcgtcctctctgcaagccgatggcccgtctcgcgctccagcgcaggcaggggccctttgcaatgtccggcaaatgagttattctgcaattaattcgcatttgcaaaacaaaaagctcggggtctcgatgtccgacactttactcgatcaaaagctaaatcgccggttcctccttgccggcggcctcgcagccgcgggaggcacgatcgctttggcgagcagcgccgccgggcaggcaagccagggtggcgtgcactcgatgccgatggccgggtccagtatggcagcgacggacggagtggcgtcatccggcgcgtcggcggatctggtcgcgcacggaaacatgatcacggtcggcgccgtcgatgatgcccgcaacggcttcgatccggtcgcgatcctcagcgactgggacgtcggcacggtgtcgaagctgcccgatggccgcacgctgcgcaccttcgaggtcaatgccgaggacaaggatatcgagatcgcgccggggatatttttccccgcctggacctataacggccgcgtgccgggtccggcgctgcgggcgatcgagggcgaggcgctgcagatcatcttccgcaattacggctcgcatcctcattcgatgcatttccacggtatccacgcggcgcgcatggacggcgtgccgggcgctggcctgatccagcccggcgaggaattcgtctacgagttcgacgcgaagccgttcggctgccacctctatcactgtcatgcgctgccgctgaagcggcacatccacaaggggatgtatggcgccttcgtcatcgatccggatcccgcccgtcaccccgaccaggtcgcagccgcgcgctcgcgcctgctcggcacgcccgaaaacgccgattggcaggaactggtgatggtcatgaacgccttcgacaccaacttcgacggcgccaacgaggtctatgcggtcaacacggtggcgcacgcctattcgaagaagccgatccagatcgtgaaaagcaggccggtccgggtctacctcatcaacatcgtcgagttcgatccgatcaactcgtttcacctgcacggcaatttcttcgactactacaaccagggcacgacgctgacgccgaccctgaagaccgtcgacctgatcacgcaatgccaggccgagcgcggcatacttgaattcaacttcagggagcatgagccgggtctctacatgttccatgcgcatcaatcggagtttaccgaactcggctgggtcgggatgttcgacgtcgtggaggcgctgtcatgagcgaattcgtccctacccctgccgaagagcgcccctccgccggcgcccgctgggcgcatctcgcctggatcgtggtgccgcttgccgtgctgggcctggccgtcgcatggctgatctccaccgatcctttggcgagtttccgcaacggagcgccgccggtcgagaaactgaccgtggagcgcaccatccttggcagcgacggcatacgcctactcttgcgtgccggcggctcggagccgatgacgatcgcgcaggtgcaggtggacgacgcctactggcagttcacgcaggagccacccggccagatcgcacggggtgatacggcctggatcggtttgccctatccctgggtgctcggcgaaacacacacaattcggatggtgacgaagtctggcgtcaccttcgaccatccaatcactgtcgcggtaccgacaccgacccgcgactcgatcggtttcatctcgcaggcgatcctcggtgcctttgtcggcattctgcccgtcgccgtcggcctgatgttctacccggcgctgcgtggggtgggcagttcaggcatgaacttcctgctgtcgcttaccgtgggattgctggccttcctgctggtggacgcctttgctgaagcgctggaactcgccgcccgggccgccgccgtgttccaggggcaaaccatggtggtgctagccgcggtggccagctttctgatcctcatggctgctggccgccgagctggaaccccgactggactggcgctcgcgaccttcatcgcgctcggcatcggcctgcacaatctcggcgaaggtctggccatcggggcggcgtttgcgtctggcgcggcggggctcggcaccttcctcgtgctcggcttcacgcttcacaacattaccgaggggatcggcatcgcagcacctatcctcagccgtcggccgccgctgtggacgttcgccgccctgaccctgctcgccggtgggccggccgtgcttggcctctggatcggcagccttgccttcgcgccgcaatggtcggcgctggcattggcgattggctccggcgccatcctgcaggtcatcgtcgaagtggtctcgatgcagatgcgccagcatggcgaaggcctgcgcgccgtgacggcgccgtcggcgatagcggggctcgccgtcggggtcgcgttcatgtacgtcaccgccatgctggtgaaaatctaggttaggccactggcgggataagccgacggcgaccaccgcaaatctgcaacgcagaaaagattcgtatttctgcggaatccccattggccctgtagcgactacagacaccacgttacccttatcgacacactcaacaagggtaaagcgatgtcacctgagaccggcaaaaccataacgttcaacatcgagggcatggattgcggagcctgcatacgcgatatcgagaaggctgtgcgcacccttcccggcatcgcggacatcaaggtttcgctcacggagaacaacgcggtcgtgactcacgatccctcgctcgttacgcaggacgccattttcgaggccgttgaagatgcggggtttgacgttccgcgatgagcacattcgaactcccgatcggcggcatggactgcgcggcctgcgcaccacgggaccgcagatccgggtctcggtcgaaacgcctgagaacctgcctctcgccaaggttgacccgaaccaattggagatggctatcctcaatcttgccgtgaatgcacgggacgctatgcctgatggtggcaccttgcggatatccgcaggccccgagacaatagagcccggccatcgttccgggctgcgggccgggcattatatccgcctttcggtggccgacacgggggcggggatggatgatgccatcctcgcgagagccgtcgagccattcttctcgaccaagggtgttggaaagggaacagggctcggtctgtcaatggtccacgggctcgccttgcagcttggcggagcgatcaccattcaaagccgcccgggtctcggaacgaatgtagagctatggctcccgcaaagcgccgacgtaccagagcccgttggagcgatcgatgtaacccccattcagcccgtcagtggaacagcatagctggttgatgacgaggagcttgtcagaataagcaccgcagacatgctgaccgagttgggttatgtggtgattgaggcagcgtcgggcgaagacgcgatgcgccaggttcaagcaggcaagcactttaacctgctcgtgaccgaccatctcatgccggggatgaacggcaccgatctggcacgggcggttcgggccgtcaggccaaacgtgccggttttgctggtatcgggttacgccgagaacgagggggtcaaccccgagcttccacggctgacgaagccattccgcaaggatgagctcgcggcaagcctcgctcagatctcgacggaagctcgagagtctggcctaggcaaggatttggcataacgctgtcacacgcaccggcccgccacggtcatatgatgatcgtggcaagctggcctctctccggagttgttccagcaattttacgttgccggaaaatcgacactggtggtgacgtcggcattggcatcgaaattcatccgaagcgcatccagtcggtcgcgcgcaatcttgagtgccgacgccccgaggaggagacgaagcggcgggttgtcggactgaactgcattgatgatcgctacggcagcctttgccggatcgccgggctgggagccagagacggagcgcgtagccaatcggcgtttccccgccgtctctgcatagtcgtcaatgacgaccgctgattcagccatcgagcggccagcccaatcggtccggaaggcaccgggctcgacaatcagaaccttgattcccagcggcgccacttcgtgcgaaagcgactccgacaaagcttcgacggcgaatttggtcgcgtgataatagccagtagccgcaaaggcgaccaaaccgcccagggaggacagattgatgatcgcgccctttcggagccgccgcattcccggcagcacagccttggtgacgtcgagcagaccgaagacatttgtttcgaactgcgcccggacgccggcgtcctcgccctcctcgatggcagcgaggtatccgtagccggcggcgttgaccagaacatcgatcttaccgaacctgctttcgatctctgcaactgcggttctgatactcgcagggtcagtcacgtcgagcgttgtcgcgacgcagcgatcgggatatttttgcaccaggtctgccagggcttcgggacgccgggctgtcgccgcgacgttgtagccagacttgagcgccgcttcggcgagtgctcgtcctaatcctgatgaggcgccggtgataagccagacagatcgatcgtcagacattgtgtttccctttcaaatgaacaagaccacatggccaagcatgaaagatgggatccgcacaccatgacgcttagagcgtttcatcttttgacggaaccatatcctgcattttcgagatagtttgcacattcctcgggctttatcgtttcgacgaggctaccgatgtgcctccacgtttcgtcgacggtcctcttctgcgcatcgcgcatccaatgttttatttttgagaaggcctgctcgatcggattgaggtccggtgagtagggcgggaggaaccagagccgcgcaccggcagctttaatcaccttgcgaataaccgccgacttgtggctgccgagattgtccatgatgacgatgtcgcctggcttgaggaccggtatcagctgctgctcgacataggcgcgaaaacattcgccattgatcgggccatcgaagacacatggtgccgtcaggtgcccactgcgcaatgcgccaaggaatgtcagggtgcgccagtgaccgtgcggagcaaaggcccgcagacgcttgcccttgggtccccagcccctgatgggcgtcatattggttttgatccaggtctcatcaatgaagaccagtcgctcagggtcgagatattgctgcaggctcttccaccgttctcgccgacgagcgacgtcggcgcgggcttgctcaagggcgaacagcgttttttttgaagcgcagcccctcgctgcggatgaactcccaaacagtattgtgggagacagcaatgcctcgcgaagccaattcggccttcaggccatgcagtgtcaggtgcgaattctggttgagacgctcgacaatgaaatcacgatgcggctccagaatgcgtttgcgatagccgcccatcttggccggacgaaccgatccggtcgcccgatggcgttgcgaccacttcacaactgaagacgccgccacctcaaaacgggcagcaacggcacggacgctttcgccgctcaacacggcggcaacaacgcgctctcggagatcattcgatatcggtgcggtcatcggatgctggcctccatccagccagcatcaatgaatcagaacaaaactgatttgggaatcagccgcgattcagaaaagcacggaaacgctctagatcaggacttccagactgttgcacaatcctaccaacttcggcgcagcctgctgcagttcctgcccaattcccttaacgtgagtctccatggaaacgacgaaacggaggttgatcgatcacgtgcgggcgcattgccgagggccaaagcaggcaacggcggtgcctggattgacgttgtttcgcagcgaccatccgaccgagccggtgcgaagtctctacaacccccgaatctgcattgtcctgcaggggcgcaaacaaatctctcttaatcgtatgcggttcgatgtgagtcccaatgactatcttgtggcggtcatcgacctgccagtctcggccaacatcgtcgaggcgacaccactggagccacacttcgcgctgacccttgatctcgacgcggagctgatcgtggatctcatgttcgacgaagaaagccgcggcgcggtcagcgagacggcgggtgcccgaacagcatcacaaaccgatgacattctcgaaccttttgagaggctcgttcggcttttggatcagccggcggacataagggtaatggcgcctctcattaaacgcgagatccattaccggcttcttgtcggcagcctttctgcgctagtccggcaatccgggacgactggaacccaaatatcgcgcgttgctgaagcaaccgcctggatcaaggcgaatttcaacaaggctttgagcgttggtgagcttgcccagatgactggaatgagtatcacgtcgtttcatcgtgcgttcaaagcggcaacgggttcaagccccttgcagtttcgaacacgattgcgactgcacgaggcgcgtcgcagactggttctcggcggatcgaaggcaggcacgatcgccttcgaggtcggctatgataatcagtcgcagttcaatcgcgagtaccgcaggatgtttagggtatcacccctcagcgacgcaacacgtaaccacgatcacggaaagtgaagcaattggtccgaccgcgatgcgggttccaccccgtggatggacccggcactagtagctcgaacagctaatcgatggaatgacgatcggccggcttcgcaatgaggtcagaatagtttggtcacggcgaggccgatgataatcgccagaccgatgaccatgctaggcaaggccgcccggctaatgccgggaccgtgcgaagacgcggactgaaagcgcctcaggcgcccggagatcattccatgaaaccccgatagcgccacgacgaagaccagtttcgtcaccagccatccactgttgaaccatccgtaccagattgccatggtcatgccggcgagccagacgacgaccaaagcaggtgtcgtcaccagacgatcgaaacgagcgaacctggcgatgatctccggcgtcgtgtaggccagcgcaagaaccgccgccatggtgccgccaaaccagatcacgaccgcgataatatgggcggatttcaccaggtcataaagcatcggtttttgcctccgtcagtcggcgtttcagccaacgctcgttaacgacgccgccgagcggaatgaaggcgccgaccagcagacgcgcgacgtcgcttcttgaaagccagccttccgacgaagcgtttatcaccgcccagcagaacgccaggaaagccagaccatggatgggtcccatgaagcgcgcagcgtctggcatgccggcccaatgtttgagcggcacggccaccagcacgaggatgagcaatgtcatggcctcagcgacggcgagccatcgcaacatggttccgcgcctcattcgacgtccttaagaagcttttccatggcagtgacgcgtttgttcagaagggcaatctcctgtcgggcggcgtctatcgcagcgttcgtggtggcatgatagttctcgtcgcgtttggagcggctcgccgcggtcagatatttcagtgcgaaaatggcgacgatggccaccaggcacaggatcgagaaggtgaaaaatatcgtggcgttagtcatcgacgtctcctgcggcatgataggcgcctggctgagggtaagggcccgcccgggcaatgagttgcggatcgagcgacagcgcaaaaggcttgatctgataaaaatttgctaccttgccgctgtcggccggctcgaaagcgctggtcacaagactggcgcgctcaagcttgagcaaatgcattttcatcaagggcctgctgatgcctgcctccgtggcaagctgactgacaaaggcccgtcgcccatcggaaagctgcgaaacgatccacaggcgcgccggatgagccagagcttgcagttgggatagcagggtctcggaattcgtcacggcatccacttcttgtgtcactaaattcttacgcgaaagtattttatttcgcaataatagatgtcatgcggcagcttgacgcgtctctttcttatgacgaactcagcgctccgccaccgttgcgtcctcgcttcctgtcattgatgttttgggaaaccccaatataacagctaggcatctttcgacgacgatgatgcgtggatcctgttgggatctgccaatgcttttatgaaagatgcgatatgccgaaacggaaagagccagcagttgtcagcaccggaatatcaggactggacgagatcctgcgcggtggcctgccggcatctaacctttatatgcttcagggcgcgccgggatccggcaagaccacggcagcgctccagttcctcagagctggcgtagaggcaggcgagagctgcatctacgtgacgctgtcacagacgtccgcggagcttgaggcgatcgctgtttcacacgggtggacgctcgatggcattcgtgtcgaagagttgaccacctccgggtcggtcggcgaggctgacgaccagagcatcttcatgaccgcggatctccgcctggatgagaccagaaaggcgatagaagccgccatcgaggagtacaaaccacgccgcctggtctatgactcgcttctggaaatccggctgattaccggggattctcctcgcttccggcgggaattgatcggtttcaaatccttcctggccaagcgcaacgttgtcgcacttctcctcgatacccagacccccggctatgaccgcagcggggaagaggtagaaggactggcccacggggtcatccgtctcgacaagtcgctggaggaatatggcggtgtgcgccgtcgcgtcgagatttccaagatgcgcggtgtcccggtggccgacggctatcacgacatggcgatccgggaaggcgagggtgttgtcgttttccctcggatcatgccgaacaccgcatcggaaacgaccaaaccgcaactgatcaagtctggcgtcgcagcgcttgacgatatgttcggcggtggccaggaagctggaaccacgacactggtcatcggccagtccggcaccggcaagtcgacgatgtcgtcgctttatgcgaccgcggcgctcgagcgtggcgagaatgtcgcactgttcctgtttgaagagcggcttgaaacattcttccggcgctccgaaggcctgggcatgcagctccgtcaattccacaaagatggcaagctcattctccgcgacttcaacccgaacgaaatctccccgggtgaattcggtcagatcgtccaggacgccgtgactgagaacaaggtccgcgtgatcgttatcgacagcctgaccggctatctcaactcgctgccccaccgtgaaaaggcggtccgcgatatccaatcgctgctcaagttcctcgcccgctccggcgtgctgaccatgttgatcgtcgcccagcacggactgcttggccagaatgtcggtatcgacgtcgatgtcagctttctgggcgacacggtgctgttgctgcggatcgtcgagcacgaagggcggttgcgccgcaatatcaccgttgtcaaaaaacggcacggcccacacgatctcaatgtccaggaattgctgatcgaaagcggcagcgtcagcgttgtttcctacaatccccttcctgacccgaaatgaatgaggcggcaggcgaaagcgagctcgattgggtgctcgtccttgctccgtttcgcaaggatgcagactacatcgctgcgtttttgcgtgagcaggatatagcggtcaaccacagtctgatcggcgatgatctggccaatcacctttcgctgtctccaggcgtcattgtcgttacccacgaagcgttgagcgcgtcgaacattgccgcgatcggtgagcatctcgccgcccagccggattggtcggaagttccgatcctggtgctcctcgagcgggcagcaccgatcgatcgaattcgcgagcatctgcatcggtcatggccaggcgcccgtctgctgttccacacccgcccgatcgcccggctggaactggtcaacagcatccagaccaaccttctggtgcgattgcgtcagaaacaggtgcgcgacgccatcgagcgagaagtcgagctgcgcctggagctcaaccatcgcatcaagaatattcttgcgagcgtcacgtcgatttttcagatgacgcggcgcggcgcctcgacggtcgaggaactcgccgaggattttaccagtcggctgcacgccttgtccaatgtgcatacggtggtattcgaggcaggcggagaagcggcatctctctcgtcggtgatcgccgttacggttgccccgtacaatggcgaggggctcagccgtgtcaaagtgcatggacctgatgttttcgtcagtcggacctccgccacgacgatcgcgctttgtcttcacgagctgacgacgaatgccatcaagtacggcgcgctgtcacagaaagacggcagcgtcgaagtgtcgtggttggtctcggatgacgatccacagagactatcgctaaactgggtcgagaccggtggcccagcggtttcagagccgacacggcagggctacggcacgaaatacgtccgctcggcactcggcgccctgtttggatcaaaacccgaaattgttttcgagcagcacggtcttcgatgccacgcgattggcccgctggagcggcttcaatagggtcttgccgggatggcgatctgccaagggcatggggcgctgcgaccgagcccgaacaagccactgaaagccttcgagataccgccggatcaatttttcgaccggtgcgttacccgtcgaagcaggtgcctacgatcaagcgaaggttaggacggagcttcggggatggactacaacggtataactgttctcgtcgtcgaggacgaaatccttcttcggatgaatatcgtacagtcattggaagatgagggtttcagagtcttcgaggccgccaatgccgacgatgctatcgccattctcacagcgcaatccgaaattcgattgatgttcaccgatatagacatgcccggtagcatggacggcctcaagctcgcaaccgccgttcgggaaagatggccgcccatcaagataatcgtcacatcgggccatcgccatatggacgacagcgctcttcccgtcgcaggcaggttcttcgataagccatataacgcatcgaggataataagggtgatgcgggagatggtcgcatcgagctagaatgccgcctagccatcgcgggtgcgtccttcctctgctgcgatcgcaccagcgcgcagaccggtcgtacgcagccgtactggatttcgatgctcgtaaggcagcgctttagacaccggtctttgcctgcgccagatcagtgagcgcctggagactagccggcagctgactcagtcatagacattgtatcgcatccggatatgcggtcgagcgaaacgggcacggagcggccgatgaagcatctgaggaactgtgctcctctccataggttgttccttcaacagagttccttgttctcgggcactcgccgtctaaatgtgcacaaagagagattgcgatctttcggggaaggaaattgcatgaccgcaaatgtcaccacgctccaggcagcctccatggagggtcgctatcgcctattggtggacgccataaccgactatgccatttacatgctcgacaccgaaggccgggtatcgagctggaacgccggtgcccagcgcttcaaggggtacaccgagtcggaaatcctaggggagcatttctcgcgcttttatacgccggaagatcttgccgccggtattcccgccaaggctctgtcgacggctgaatccgaaggtcggttcgaggcggagggttggcgcgtccggaaggacggcgggcggttttgggcgcatgtcgtcattgacgcgatccgtgatcagcacggacatctgcttggcttcgccaagatcacccgcgacctgtctgagaggaaggcggccgaggagggcctgaagcagagcgaggaacagttccgcattctgatagaaggcgtcaccgattatgcgatttatatgctggatccggacggcaacgtttcgagctggaacgccggcgcacaacgcatcaaaggctatgagcccggagaaatcatcgggcagcatttttcccgcttctacaccgacgaagaccgggccgatgaattgccgcggaaagctctggagattgcgacgaaagaggggcgtttcgagcgggaaggatggaggcttcgcaaagacggtacgcgtttctgggcgaacgtcattatcgacgcgatccaccttgacggcaagcttattggctttgcgaaggtcacgcgcgacatcaccgaaaagcgccaggcgcagcaggcgctggaacaggctcagcaagagttgtttcaggcgcagaagatggaagctgtcgggcaactgaccggcggtatcgcgcatgacttcaacaatcttttgatggcaatcctcggcagccttgagatcgcccgaaagcgggcgctcggaggccaagatgtcgtcgaccttatcgacaatgctatcgtgggcgcaaagcgcggcgcatctttgacacagaggctgctggcgttttcccgtaaacaggaccttaagctcgaggtggtggacgcacccgcgctggttcgcgaaatggctgaactgcttcagcgatcgatcggcccctccgtcgagatcagcacgaccttcccactttccctgccgccggtgtggtcggatccgaaccagcttgaaagcgcactccttaaccttgtcgtcaacgcccgcgacgcgatgccagacggcggaacgatcgcaatctcggcccggaagcatgttttgaaggaaaagcagatccccgaccttcgtgccgggcaatacgtctgtctgtcggtgaaggacgaaggcgaaggcatggacgctgaaaccctggagaaggcgacaacgccgttcttcacaacaaagggcgttggtaaggggaccgggcttggcctaccgatggtgcaagggctattggcccaatctggagggcgactgatcatgaagtcgtcgcctagccagggcaccacggccgagctatggcttcctgtcgcggaaatggccgctgaacctcagtccgtcgcggaagtaatgccgtccgcgccagtgcctccgctgaccgttctggcagtcgacgacgacagtctcgttctgatgaacactgtactgatgttggaagatctcgggcatacggtacttgaggcaagttccggagaagatgcgcttcggcttatcgaacaggggccgccgcccgacattctgattaccgatcacgccatgccccggatgaccggcgcggaactggcccgtcaggtgatcgaacggcatcctgggctccacattgtccttgcaaccggatatgctgaactccctggcggtgacggggcggggctggcgcgattgccgaaaccgttcacacaagagcaattgaacgacgccttggccgcggccttggggtcggctgagcagagttaaacggcaacgcatggaatcaatcgtccaagatggctcagatctcgtgaaatatctggggccatcggtatatcttccgtgaccttcccggcgtgatcgccattgcgccttccctgcgtgagccaagccgcgcgctgagcacgggaatgcggtttgtcgtggagggaatgctccagcagatcaccgatgcgcacctgatagacgttccagacgacgagacgcctcaactcctcgccagtatctggatcgcgtagacttattgggccgtatatcttagcctgcaggagggttttgacgatctcggaccagagcatctcgactgcgattgaagcaaggtcaccagcgtgttcaaaccatatccttcggacgcagaaaaagaagagttagaggcgatactggctcgctctttcgggctctgatgcttgttcgacctgtcccgctctgcagcttacagagatgccgaaacgatggattttctcgcacactcgtattaagcaaaagctccatccatggagatacttcgatgccgtttagcgatcccagccaccccctctggaagccggaaaaccttcgtcgcgccattcatgccgcgggtgtcgctctatggtcgtggaatgttaccaatgatcgtttcgcaatggacgagcaggcgttcaagctttggggcatggtcaaaagcggggaggtgaacttcgaggacctttccgcccatatccatccagccgatcgtgatcgcgtgcgcgcggcatttacggcaacgcgagggattgtcggttcatacgagatcgatttcagaattatcgtcggcactgaaattcgctggatctcggcgcgaggcatcggcgactacaccgccttgcacgagggtcacatgttcggcgtgtttttggacgtcaccgggcgcaaacaggccgaagaaggcaacgagttgctcgccggcgaaatgagccatcgggtcaagaatctcctggcgatcgccatgggtctaacgactatcaccgcgcaatcgacaacgaccgctagggaaatggctcaggaactaacggctcgactggcggccctcggacgggcacatgacctggtgaggccaattcctggtgcgcaaggacatgcgacactgttgggtgaccttctgtcggttctgttggcgccctatgaagatctcggtgcgttcaagggccgcattcgggttgcggtgccccgcatgggcgtaggcgagagtgcagcgaccgccttggcgctcatcttccacgaactggcgacaaactctatgaagtatggcgccctttccgtcgataccggaattctcgacctttccggttcgacagagggcgaccaggtgaccctcacctggaccgagcggggtgggccggcggtcgaggctcccgatggtgccgaggggtatggtagcaagttgctcaacaggagtgtatccggccagcttggtgggacgatcacctatgactggtcggaaaaaggtgtcgtcgtcgttttgaagttgaacgtagataagctcgccaagtgaatggtcgatctaccatatgctgattcaaagttcatggcggtcgagtggtcgcggtggccacggccaatcaggcaacatccaatgccgcctggaacctagttccgccgacgacgagaaagccaggttggttccccaggcccgccaacgttccgcaggaagcacccacgatatttgcagacgcagtccgagacttgcgcccggagcggcagctccggggtccgtgaaacgactattgcagttttgcctcaatagcgcgcccgacgatcgtcaactgaagtatcggctgcccgcctataaaactctcttccaccagctccatcattcccacgcgctcgaccacctttccggatagccgcttgtggccaaccagccatcctttccccgccttgcgctggcgtcgaaaaaacgcgatcgcgcgtagcgcgtcccgttggctccgggtgaggctctttgccgtctcggctggaccggggtgctcgggggagggcagcatagcgttactccttcacctctggtgacggggcctccgcggcgggccaatcgttcgctggctcctcaacgtcttcagccggatcggggtcacggtcgtaagccaggcgacgttttgcaaggacgtcttgaagcgtttcgatcaccgtgacggttccatgaccctcattcgcaaaccggtcgatgatctcggcgacgagatcatcgagacgctggaacagtcgttcgccattgtcgggtctttctgtcacgatcgtccctcctcagataccgatccgccgctgctgccagtccttgtatggcgccaatagctgtccaggaaatcgttcttcgatcgcggtctcaaccatggcgatcctaacaaggacctcgctgctgttgcggtcttcggaggggatattttcgctttcgtcttccagcttctgcatcagcgcaaacagttcttcgtcggtcatcgctgaaagttggtctgcgaactccggggcattaaatcttgtccctctgccattgtctgtcggctcctctttcgtcgatgggtttggcgataacggcctagtcgtcatcgagttcaatccaaacgggggcatggtcactggtgtgctcccaggcacgcgcgaatttgtcgacgccgcaggtctgtagtcgttcccgcagtgacggactgagcaggaaatgatcgatacggaggccggcgtctcgggcgaaggcattgcgaaaatacttccagaacgtatagatccgctcttgcggatgcagcagccgaacggcgtccgcccagcccatggcaacgagctcggcataggcggcccgcacttcaggccgaaacagggcatcgtcttgccaccgctctggcttgtagacgtcgagatcggtcggcatgacgttgaaatcgccaaccagagccactggcacatcgagctcgaacagttcagccgcataggaatgcagccgttcgaaccaacggagtttgtagttgaacttcggcccgggggctggattgccgttcggaagataaagacagccgacgatcatgccatcgatggccgcctcgatgtaacggctgtggctgtcgtcgggatcgcccggaagtccacgacgtgtctcacgcggatcctgatttcgggcaaggattgccacgccgttccagctcttctgcccatgccagatagcgccatagcctgcacgctcgatctcccggcgcggaaacttgtcgtccggcgcctttagctcctgcaggcacacaacatcaggcttcgcctcggcgagccagcggaggaggacctcgagtcggccgttgatgccgttgacgttataggtggcgagcttcactaagcgtttccgtcagtgcttgccgtcacccttgtcgccctgacccggcttggcatcatgctttgcgtcgtggcgcgcatcggcggacagcgagcgggagacatcgacgctgtccttgaacttgccttccttgtcacggcggacgtagcgcttgtcggttccggtatcgatcagttcgcgcttgctcatggcaggactcctttggggttgctgcacgagaaaacgcgcgtgatcgcaaaaagatgcaccggaatcaaaagtgtagcgcagactcgcaaaacgagcgtcgcagtcggcctaagccctttaaaaatgattcgtttcgactcggaacaatttcattctgattcgcttgaatcgcctaagttgtgtcgggagttctgcgtcatggttgccccaagagcgaattggaaaggcttcatcaaattcggagaggtcgcctgtccggtggctctctacactgcggcctcctcgtcggagcggatcgccttcaacacgctaaaccgcaagactggcaaccgtgtgaagcgagaattcgtcgacagcgagaccggcgatcctgtcgagcgcgacgaccaggtgaagggctacgagatcgagaacgggcagtacattatccttgaacctgaggaagtggcagccgcagttcccgacagcgacaagacgctgaagattgatgccttcatcccctgccacgagatcgacgacgtctatttcgacaagccgtactatctggcgccggacaagatggggacggatgcctttctgctgctgcgcgacggcatgaaaaaggccaaggtcgcggcgatcgcgcgcaccgttctctttcgccgcatgcgcacggtgctgatccgtccgcacggcaagggcctgatcgccaccacgctcaacttcgattacgaggtgcgctcctcagaagacgccttcgaggaactgccagacctgaagatcgaaggcgaaatgctggaacttgccgagcacatcatcggcaccaagaagggcagcttcgacgccagcaccttcgatgaccgctatgaggcggccgtcgccgagctggtgaaggccaagatcgagggcagggcgctgccgaagaagaaggctccgcccgcttcaaagcccagcgatcttctccaggcgctcagagagagcgccggcattgatgggaagaaagccgagccgaagcggacggcggccaacgccaacaagggcacggcgcgtcagaagccggccaagcccgccgctgccaaatcaaagtcggcggcgtcgcaaacccgccgcgctagttgatcggaggagaccatggcagttcgcccctattggaaaggctatctcaagctttcgctggtcacctgtccggtgcagatgatgccggcgacctccgagaacgagaaggttcgctttcacaccctaaaccgcgaaacccagaaccgtgtcgtcagccactatgtcgacagtgtcaccggcaaggaggtcagagacgaggatgaggtgaaaggttaccagcgtggcgagaacgactacatcatgctggaagacgaggagcttgagaacgtcgcgctcgacagcacaaagacgatcgacatctcgaccttcacgccgcgcgacagcgtggaatggatctggctcgacaccccctattacctgtcacccaacgatccggtcgggcaggaggccttctccgtcatccgcgacgcgatgcaggcgaaggacatggtcggcatttcacggctggtgatctcgcgccgggaacgcgccgtcatgctcgagccacgcggcaagggtatcgtgctctggacattacgctacggggatgaagtccgtgacgaggatacctattttgccgggatcggcgatgagacggcggcggattccgacatgatgcccctggtacagcaactgatcaaaaagcagatccagcactggaacccgaagatggtgatcgatccggtccaggaccggctgctcgacatcatcgcggacaaaaagaaggcgctgaagaagccgacgaaggccaaggcaaaagcgccggcctcagcgcccgccccgaacaacgtcatcaacatcatggatgccttgaagaagtcggttgccgctgaaactcggaccggcaaatgaaaagacccgcgaagcccctcttgcaggacgacagtctttccgccaaatcgcagccgcgtcgaaagcgcgatccggcgcagcccaacctccccttcgatccgatgcccgatcgcgtcgaaccatgcctggccttgctaaaggccgctccaccggtcggaccggattgggcttttgagatcaagtgggatggctatcgtctggcgatccacatcgagccaaagggcgtccggatcattacgcggggcggccatgactggacacatcgctttcccgcgattgcggcagctgccaaagagcttggggttggaaccgccattctggacggagaagccgttgtgctgaatagcgagggccggtccgacttcggaacgctgcagcgctcgctcggcggtcgcggcggcaagcgtgcctctgaggaatccgtcctcttcgccttcgacctcttatacttcgacgggcacgatctggcgaaaaccgagctgtcggtccgccggcatctgttgacggatctgctcgacggtgcggttggggcgatccaacattccgaggaggtgcagggtgacggcgccgagctcctggagaacgcccgctcgctcgggttggaaggcatcatcgccaagcaccgggatcgtccgtaccgctcgggcaggaccggcgactggctgaagatcaagtgcgtccaaagcgagagcttcatgattgtcggctatgagcagtccgccaccgcccgtggcgggatcggcagcctgttgctcgccgcccggcgcggccacgactgggtctatgtcggtgaagtcggcacgggcttcaaggaaaaggacgccggctacctgaagaagacgcttgataagctcaagacgcggacgccggcagtacctctgaagggcaagaactacgtcttcgcacagccgacgctgatcgctgagatcgagttccgcggctggaccgacgatggcaatctgcgacatgcgtcctataagggcctgcgtgaggtccaggacaatgctgcggtttatgaactcgactgaccggctggcgtaaccgcaaattttttcgaccggtgctcttgaatcggaaattcccaaaaaccaaatcgtttgccgccagttgctgaagacagggctggccttgctgggagcgccgcctttcggcgcttccgtacccatgttgcttcaaggaggatatggctatggcaacatcttatgactacgcacccctgttccgttcgagcgtcggcttcgaccgggtcttcaatcttttggaaaacgcccagcgtgcccggtcgatcagcgactggccgccctatgacatcgtcaagaccggggacgacagctaccgaatctcaatcgcggtcgcaggctttgccgaggacgatctcgatatcaccttccagtccaaccttctgaccgtcaccggcaagaagcaggagaccgccaatgacggctacctgcatcgcggcatcgccggacggccgttcgagcaccgcttcgagcttgccgaccacgtcagggtgaacggagcggatctgagcaacggtctgctgtcgattgatctcgtccgtgagatcccggaggccctgaagccgcgtaggatcgatatccagaccaatccggctgtcacgcagaaggccgcgccggtgcaaatcgaagcgcagaaggccgcttgatcgagacccttggagaacgggcgccgtcgcggcggcgcccatcaacatcgcgggttggaaaggagagcgtcatgaaacccgatatgttcagagaacctgttaccatccttgttggcattggctttcccgctgaggtccgaaccgttatggatgcttaccggcatctggccgattggccggcctcaaaccgcgacaccgcacattcgatcgcgctcaaggcatgccgcgccgcgttgcgcggcgagatcgaagcggaaaccgcgcgtggcctgtttgccgcctttgccgagaagcatgatttgctcgcgccagacactgacgacatcgcagcctcccgttggcggcacgacaaagatccgcacgttcgctgaggaggccgacatgcacgagattttgcagcaggcggccagcaacgctatagcgatgggaccaacggtcctgctccagggcatacagatcgagcggccgcttgacgtggtgaaagcgactgcactctccgcagacgacaaacggacgatcttggcgtcttggggctcggacttctacgcggtcgactcgaaaccggcgttgcgccatatgcctggaacgtcgcagccggtttcgatcgacgaggttcagactgccctcaaagaacttgatcggcgttacggatagtgagtgagcatgcctgccgaacgggccgttcattcctctgtcggccgtttgcgatcgagatcggaatggtcgagaccgaagtgttccagaacgaggtcgaggttgcggcggttggatttgaagtagacgtcgaacaggtccccgaccaacggaacgctcccagccgccgcatcgaaaccgatattgaccagcatcttgagaagcttgtcattcggcacgtcaaggcgccgcgcctcgttgacgatgtagagactgatcgcagcgccggcgaagtcaccgacacccggaaccaacccgatcactgaatcagctccgaaggaaaagcgcgttcctgggatgcgcaacgccgtgtccatgagccgcgccaacccacgcatgcggcgaaggcggacgatccggtcaatgtccccgaaatccgtgtgctgagtatctgctcgctcgtatgtcatgccgccactttcatcatcttgcccagcctcttgatggcctcctccagcgagcgctgtccgtcacaatagtcctgccaggcgctcgtcttcgccagcaggcccggcacggtgcggaccgtgaagcgtttcggatcgagatccgtcttcacctggctccaggtgagcggcatcgatacggtggcgccaggacgggcacgcggcgatagcggcgcgaccgccgtcgccatccgatcgttgcgcaggtagtcgaggaagatgcggccgttgcgttggtccttggccatcttgatcagataaagctcagggttctcgcgtgccatctgcaggcagacatcgtgtgcgaacccttttgcctccggccatgtcagcttcttgcccttcgccacggcaagcggggtgacgacatgcagacccttgccaccggtggtcttgcagaagctgacgagcccaagttcctccagccggtcgcgcatttcccgagcggcctcgacgacgatggagaacgggacatccggaccgggatcgaggtcgaagacgagacggcccggcacctccggctgacccggttcgcaattccagggatgtagttcgacgccgccgatctgggcgatggaggcaaggccctcgacccgatcgatctgcagatagggtttcttgtcgccgaacaccttgaccaattccagcaggttcgacgttcctggcatcgcatgccgctggaagaactgctccccgccaatgccgtcaggcgtccggatgatcgagcatggacgccctttgatatggtcgatcaaccatggaccgaccgcttcatgatagcgggcgagatcttccttggttaccggctctccgtcgttggcgtccggccagaggggcttatccgggctggagatcattacgcccatcacctcggccttgacgttcttgccacgcgcgggtctcgatggctttgtcgcggccggcgtgggagtgtcggtctttgccggcgatgccggtttttccgcctcgacttctgccgcgggtttatcttcgcgcaatcccttgaaggccgcctggcggacgaggccgtccgccgtccagccggcgaactggatctcggcgaccagttctggtttgacccagacgatgttgggatccttcttcggggcgccgatgcccgtgaacggtgatttgtcggcctcgatctcacggagcctcggcaagatcgtatcgaccgttttggcaccatagccggtcccgacccgcccgacatagacgaagtgatcacccctgaagacaccgaccaacagggaacgaaacttaccgttggtcttggcataggcaccgatgacgacttcatggccggcgcggcatttggacttcgcccatgtgtcggtgcgaccggattgatagggagcatccgcctgtttcgagacgatgccttccagcgagagcttacaggctgacttcaggacggcatctccgccagtctcgaaatgctccacgaaccgcaggcgtggatccccgccggcatcatccagcaatttctgcagtcgttccttccgctcggtgagcggcagttgccgcagatcctcatcgccctcgaacagcagatcgaaggcgaagtagaccagtgcgtcggtcttgccttccgacagtgcggcctgaagtgctgcgaaatccggcgccccgttttcatcgagcgcgcagatctcaccatcgacaatggcattgggcaggcttgcggccgatgtcgcgatcgccggatacttgcctgtccagtcgaggcccttgcgggtcttgagcgtcacctcgccgttttcgatgcgcgtctggatgcggtagccgtcgaacttgatctcgtggatccatcccttggccgcgggtggccgttccagcgtttcgcaaagctgcggcgcgatgaagtcgggcatcgcagactttgctggtttggcagttttagctgagctagttttccttttagtttttgtttcggctttgcgttcttcagcagcaaggccgtggttgctgtcccacaccgcatctgcctgaacgtcgccactctggaccatgaacggcttcggcttcctgcccttcccggcggcgatcgcttccatggttcggccggaggcgacggaggttgcgttgtcttcaaggaccgccgcgccattctcctcgaccgaaaaatcgtcgtgatgcttgatcagcagccagttcgtccgcttgccgccgttgcggtcgttgcgcatccgcaccagcacgtagctgccatgcagccgctctccttccagggtgaacttgaagtcacccttggccagcgcctgctcgggcgtcttgttgccttctggctcccaatagccacggtcccagagcatcaccgtgccgccgccatattgacccttggggatcgtaccctcgaaatcaccgtagtcgagcgggtggtcctcgacctcgactgccaatcgtttgtcgtgcggatccagcgaaggacccttggtcaccgcccaggacttgaagacaccctcgagttcgagccgtagatcgtaatgcagccgcgttgcgtcatgtttctggatgacgaagcgcctgcggttcgatgccttcagcttcgccgcgccgctcggctcctgcgtcttctgaaaatcgcgcttctgcttgtaggtcgagagcttgtcgcttgccatggcagtccccggtacaaatccgcctcctgtcacgtccggttgtcacagagcgcgaccttagcaggcaaaaagcgacagattgtcgttttgttccatggagttgggcaggggcggtggacaacagcgccatcggctttgaatgaccggccgggcaccaatggaattgatatgcgctctcagcataactgcgctgcagcaaagtctatttaataggcggcctaatcgagtatgatctctgcatcgaactgatgcacctcctcccgcgtcggttcgatatgcggacgtccactcctcctcccaggggcgtttgcaggaacggcaacactcctcctcccagttgctgttcggttgttttcgaaaagcctgccgcacctcctcccgcggcaggttttttcgttttggtcgctgtcacgccgccgcatcttccgctccttgtgcaaaacgcgaaaaaaatgaggtggtggagtcacttggctcccaccggctaggctcctgattcgtttcatcatttcgcccacagcgctttagtagagcctaaataagctcagtaagaccgacttgactccttcgagggagcggaacaaaagaggaacgtcaacaattttcggggacatgaagtccatgcaacgcgaaccgaggaggtccgtgaacgatgtcgcgcgcctacaatcctcgggtgatcgaggaactcagagaccggatcgcgcacctggaggggagtacgtcaagaaaagccgtcgtgcttcccttcggcgttcgccaaatggacgaacggctaccgggcggcgggctggcctacggtgctctgcatgaaattgccggtggcggcgccggcactgtggatggcgcggcggcagcgttgttcgccgccggcattgctgcgcgctcgaaaggcaaggttctctggtgcctgacgaggcctgatctcttctttcccgctatcgcccaagccgggttgcatcccgaccgcgtgatcttctgcgaaggcgataaggaggaagatgtcctggcgtccatggaagaagggctctctttcggcggcttggcagctgtggtgggcgaacttgttcgattgccgatggtggcatcccgccggctgcagctggccgccgaaaagaccggaaccatggggctcgttgtccgcagatggcgacggcagacagaagcgtcggacttcggcaatccgacagcctcgacgacgcgatggagggtgagcgtgcttccgtcggaagaactgccagtggcaggggtcggccgggcccgatggctggcggaattgatgcgcgtgaaagcaggcgagtgtgctgagtttgaattgggagcctgtgatgccaagggtcgtgtgtgtctacttcccctttctgccaaccgaccggatacgtcgacatggagaggcagccgtgccagctgatcagccgctcgtcgtcatttccaaatcggggtcgaaacgctggatctcggcggcggataccgccgcccgcaaactcggcctcaagctcggcatgccggcgagcaaagcccaggccatcgtcgccaatctgacgatgatcgacgccgatcctgccgccgacgccgctgcccttgagcgcctcgcgctatgggcgctccgccagtacagcccggtcgttgccgtcgatggcgtggacgggatcgtcatggataccgaaggcgccgatcacctgcagggcggtgaagatctgctgatctccgggttggccaacggcttgagagcacggggcctgaccgcacgtgccgccgttgccgacacatggggagccgcgcatgcgatcacccgcgtgacgtcggctgaaacgacggttgtcccggtcggcggcgttgcgagagcggtgactggcctgccgatccactgtctgcgtcttccatcagacaccatccatggactgcgggtgatgggcgtcgagacggtcggtgaactctccgcaatgccacgtgcgcccgtgacgctgcgatacggtccagaggttggccggcggctggatcagctctttgggcgaatggcagaacccatcgaacccctgcgcactcctgagcttgtcgaggcagcgaagaactttcaggagccgatcggcgcggcagaaacgatcgccaaatatgtgcgccgactggtcggcgaactgaccaccaagctggagacacgtggtctcggtgtcaggcgttccgatctcgtcatccatcgtgtcgacaacacccgccaatgcatccgagccggcttggcaaaaccggtgcgcgaccccgcccggctgtcaaagcttctctgcgaccggatcgagaaaatcgatccgggcttcggcatcgaacgcctggtgcttgtcgccatcatggcagaaccgcttgaggagcggcaggctgcatcctctctgatcgaagaacccgtcgtcgacgtgacgccgcttgtcgacattctcggcaaccgcggccagcggctttaccgggtcacgcctgtcgcctccgacgttcccgagcgatcggtgatgcgtgttggcccgacggccgacgaaaccggggcgacatgggccgccaagtggccaaggccctctcggctgctggcgaacccggaacggatcgacgtcaccgctctgcttcccgatcagccgccggccgtgttcacctggcgcggaaagcgccgtcgcgtgaagcgcgcggacgggccggagcggatattcggcgagtggtggcttcgcccgagagaacatgccgccgttcgcgactatttcgtcgtcgaggacgaggcgggtgaacgctactgggtctatcgcgcgggtgacggcgtggatgctgacacgggctcacacctctggtttctgcatggggtgttcggatgagatatgccgagctccaggtcaccacgcatttctccttcctccgcggtgccagttcagccgaggaactgtttgccacggcggccgcgcttggcattgacgctttgggtgtggtcgatcgcaattcgcttgccgggatcgtgcgtgcatgggagggggcaaagaccacaggcgtgagactggtcgtcggctgtcggctcgacctttccgacggcatgtcgatcctggtctatccgaccgatcggccagcctattcgagacttacccgcctgctttcgctcggcaagagccggggcggcaagggcaagtgcaccctcgatctatctgatgtcgaagcctatagcgctggcctgattgccgtccttattcctgacgaggccgacgagaccaccggaggtcaacttaggaagatcgccgcgatcttcggcgacagggcctatgtctcattgtgcctgcgccgtcgaccgaatgatcgcctgcggcttcacaatctctcgaacatggcgacacgtcacaaggtgaagcccgtcatcaccaatgatgtcctgttccatgataccagccgccggcagttgcaggacatcgtcacctgcatccgcaatcggacgaccatcgacagcgtcggcttcgatcgcgagcggcatgccgatcgcttcctgaaagcgccggaagaaatgcaccggctgttctcggaatacccggaagcgcttgcgagaacccgcgaaatcgtcgagcgctgtcgtttcgatatgagcgagcttcagtatcaatacccggaagaggcgctcgtgccgggccttgatgcccagcagtcgctgaccaagttcgcctgggagggcgccgcaaatcggtacccggaggggatccccgacaaggtccgcaaggcgatcctgcatgagctcgaactcatccgggttatgaaatacgcgccatacttcctcaccgtctacagcatcgtccggtttgctcgctcgcaagggattctttgccaaggccgggggtcggcggccaactcggcggtttgctactgcctcggcatcaccagcatcaatcccgagacgggtgacctgctgttcgagcgtttcgtttcgatggaacgcgacgagccgccggatatcgacgtggatttcgagcacgcccgccgggaggaagtcatccagtggatatacgagacctatggccgctcacgctcggcgctctgttccaccgtcacccgctaccgtgcgaagggcgcactgcgtgatgtcggaaaggcgctgggactgcctgaggatctgatcacccagctttcgtcaggcgtctggggctggtcggaaggtgtcggcgaaaagcagctcaaggacaacaacatgaacacggcggactaccgtctgaagctggcgcttgacctttcagcccagctgatgggcgcgcctcggcacctcggccagcatccgggcggtttcgtcctgactcaggatcggctcgatgatctggtgccgatcgaaccggcgaccatgaaggatcgccaggtcgtggaatgggacaaggacgacatcgaggcgctgaagttcatgaaggtcgacgttttggcactggggatgctgacctgcatggcgaagtcattcgagctgctgaaggaacataagaatattcccatgggcttggcggatatcgagcaggaggatccggccacatacgctatgatccgaaaggccgataccctcggcacgttccagatcgaaagccgcgcccagatggcgatgttgccgcgcctgaagcctcggacgttttatgacctcgtcgtgcaggtggccatcgttcggccgggacccatccagggtgacatggtgcatccatatctgaggcggcgagaaggcaaggaaaaagtcgagtacccgacccccgagcttgaggccgtcctcggcaagacgctcggcgtcccgctgtttcaggagagcgcgatgaaggtcgcgatgacctgcgcgggctttacggccggcgaggcggaccagctcaggcgcgcgatggcgacgttcaagttcacgggcggggtgtcgaagttcaaggacaaactcgtggagggcatggtcagcaacaattacacccgcgaatttgccgagaagaccttcacgcagctcgaaggcttcggctcctatggctttccggaaagccacgccgcaagcttcgcgctgatcgcctatgcgagctcgtgggtgaagtgtcaccaccccgacgtcttttgcgctgccttgctcaatagccagccgatgggattctacagcgtcgcgcagattgtccaggatgcccgaaaccacggtgtggaggtccgtcctgtctgcgtcaatcgctcgcgctgggactgcacgatggagcggatcggcaattctgaccgtattgctgtccgtctcggaatgcgtgtcgtgaagggactgtcgacaaacgatgcggcgcgcatcatcctggcgcgtgccgaccagccgttcgtatcggccgatgacatgtggcgacgttccggcgtatcaccgtcgtcgctggtgaagctggctgaagcggatgctttcctgccatcgttgcaactggaaaggcggcaggcgctctgggacattaaggcgctcagggatgaacccctggagctttgggcggccgccgctgagcgtgaagccaaggtgatcgccgagatgcaggagcctgaagtgacgctgaaatcgatgacggagggccgggaggtggtcgaggactactcacatactggtcttaccctgcgagcgcatccggtttcgtttctgcgaaaggacctcgaccgaaaaggcatcgttacttgtgccgaggcgatgggacaacgcgacgggagatggctttggacggccggccttgtcctggtgcgacaacgaccgggatcggcgaagggtgtgatgtttctgacgctcgaagacgagaccggtatcgtcaacgcggtcgtctggtcatcgctgtttgaacgccagcggcgggtcttgatgacggcgagcatgatggcgatcaacgggcgcattcaacgggaaggcgaggtcgttcatctggtcgcccagcggctgttcgatttctcgaccgatctggcgagcgttggcaaccgggacggcggcctcggcgactttccgcttccccatggtcgcggcgaccaggtcaagcacggaggaggaccggatccacgcgataatcccaagcccgctgtgcaagctcgtgatatctatatacctgatctccatatcgataatctaaaaatcaaatccagaaacttccactgaggagaccggtgtgtcgcgcttgtttgcagtcaccaaaagcctggaggaaattgtcacgcatttcgcggtcgacatggcgccggcgcttgaggtgccgagcgaaactgtcgaagggacccacggactgattgtgttggagaaggacggactgcggctgctgaagtcgatcccgtggggctttccgcgacagacccgcgacatgcgacgggaaggtgagcccccgagccgaataggccttgttgccgatcttaccaatccgctttgggatcgcatcgtcgtcgatcccagatatcgctgcctgatcccgctcacgcattttgcaaatcccgacggtgtcaaaggggcgaaaacccgctcctggttttcgaagaaccgccaacctttgatggcctgggcagggttctgcaagaacacccccgacttcggtcccgtattcgccggcatgaccatgaccgccaacgagaagatcaggccgttcaacgaccgcatgcccgttctgctcgagcggcaagaatacgatcgctggcttcatggttcgatcgaggacgtcatcgctttccagtttcgggagccgccagcatccgatgacttcgaactcctgcatacgcgtgaccgctggcaaagcggcgtttcgccctccaaggcttcaccccatcgggacgacatgcttatgtaaccgaggtctcgtgctcggtttccagtcgaaaggtctgcagaatgtgtaacttgtacaccgtccgtctgtccgccgcggaagtggccgcacactttcgcgtgccgaacccgatgcagtcgaacgctcctgaagaagtctatcctggtacaccgggaatggtggtgacggagaccgaaggcgttcgcgagcttcgctcgatggtgtggggctttccgctacgtctgaaaggcatgaagccggaagccaagccaaagccggtcaataacattgctgaccttgcgaaaggcatgtggatcggtcttgcccgaaagccgcaatggcggtgtctgatccccgtgacgggttttgccgaagccgagggtgaaaagggcaggatgacccgtacctggttttcgctgaaggaccagccggtgttcgcctgggcagggctgtggcgtatcagcgacgagtggggtccagtttactccggtgtcatgacggacgccaatgaggcgatccagcccgtgcataatcgtatgcctgtcctactacatccagatgagtacgagcagtggcttcacggtagcttcgatgatgcgctcgcattccagaagcgtacatttccgcccgagttggtgacgatggagcggacaagcgagctatgggcgaaaaagaaggctgcgcccgaggcgccgctgctgctttgatggccgcttcttcctgtcgataccggaattcatgcgatgccaatcaccgaggcgcgtacgagacctttcgattaatcaccgagtaacaggatagctccattagtcccatggtcacaagagaagtcgagctcgtcaaaccacgtgggacgccgccgcaacgggcggggacatcctcggacctgatgtgaggctgaacaaacggccaaggtatcgcgaccacgacaagatccgcatcagcatcatcattgtttgtcggaggcggcctacgaaggcgtcccaatcccgctctctgtgatggcgtcctggcccggttccggatcttccacgatcaacccatatatgtggaacggcccgcggtgcaaggtgctattcagtcgatttcaccacatgggaacggtgcggtcatatgtccggcctacttgtgcggtcatgaccgctggcctcgatgaagtccgcgaagcaggtggctggatcaagggggcgcgctttgtgcgcgtcacgggtttcggcctgtcctgcttcgggatttcgtcccgtggttcatcgtctgttatgcaccctacctgccggcggttgccgggcagctcgtctcggcggtcctgcgcttatacggcggcagatcctacctcaattcctattgggtctcgataaactccacctctggtcaacaatgcccagatcatccgggcgatcttattggcgagcgccaccgctacgaccttgaacggacgtcgcgtaagcatgttcttcagccacggccaaactcggtcgcgatactgcacatgacgtagcaccgatgccgcccccgtcgtcagtaatgatcgtagtaccggattgcccatcttcgatattcgccccaaccgttctttgccaccgctggaatgcgctttcggagttagcccgatccaggccgcaaagtggcgagcagatttaaagccggcgggatccggaaccaatgcctttacggccatggcgataatagcgccaacgccaggaatggtcgcgaggcgccgcatctcatcatccttcttggcttggatgacgatctcacgttcgagcttatcgatctgcgtggcgagcatctcgatctgattgataatttcggtcagggcaaagcgcgcagccggaggcagtcgagtatcctcttcatcccggatgataggcgccagtgctttcacgttggcgatgccggtgggcgcgatgatacccaactctcccatatgggcgcgcaacgcgttgatcgcttgggttcgctgacgcacgagcagcgcccgcgttctgaggaccatcaccgctgcctgctgctctgcagtcttgaccggcacgaaccgcatcgtctttcgcgtcaccgcttcagcaattgcctccgcatcagcggcgtcggtcttgccgcgcttgacgaacggcttgacgtattggggcggcagcaatctgacgtcatgtccgaaggccgagatctcccgcgcccagtggtgcgcactcgcacatgcttccataccgaccaggcacggtggcagtctttcgaagaagcgcagcacttcggcacggcgtagctttcggttgaacagcggcgtcccgtcgacgtccgcgccaaaagcctggaaaacgtgcttcgccaagtccagtccaacagtggtaacatctttcacggaacggtcctccttgtggcgtttgcaacaacgaccacactttagcactttgatgctgtcggggcgggccgttccacatcatcaagggtccgctagcaagctgcggccgcttccgcttcgcgtcgcggtgatcgcgcccggagcccgtgccttttgaggagccatcgagcgggaattggcccgctccaaagatggagccctccgatgaacaccgatctttcgcttgcgcaaaaccacgccttccagctttcccgcaccctgatggttccagtcacgctgttcaggtccggcgacgagttcggcgttctgccgagcgacgaactcgatgacgaagacgatctggagatcgt

SEQ ID NO: 7 - DNA, 196317 bp, Rhizobium matallidurans
  source 1..196317: mol_type = genomic DNA
ctgccggacatctcccccacaggtggggagattggctgggagcgcccgctcgctccagtctcaactgtttggctgggagataacaacgagtcgatctccccccttgtgggggagatgcccggcagggcagaggggggcgctacgggcgagacgccagcggctacagaccgtcccaccatcgccatctccttctaccgcgccctggtgcagagcggtgaaacccggcccgtcgaggcgctgatcgaggctctgatcgctcaaggaatccggccgctgccggtcttcgcctacagcctcaaggatcccgtctcgaagggcatcctcgaaagcgtcttcgcgatcaccaggcccgacgtcgtcatcaacaccaccggcttcgccgtgtccgcgccgggtgcggaacggcagccgactgtgctggaagccagcgatgccgtggtgctgcaggcgatcttttcggcgtcctcgaaggaggtgtgggagagttcctcgcaagggctgtcggcgcgtgatctcggcatgaacgtggcgctgcccgaggtcgatggccgagttctctcgcgagcggtctcgttcaagtcggcggcgcgctatgatgcgctggtcgaggccaatatcgttgccagcgagccggatctgggacgcatggcttacaccgcgcgtctggccgccaactgggcgcggcttcgccatgccagaccggtggagcggcgggtagcgcttgtgatggcgaactatccgaaccgcgacggcaggctcggaaacggcgtcggtctggatacgccggccggcacgatcgaggtgctgtcggcgatgcgcaaggccggctatcccgttggtgacatccccgagagtggcgatgcgctgatgcgccacatcatggacgggcccaccaattccggtcgcgacggcaaggtcgtccgcgagacgctttcaatgagtcgttacagggatttcctcgcaactcttccgaaaaagattcaagacgagatcggcgcgcgctggggcgggccggaggccgatccctatgtcgtggatggcgtcttcgcgctgccgttcacgcgcttcggcgatgtgctcgtcggcatccagccggcgcgcggttacaatatcgatccgaaggaaagctaccattcgccggatcttgtgccgccgcacggctacctagccttctacgccttcctgcgccacgaattcggcgcgcatgcggtgatccacatgggcaagcacggcaatctcgaatggctgcccggcaaggcgctggcgctttcggaaagctgctatccggaggcgatcctcgggccgctgccgcatctctaccccttcatcgtcaatgatcccggcgagggaacgcaggccaagcgccgcacggccgccgtcatcatcgaccatctgacgccaccactgacgcgcgccgagagctacgggccgctgaaggatctggaggcgcttgtcgacgaatattacgaggcgtcgggcggcgatccacggcgtatccggctgctcagcaagcagatcctcgatctggtcgccgatatcgggctcgatcaggatgcggggatatcgaagggagaaagcgagaccgaggcgctgaagaagctcgacgcctatctctgtgatctcaaggagatgcagatacgcgacgggctgcatgtcttcggggtgtcgcctgaggggcggttgctgacggatctgacggtggcgctggcgcgggtgccgcgcgggctgggtgagggtggtgaccggagtttgcagcgggcgatagctggggatgtgtttgggagtgttggtgatgtggtggggagccttgcgggcgtgatacccccctctgtcctgccggacatctcccccacaaggggggagatcgactcgtggtctgctccccaaccaaacggtgaggttcgagcgagcgggcaagcccagccaatctccccacctgtgggggagatgcccggcagggcagaggggggtatcccacccgccggcgcttccttcgaccccctgaactgcgacatggccgccgcatggaccgggccacgccccgagatcctcgcggacgtctcgtccgatccttggcgcacccagggcgacgctgttgagcgtattgaactgctcgccgccaaattcgtgtccggcgaactgccatgcccacccctctggtcccagaccagagccgtcctcgacgagatcgaaacccgcctgaaacccgccatcctcgcctgcggcgacgccgagatcgaaggcttgctccgcggcctcgacggtcgcttcgtacctcccggtccctccggcgcgccgacgcgggggcggccggatgttttgccgacggggcggaacttctactccgtggacagccgcgcggtgccgacgccggcggcctacgaattggggaagaaatcggcggagcttctggtgcgtcgctatgtgcaggatcacggcgaatggccggtgtcgttcgggctgacggcctgggggacatcgaacatgcgcaccggcggcgacgatatcgcccaggcgctggcgctgatcggcgtcaagccggtgtgggacatgacatcgcggcgagtgacaggctatgagatcattccacaggccatgctgagaaggccgcgcgtggatgtgacgctgcgcatttcaggctttttccgcgatgcctttcccgagcagatcgctttgttcgacaaggcgatccgggctgtcggcgcgctggatgaggacgagcaggataacccgatcgcggcacgcatgcggggcgaggcgacacggctggaagaggccgggctcgacgcggcgcaggcaaggcggcgggcggggtatcggattttcgggtcgaagccgggtgcttatggcgcggggctgcaggcgctgatcgatgagaagggctgggagcggcgcgccgatctggcggaggcctatctggtctggggcagttacgcctatggcgccggcgaagagggccgggccgagcgcggcgtcttcgaggagcggctgcgctccattcaggctgtcgtgcagaaccaggacaatcgcgagcacgacctgctcgacagcgacgattactaccagttcgaaggcggcatggcggcggcggcggagacgctcggcggcatcaggccgtcgatctatcacaatgatcactccatgccggagaagccggtcatacggtcgctggaagaggagatcgcccgcgtggtgcgcggccgcgtcgtcaatccgaagtggatcgatggcgtcatgcgccatggctacaagggcgcgttcgagatcgccgccacggtcgattatctcttcgccttcgcggcgaccacgggcgcggtcggcaaccatcatttcgaggcggtctatcaggcattcgtcgtggatcagaaggtgcgcgatttcatgctcgggaagaacccggccgcctacgaggaaatgaaggaacggctgctggaggcgatcgagcggcggctctggacgccgcgcagcaattccgcgcggttcgatcttaccgcgacagacaacacacacgacagatcaggcggcggcgatgccgccgatcgattgaagcttgcatccggggaatagcgacatgaccgaggaaacgaccgagaccacgacggaggccactggccacgacgatgcccgccacagcgagaagatggccaagaaaaaggccgcgcgcgacaagatcatggcgacgaagacgggcgagaagggcctgatcatcgtccacaccggcaagggcaagggcaagtcgtcctccgccttcggcatgattttccgccatatcgcgcatggcaagccatcggccgtggtgcagttcatcaagggtgcgatgtggacaggcgagcgcgacctgatcgagaagcatttctccgatgtctgccagttccacacgatgggcgagggcttcacctgggaaacgcaggaccgcgcccgtgacgtcgcggccgccggcgctgcctgggagaaggcgaaggaactgatccgcgacgagcgcaattcgatggtgctgctcgacgagatcaatatcgcgctgcgctacgactatatcgatatcaacgatgtcgtggcgttcctgaaaacggaaaagccctatatgactcacgtcgttctcaccgggcgcaatgccaaggatgagctgatcgagatcgccgatctggtaaccgagatggagctgatcaagcatccgttccgctcgggcatcaagggacaggcgggcgtggagttctgatgacgcaaagctgggtcttctgggccgtcctgtcggctgccttcgcggcgctgacggcgatcttcgcgaagatcggcgtggcgggcgtcaattccgatttcgcgacgctgatccgcaccgtggtgatcctcgcgatcatcagcgcgatcgtgctggcaagcgggcagtggcagcccttctccagcatatcggcaaagacctggctgtttctctgcctgtcgggcgcggcgaccggcgcgtcgtggcttgcctatttccgcgccttgaagatcggcgacgcggcgcgggtcgccccgatcgacaagctgtcgatcgtgctcgtcgccatcttcggcgtggtttttctcggcgagaagctcaacatgatgaactggctcggcgtcagcctgatcgcctcaggagcgctgcttctcgcgcttttctgaacctcagacccccagccagacgcgtagcggattggctgggtcggacaggagcttgatcgtgaacgcgatgcagacgatgacgagcagcggcttgatcagcctggcgccgatgcgcatggcaagccgtgaaccgagctgcgcgccgagaaactggcagacacccatcatcaggccgagtttccagagcgtggcgccgaaggaggcgaagacgatcagggcgccgaggttcgagccgaagttcaggagcttggtgtgggcggtggccttgagcatgccgaaaccggccagcgagacgaatcccagcatgaagaacgagccggtgcccggaccgaacacgccgtcgtagaagccgatcgccggcacgagtgtcagtccgaagacgaagggcgtgatgcggcggtgcttgtcgacatcgtcgagattgggcttcagcgcgaaatagagcgcgatcaccacgagcaggaccggcatgatcgcacgcagcacgtcgccggggacgatggttgcgagcgccgcgccaagcgagccgcccatgacggccatcagcgccatcggcagctgttgacgcagattgacatgccccttgcgggcataggcgatcgtcgccgatccggcgccgaacagggattgcaccttgttggtgcccagcgtctgaagcggcgggatgccggcgatcagcatcgcggggacggtgatcaggccgccgccgccggcaatcgcatcgacgaaaccggcaaagaaggcagccgcggcaaggagaagaacgaggtgaggggcaaggtcgtacaatggaggaacctgtgggaatgctaatgcactgtgtcggcgcgcatgttgcatttaccggccggtgctgcaatggcttgggcgacacaggcaaccggcatttccatcccatgaccgcactcgagttcgatatcacccgccgctacgtgctcggcctcggctgcgagcggggcacctcgcccgacgaggtcatggcgctggtcttctcggccttggagatggccggcatcgtgcctgagcaggtcgccgggctggtgtccatcgattcgcgccgcgatgaaccggcgatggcggtggtcgccgcgcggctggccatcccgatgctgttcttcgacgccgcgacgctcgagaaggagacgccgaggatcgcaaacccgtccgacgtcgtcttcgcgcgggtgggttgccatggtgtcgcggaatccgccgcactcgcggcgatcgggcccgaagccgagcttgtgcttgagaaaatcaaatctgcacatgcgaccgccgcgatcgcacgcgccctgttgcggaaagagtagcgctcgctatggtggccgccaatacatgccagagaccatgcaagagggacgattatgcataaggtgatttacgatacggatccgggtgttgacgatgcgatggcgctgcttttcctgcaccgtcatgccgacatcgatctgatcggcatcacgaccgtgttcggcaacgcctcgatcgagacgacgacgcgcaatgcactgttcctcaagcgcgaatggaacattccggcacccgtcgccaagggtgcgagcgtgaccatcgatccgtcgcgcaaggaaggcgcctggccgaccttcgtgcatggcgatgacgggctcggcaacatcgacgtgcccgaagtcgtcgacgtgccgctcgatccgcgtccggcctacaagttcatcatcgacaccgtgcgcgccaatcctggcgaggtgacgctggtggctgtcgggcggatgacaaatcttgcacttgcgctgaaggaagatcctgagattgccggccttgtgaagcaggtcgtcatcatgggcggcaacttctatgtgcctggcaatgtgacgcctgtcgccgaagccaatatccatggcgatcccgaggccgccgatatcgtgctcaccgccccgtggcaggtggtcgtcatcggtctcgatgtcaccgcgatcaccacgatgagccgtggctatctcggcgagatggcggccaggggcgacaaggcggtgcagctgctcgacaagctctcgcagttctacatcgacttctacaagcatgccgtcgaggacgggatgatggtgcatgacagttgcgcctgcgtctacgtggtggcgccggagctcttcaccaccatatcgggcgccatgcgcgtggtgtgtggcggcatcgccgatggccagacgatcgtcaagcaggacggccgtcgcttcccgccgggcgactgggacggcctgccgagccagatcgcctgcaccggcatccagtcgcaagaggtcattgacctgatccgcgacacgttgctcgacgcttagtcggcaatcgtcattgttgtttcggcgcaagcacattggcgaatccattcagccgcttgcgccgatatcctcatattttgagtccgcttggtgggcttcatttggcgtgatcgtgacctgcattttcgccgcgtttgcggcgttgacgtcgtccgccgccgggcatagatcatcgtcatgatcgaaacggtactttctcacctcccggcgatggatcgcggcagtgtctggctcgtcggcgcggggcccggcgacccgggccttttgacgatgctcgcagtcaaggggctgatggaagccgatgtcgtcgtgcacgacgcgctggtcgatgccgagtgcctgaagcttgcgcggccgggcgccgttctcgaatatgcgggaaagcgcggcggcaagccgtccgccaagcagcgcgacatctcgcttcgtctcgtcgagctcgcgcaggcgggcaatcgcgtcctcaggctgaagggcggcgatcccttcgtcttcgggcgtgggggcgaggaggcgctgacgctggtcgagtataacgtgccgtttcgcatcgtgccggggatatcggcggggatcggtgggctcgcctatgcgggcatcccggttacccaccgcgacatcaatcatgctgtgacgtttttgaccggccacaattcatcggggctggtgccggacgcgataaactgggatgctataggcaagggctcgcccgtcatcgtcatgtatatggcgatgaagcatattgccgagatcagtgccaacctgattgccgcggggcgctcccgcaacgaaccggtcgccttcgtctgcaatgcttcgacgagcgcgcaagaggttctggaaacgacgctcggcgaggcgccggccgcggcgctgtcgtcaggcatcgagccgccggcgatcgtggtggtcggcgaggtggtgcggttgcgtggttctctcgattggctgggtgcgctggccggacgacggttgcatcccgatccgttccggaggtccggcagtaaggagacggcatgagtggtctgttgattgcagccccgtcctccgggtcgggaaagacgacggtgacgcttgggctcctcagggcgcttcgcaagcgtggggtggaggtcgcgcccgggaaggcggggcctgactatatcgatcctgcctttcacgccgctgccagcggtgtcgcctgtctcaatttcgatccctgggcgatgcgtcccgaactgatcgccgccaatgcgacgctgcatcgctcgggtgaccggctcttggtcatcgaggcgatgatgggcctcttcgacggggcggctgatggcaagggtacggcggcggatctggcggcgatgcttggtctttcggtcgttctcgtcgttgacgcctcgcacatgtcgcaatccgtcgccgcactcgtggccggcttcgcgggctttcgcgccgatgtgcggatcgccggcgtcatcttgaacaaggttggcggcgaccggcatgagatgatgctgcgccaggcgctcgaggcgagccgcatgcctgtgatcgcggtcgtccgccgcgacgccgagatcgcgctgccggagcggcatctcggtctggtgcaggcgggcgaacatgaggcgctggagaaattcgtcgagcatgcggcgcaggcggtctcgcagaactgcaatttcgacttcctgatgcgggtcgcgagacagggattcgcacggccatcgaccgccaatatcgaccgtttgccgccactcggcagccggatcgcggtggcgcgcgatatagcctttgccttttgctacgagcacatgctgctaggctggcggcgtcgcggcgctgatatctcgtttttctcgccgcttgccgacgagccgccggagcggaccgccgacgccatctatctccccggcggttatcctgaactgcatgccggacggatcgccgccgcctcgacctttcgggcggccatgcgccaggcggccgaaagcggggtgcggatctatggggagtgcggcggttacatggtgatgggcgacgggctggtggacgccagcggcgagcgccacgagatgctcgggctgctgccgctggtcaccagctacgaggagcgcaagcgtcacctgggttatcggcgggtctatcccatcaacggctcgttcttcgcgcagccgatgacggcgcacgagtttcactattcgtcggtggtgtcagagggcgaggcggaccggcttttcaaggtgaccgacgcgttgaacaacgatctcggcacggctggcctgcagcgctggcaggtggccgggtcctacatgcatctcatcgatgtggcggctcagctgtctgggccggcaggtggcgcgggtggaccggcacgatgaatgcgccgatcatccatggcggtggcataacggccgccgcggctctttatggcggcaagcccgaggactggctcgatctttccaccggtatcagtccgtttccggcggtcctgcctgatatccccatacgcgcctggcaccgcttgccggatcagcatctcgtgcacgcgacgcgcgaggcggcgcggcattattatggaagtggcgacagcctgccgttgccggtgcccggcacccagtcggtcatccagcttctaccgcgcttgatcgcggcgggcagacgcgtcgccattctcgggccgacctacggtgaatatgagcgggccttcgtgatggcgggagcggctgtcgatcggcttgatgggatcgacggggtcggcgaccatcacgcgcttgtggtcatcgtcaatcccaacaatcccgatggccggatctaccagccctccatgctgcttgatcttgcgcgccggctggcggcgcggcgagggcttctcgtggtcgacgaggcgttcggcgatacggttgccgacgcgagtgtcggcggccatgtcgcggatcatcccaacctcatcgtctttcgctccttcggcaagttcttcggtcttgccggtctgcggctcggcttcgtcatcgcggcgagggaaattctcgatcggatcgagagcctgctcggcccctgggccgtttccgggccggcgctgtcgatcgccgcgtccctgttgcgcacggatacagagccgctgcggcgcgcgatcgctaagcgcagcgaggcgatgcgtgacgttctgaccaagggcgggcttcgcattcgcggcggcaccgcgctcttcttgctggtcgaagacgaggcggcggatgcgttgcaggcacatctgtgcgtgcatcatattctggtccgcaagttcgattatgccccttcctggctgcgcttcggcgtgaccgcggataccaatggcgatctcaggctcgccgatgccctgttgagcttcgatcgatgatttttgaactgaaccttctcgtgctggtgcttgccctgatgctcgacaggatcgtcggtgatcccgatgtgctctgggcgcggctgccgcatccgatcgtcctgttcggcaaggcgatttcgcggatggagacgctgttcaaccgtacggaactggcgggcgaaagccgcaggcgcaacggcatgctcgtcatcgccgccctgcttctggtcgccatcgtcgccggcgttgcgctgcatctcttcttcacgcttttcgggctcgccggcattctgctcgaggttctcatcgtcacggtattcctggcgcagaagagccttgctgatcacgtcgaggcggtcgcgaccggtcttcggcagggggggctcgatggcgggcggaaggccgtgtcgatgatcgtcgggcgtgacccggaaacgctggacgagccggccgtctgccgggcggcgatcgagagccttgccgagaacttttccgacggcgtcgtcgcgcctgcgctgtggtatctggtgttcggcctgccggggctgcttgcctacaagatgctcaataccgcggattcgatgatcggccacaagtcggaacgctatgtcgacttcggctgggcgtcggcgaagctcgacgatctcgcaaactggccggcggcgcggttgtcgatcgcgctgatcgcggcgggtgcgtggcttagacgcggcggcgatgcctgccgcgaggcgttcaagatcgcgatgcgcgacggcggcatgcatcgctcgccgaactcgggacgcccggaagcggcgatggcgggcgcgctcaacgtgcagctcgcggggccgcgcgtctattccggtgtggtggtcatggagccgatgatcaatggcggcggcagggagaccgccgtgatcgaggatatcgacagtgccgtgtccgtcttttacgccagctgctcggtccttgccttcgtcgttctggtggtcttcctgtttcttctgtagatcagcgtcgataccaatattcgcattgattaccattctcctcccggcaatgccgcgcggttcttcgacatgatggggcaagtcgacacgagggtcgtcgtcaccagccgagcgggacgaaaggtcgcggaaacggttgccggctgcctttccttccatgctgtttaagcaacagtgccgtcgcaaattgcgcgtcgggctggacgaaagcattggcttttgaaatggatttgcctatgagggggaaaactatcatttccaagaggtacaggcgtgaccgctacattcgataaagttgccgacatcattgcagaaaccagcgagatcgatcgtgacacgatcacgccggaaagccatacgatcgacgacctcggtatcgacagcctcgacttcctcgatatcgtgttcgccatcgacaaggaattcggcatcaagatcccgctcgaaaagtggacgcaggaagtcaacgagggcaaggtctccacgtcggaatacttcgtgctgaagaacctctgcgccaagatcgacgaactgcgcgccgccaaggcctgatcgatacgcacaatttttttctccgccctgtcgccattcaccatggcggccgggcggttttgttactaagtaggcccacagggtcgcgctttgcgaaatcggctccgattttcgcaaggctcggtcctgtcgattagaaaatgatagagcgtcctttgtgcgtccatccgtacgcacggcgctctagccgacggcatgttgcctgtgcggccggaggatccgatgctcctggaatacttccagatgatcgatcgcgtcgaggcggtcgaccttcagaccaagacactcaaggcacgttccgtcgtgccggccaagagcccggtgttcgaaggtcattttcccggcatgccccttgtcccgggcgtgcttctcattgaaaccatggcgcaggcatccggcatgctggtgttggcggcgaccgatttcgcggcgatgccgttcctgatgtcggtcgacggcgcgaagatgcgcactttcgtcgaaccggaggcggtcctcgatatcgaggcgtttctggagcacgacggctcgggcttcgcggtcaccaaggcgaagatcaccagtggcggcaagaaggtatgcgacgcgcagctgaagctgcgcaccatgcctttcagcgaaataccgcttggtgacatcgtcaagaaacgcgccagcgaaatcggcctgatggatgcaatcgccgcgcagggagtgaatggatgagcaaggctcagaatgatgtcgtcatcacgggcgtcggtatcgtaacctgtcagggcgtcggcaaagagccgcatatcgcgctgctcaacgcagccgacgcgccgaagacggttgtcgagaccgagaagttcaagccctatccgatccatccgctgcccgaggtggactggtcgctgcagatcgccaagcgcggcgatcagcggcagatggaaaactggcagcgcatcggcgtgttcgcggcgggccttgcgctcgacgacgccggcctcaaggacaatgtcgaagcctgcggcacgatggacatgatcgtggcggccggcggcggcgagcgcgacatcaatgtcgatacgctgatcgtcgatgaaggactgaagcgcaacgaccgcgaagttctcttgaacgagaagctcacgaccgagcttcgtccgacgctcttcctggcgcagctctccaacctgctcgccggcaatatctcgatcgtccacaaggtcaccggctcctcgcgcaccttcatgggtgaggaatcggccggcatctccgccgtcgagaccgcgttctaccgcatcaagtcgggcgaatcctcgcatgcgctggttggcggcgcgttttcggccgagcgtctcgacatggttctgctcttcgaggcgatcggctcgcattcgcgcggcgactggcagcccttgtggtcgcgcaaggatggcggcatcaccagcggctcgctcggtgcgttcctggtgctcgaatcgcgggcgcatgccgaagcgcgcggtgcccatatctattcgacgatctcctccatcgagggcgatcgcggcaatcgcggcgccggcaatctcgaaaagcgcctcgagcggctgctcgagccggcccggggcctggcggctgaaagcacggcgatcttttccggctcctcgggcatgcccgagctcgcctcgcgcgagaaggcggttctggagcatcagctgccgggcgctgccattcgtggtttcggcggcgtgaccggccatgggctggaggcgcatttcaccctcgggctggcgctggccgcccttgccatcgacggcgaggccaaggttccggcattcgacggcgcccatgaaaaagcaatgacatcaggcacgaaggccgctgtcgtcacgacggtcgggcatcagcgtggcgaaggcgtcgccgttctgtcggcggacgcgtgaggagcaggcacatgacggatcaagcttacaaggatcatctcggccgcccgatcgtggctgtgaccggcgtcggcatcatgacctcgctggggcagggcctcaaggacaactggtcggcgctgatatcgggcaagtccggtatccacgacatcaatcgcttcccgaccgacggtctttcgacgcgcatcgccggcaccgtcgatttcatcgacgttccggcaccgaacgccgtcgagcgctcttacgcattcgcgcgcgagacgacgatcgaggcactggccgacgccgacatatccggcgatttcaacggtccgctgtttctcgcagcaccgccgatcgagccggagtggattgcccgcttcgaactcggcgatcgttcgccgccgccctcgcagccgggcgacgcctacgaccgcttcctgacggcgatgcgccagcgtcccgatccggcgttccacgaggcggcgctgttcggcgcgatctcggagcgtctggccgatcgtttcggtacgcgcggtcttccggtgacgctgtcgacggcctgtgcctcgggcgcgaccgcgatccagctcggcatcgaggcgatccgccagggtcgcacgaaccgtgcgcttgctgttgcgaccgatggctcggtgagcgccgaggcgctgatccgcttctcgctgctctcggcgctgtcgacgcagaacgacaacccgaccaaggcctccaagccgttcagcaaggatcgcgacggcttcgtcatcgccgaaggtgcggcgacgctggtgctggaatcgctggaatcggcgattgcgcgcggcgccaaggtgcttggcatcatgaagggcgccggcgaaaaggccgacagcttccaccgtacccggtcttcgccggatggcggcccggcgatcgcgacgatccgcgcagctcttgccgatgccggcatggacgaaggtgatatcggctacatcaatgcccacggcacgtcgacgcccgaaaacgacaagatggaatatggctcgatgcttgctgtcttcggcgaccgcatggcctccatcccgctgtcgtcgaacaagtcgatgatcggccatacgctgacggcggctggtgccgtggaagcggtgttctcgctgcagacgatgcgcaccggcacgctgccgccgaccatcaactacaccaacccggatccggccatcgttctcgacgtggtgccgaatgtgaagcgggatgcgcaggtgaatgccgtgctttccaactccttcggcttcggcggccagaacgccagccttgtcatggcgctggaaccggcttagagaaccgccttgctcctcatccctgtgcttgtcacagggatccagcagcgctgcgtccgcagcgcggacgagtcttttcacgcgaaagacttcgcgtggctggattcctgtgacgagcacaggaatgaggtatctgaccaaaggaaaatccattatgcgcgctctgcaactgatcgacgaccgcaagctcgagatcaccgatctgcctgaacccgatgcgcccggcgccggcgaagtgacgctgcgcgtcaaggcggtcgcgctcaaccatatcgatgtctggggctggcgcggcatggcgttcgccaagcgcaagatgccgctcgtcatcggtgcggaagcatccggtgtcgtcgaggcgatcggtcctggcgtgtccaacgtgcttccgggccagctggtcgccgtctacggcgcgcgcacctgtggtctctgccgtccgtgccgcgagggtcgcgacaatctctgcgaacacgtctcgggcgttcacggcttccatctcgacggcttcgcgcaggagaaggtcaaccttccggctcgcctgctggttcccgcacctcccggcgtcgatgccgtcggtgcggccgttgcaccggttaccttcggtactgtcgagcatatgctgttcgacaacgccaagcttgagccgggcgaaacgatcctcgtgcatgccggcggctccggtatcggcacggctgcgatccagcttgccaagaagatcggctgtaccgtcatcacgacagtcggctccgacgacaagatcgagaaggccaaggcgctcggcgccgatcacgtcatcaactaccgcaccgaccgtttcgagggcgtggtgcgcaagctcaccaagaagaagggcgtcgacgtcgtcttcgaacatgtgggcaaggatacctgggcgggctcgatgctctgcctgaagcgcggcgggcgcctcgtcacctgcggctcgacatcgggcgtgtccaccgacatgaacctgatgatgttgttccaacagcaactgaagctgctcggctccttcggctgccgcatggaaaacatggccgacgccatgcagaagatggggcgcggtctcgtgcatcccgtcatcgacaccgaggtcggcttcgacgatatcgaccgggcgctcgagcgcatggaatcgcgccagatcttcggcaagatcatcctgaagatggattgatcccttggagctgttcattacccggatcgtcctgaaactggaccattttcgccagtggctgatcgcgcaggtgatgttcggcttcctgaacttcctgaagatctttccggccgacggagcgatcaacttcatcgactggctgatgcgcaagatcggcccgaagatgaagcgccacaagctgattctggccaatcttcgcaacgcctttcctgaaaagagtgacgaggagatcaaccagatcgcgcttggcagctgggccaatatgggccggcttgcggcggaatacgtgtttctcgaccgtctgttcgatttcgatcccgagaagagcgagccgggcagggtggaggtgtcgggcatcccgatcttcctcgatcttctggaaaacccgcgtcccttcatcgtctttaccgggcacaccggcaatttcgagctgctgcccgtggcgggcgccgccttcgggctctatgtcagcgttctcttccggccgccaaacaatccctacgtggcgcagaaggtgttcgatttccgcagcgcgcgcatgggcaagctggtgccgtcgcatgccggatcgtccttcgcgctcgcccgccagctggaagcggagcagggggtcggcgtgcttgtcgaccagaaattcgggcgcggattgaagaccgaattcttcggccggccggtgaagaccaatccgttgctcggaaagctggtgcgccagttcaactgcgaggtctacccggcccgctgcatccgtctccccggcaaccgctaccggctggaaatcgagccgaaggtggaattgccgcgcgatgcgaacggcaatctcgacctgacagccacggcgcagctgctcaacgacaaggtggaaagctgggtccgtgaatatccggaacagtggctctggtatcatgaccggtgggagatcaagcgccagctgatctagaatgccggccattacatcttgtcattgaaaaacaggatgtcttcatcattgaacatgaagtgacgtcatgttaccgatttctgacagtcgggatgagggggcgatggtcgcctgctcatgatccggtataacatagcaattccctcactgaatgggcatgggaggcgtggtgctcgggctttttcaggcattctcgttgcggtgttcgcaaattgatgaggctataaggcttggtgacgatgcgcgggtgagcagcctcgacgggtcgatcgacgcgcttatcgaaacgattctcggataccgcgccaccaatctgttctatgcgcacatgcagatgcagttcgtcggctgcctgatcgatcagtatgccgaagacagcgaatcggtgcgcgagcatgtgaagctactctcctacatgatggagcagtatctgggttcgacggtgccgcgctggcagatgccgccgctggagcgcatggatcgcgaacgcgtgtccgcgcccgcggcctacgtgcccaacaccgacaacggcaatttcctgaactcggctatcctcgaatcgctgccggatcgggtggcggtgctgaccaaggactatcgctacctctacgccaatgccgccagttccgcctacgccaagcgcaagccgttcgagatggtcgggcggcatgtgaaggaggttctcggcgagaagcggttcgtggattgcatgaaggggatgctcgacgcttgtttcgcgggcgaaacatgcgatcacacctatgaacggcgcgaggacaacgtcgtgcagagaacgcgatatcgcatgtcgccgctgcgtgattcgtccggctatatcatcggtgcgctggtcgtctcgcaggatgccggatcgtcggcggccaatctcgccgcctgatcaggccttcgtccagaccgccagttcgtatccatcgggatcggcgaaatgaaaacggctgccgcccggaaagccgaagatcgggcgaacgatcttgccgccggcgccttcaaccgcctgcaaggccgccgacaggtcgtcggcatagaggatgacgagagggccgccggggcgaggtgcctcgacgttggtgaagccgcccttcagacgtccgtcgtcgaattcgcagtaactgggcccatagtcggtgaagcgccagccgaaagccttgccgtagaacgccttggagcgctcgatatcggcgacgttgaattcgacatagtcgatgcggagctcggttttcgttgatgtcatcggtccccccctctagatttccatcagcttcttcagcgcctcgagatcgcgcgccacatgcgccgcgtcggcctcgaactgctcgtcggtcatatccggcagccgcagcaaagtgaacatcacctcgcagccgtcgccattcgtgatgatcctgagtgcgttgtagacgcgcaagccgttggcgatcgtgacggtgtggtcgagaacgccgaactcgttatgcggggcgaagctgacacgcacggttccaagcacacccttggcaatccagtcgtcgccgcttttttcaaggccggaggcgaggccagacgcccagagcggcatattctcgggcgcgccggcgaaggcccagacgtcccgccagtttcgctcgatcgaccgatgaatgattcttgccggcattgtcgccatgggcttgctcctccttcgctgttcgtgggcggcttaacgtcgttttccgacctgtctcactgtcgcaacgatgccagcggcatcaaagccaccgagcgagcggcctcgtcggcaatatgggttcggctcgcgacagaaacaatacgcgaccgatccggggcgaatcgaacttgccggatgagccagagagtgccacaacaccggtccaatttgactaaagcgcctcgcgatcttccagattcacccgttgcgctctagatctttgttttaccgcatgtcgttgtcgcaaagccgcttcacacttttgcgcgacatgctctaaccggagagttaacgtggaaaaggcagaaatcgggctgatcggccttgcggtcatgggttccaacctcgctctgaacatcgcggaaaagggcaacaagattgcggtgttcaaccgtacgcccgacaagaccgacgagttctacgagagcgccggcgatctgaagaagcagatcattccatgcaagacgatcgaggagttcgtcgaagcgatccgcccgccacgcccgatcatcatcatgatcaaggccggtgagccggtcgatcagcagatggagctgctgcgtccgcatctctccaagggcgacatcatgatcgatgccggcaacgccaacttccgcgacacgatcgcccgcttcgaccgcctcaaggacaccgacctgaccttcatcggcatgggtgtttccggtggcgaggaaggtgcgcgccacggcccgtcgatcatggtcggcggcacggaggatagctggaagcgcgtcgagccggtgttgacctcgatcgccgccaagtacaagggtgacccctgtgttgcctggctcggcaatgacggcgccggccacttcgtcaagacgatccacaatggcatcgaatatgccgacatgcagatgatcgccgaaatctacggcatcctgcgcgacggcctcggcaagaacgccaaggaaatctccggcatcttcggcgactggaacaagggccgcctgaactcctatctcatcgagatctccgagaaggtgctggccgccaccgatccgatctccggcggcgcgatggtggacatgatcctcgacaaggccggccagaagggcaccggcaagtggtcggcgatcgaagcgcaaaacatgggcattccggcaacggcgatcgaagcggctgttgccgcccgcagcctgtcgtcgatgaagaccgagcgcgaagccgccgagacgatcttcggcaagccggagtacaaattcccggtcgcctacggccccgaactcgtcaaggatctggaactggcgctcttcgccgccaagatcggcgcctacgcacagggcttcgcggtgatggcggaagcctcgcgcgagttcaagtggtcgctgccgatgccaaccattgccaggatctggcgtgacggctgcatcatccgctcgcagttcctcgacgagatcacctccgccttcaccaaggcgccggatgcggccaacctgatcgtgacgcccgccttctcggatatggtcaaggaatcgctgccggcgcttcgccgcgtcgttggtgcggctcttcaggccggtctgccggttccggcgctcacctcggcgctcacctacttcgacgcttaccgccagggccgcggcaccgccaacctgatccaggcacagcgcgacttcttcggcgcccacggcttcgatcgtctcgacggcaaggacttccaccacggtccgtggggcagtggcgccgcgacgttctaaacggcggacaagacgtgacttgacgcaaaacagccgggtccatgcccggctgttttgcttgatgtggtgcgtcgatacgggcgggccgccacccagtaatgcctggcttacgccttccacacgggctggctgatgctctgcagcaactcgggctcgacgccgtcgatgcgggcgatgacggccttggccatctcgcgcccggcatggcggacgtcttcataggcggtgatgatctccggacggatccagttgaggatcggagccgattccttcgaggccatgtcgacgtcccggccgaggcgcttgccggcggcttcgatgccggcgttgacggcgatggcggcgctgccggcgagacagacgatgccatcgggcgcgttgcctgagcgcatcatggtttcgacggcgttgcggatctcgtccagtggcgtgtcgatggtgacgcgcagcggcacttcctcggcgccatagtcgtggaggcctgtctggaagccgatgcgggtgtgcgtgtaataggtgagcttgctcggaggctgtaggagggcgatgcgcctgcggccgcgcgcgaccagtttggcgaccgcctggtgggcaaaagcctcgttgtcgaaatcgtggaagggatgcatcagcccggcatcggtgcgtccgtgcgtcgcgaagggcatgttgcgctcgctaagcagccgcacacggggatcgtcgggctcgatgcgggagatgatgacgccgtcggccgaacctgtctccaggatgtagcggacgggcagcatcgggtccttgctgtgcgagtggggggtgacgacgatgtggtagggcgtgccggtcagcacctcggagatgccgaagaccagctggctcgagaagcccatgatctcctcgtcgatgctgagaaccagagcgatgacgttggtcttgccggtcctgagacgcacgccggcgcggttcggctggtagccgagctggctggccaccatgcgcacgcgttccttggtctccgcgccgatatcgggcgcatccttcaatgctcgggaaaccgtggtgatgccgaggccggtcatgaaggcaatcgtcttcagtgtcggtctctcccgagatggctcggtcaccgtcgccccgaaattcgctttgtttttcatccctctaggccgtcctacgcgatttggttcgcttatagatgcttttcgcagcgctgtaagcacgaatacacaaatgtcgttccctcccacgggccttaaaatctgtaacgttgcagtagaaatgtcgagcgatttttccgatcgttccggctctcgtgctctcaatggttgaatcgatggtttttgcacgaattttttgcacttgcgaacgaaaatcggaagtcatgtgacgataccagtagaatatatcgttattaaacattgtgatagcgcgtgtgtgcgattgcacatcgccggatgttggtcttgcggcgccttgcgggaaagggtctttaaagacaggcaatggtagcaaagcagggtcgaaaagaaaattttaaggggtggctgttgcgcggcaatatcgattgaactaagtttttccggcaacgtttcagtgagggaggagaactcatgaatattcgtttgatggcggcagcgctgtgcgcatccgtcgccctgccgctcggtgcggcacaggccaccgatctcgaagtcacgcactggtggacctcgggtggcgaagccgccgccgtggcggaactcgccaaggcattcgacgcgaccggcaacaagtgggtcgacggcgctatcgccggttccggcggtacggcgcgtccgatcatggtcagccgtatcacaggcggcgatccgatgggcgccacccagttcaaccacggccgccaagccgaggaactggtgcagtccggcctgatgcgcgacctgaccgatgtcgcgaccgccgagcgctggaaggacatcgtccgtcccgcgagcctgctcgacagctgcacgatcgacggcaagatctattgcgcacctgtgaacatccattcctggcagtggctgtggctttccaatgccgccttcaagaaggccggcatcgaagtgccgaagaactggaatgaattcgtcgcggcggctcctgcgcttgaaaaggccggcatcgtgccgctcgccgtcggcggccagccgtggcaggctgcaggcgccttcgatacgctgatggtggcgatcgccggcaaggacacgttcctgaaggtgttcaaggacaaggatgcggataccgcggccggtccggagatcgccaaggtcttcaaggcggccgacgacgcccgcaagatgtccaagggcagcaatgtccaggattggaaccaggcaaccaacctcgtcatcaccggcaaggccggcggtcagatcatgggtgactgggcgcagggcgaattcgctctggctggccagaaggccggtaccgattacacctgccttccggggctgggcgtgaacgaaatcatctccaccggtggtgatgcgttctacttcccggtgctcaaggatgctgaaaagacgaaggcccaggacgttctcgccaagacgcttctcgatcccaagacccaggttgccttcaacctgaagaagggctcgctgccggttcgcggtgacgtcgatctcgcggccgccaacgactgcatgaagaagggtctcgacatccttgccaagggcaatgtggtcgaaggcaccgaccagctgctttcggccgacagccagaagcagaaggaagacctcttctcggagttcttctccaatgcctcgatgacgcctgaagacgcgcagaagcgtttcgctgaaatcatcggctccgccgactgatcgtctgctcgtgctgccgcgatccggctttccgcccaggaacggagagccggatgtgccctagccgctgatggcggcgggctcgcggcagtgctttcccgatgcgttcccgccgcgagaatgcggctggaaccatccggggcaagagacgggagcggtgtccggcaacggccgctgctctcggtcacagaagcaagtgcgtgtcaggaggaaacacaatgacgggtccagcgaaagccggccggccaaatcagttgctgcgcaatctgaattccaaaatcgcatccatcccgatgatccttaccgccgtggtcatctttctcggcggaacgctctggacggtgttctattccttcaccaactcgaagctcctgccaaggatgagcttcgttggtttcgaccagtacaagcggctctgggccgcgccgcgatggatcgtgtccatcgagaacctcgccctttacggcatcttttccctgatcttcagcctggtgatcggctttacgctggccgcgctgatggatcagaagatccggttcgagaatgcgttccggacgatctttctctatcccttcgcgctgtccttcatcgtcaccggccttgtctggcaatgggtgctcaatccggaattcggcgtgcagtcggtggtgcgttcgctcggctggacgagcttcaccttcgatccgctctatacgccgagcatcgtgatctacggcgtgctgatcgcagcgctctggcagggaacgggcctcgtcatgtgcctgatgctcgccggcctgcgcgggatcgacgaggacatctggaaggcctcgcgtgtggacggcattccgatgtggaagacctatctcttcatcgtcatcccgatgatgcgtcccgtcttcatcaccacgctcgtcatcatcgcctccggcatcgtcaaggtctacgacctcgtggtggcgcagacgtccggcggacccggtatctcgtcggaagtgccggccaagtatgtctacgactacatgttccaggcgcagaacctggggcagggcttcgccgcctcgaccatgatgctgatcacggtcgcgatcatcatcattccatgggcttatctggaattcgggggagggcgtaaacgtgcctgataccatcgctctcaagaccgccgaggtcgccctttcgccggtcaagtccttcgacggaccgaatggttcgaagccgaagcgggtgctctcgccacgcaacatcatgctctacggcacgctgttcgtcgccgccgcctactacctgctgccgctctacgtgatgatcgtcacgtcgctgaaggggatgcccgaaatccgcatgggcaacatcttctcgccgccgatggaaatcaccttcgagccttgggtgaaggcctgggcgacagcctgcacgggcctcaactgcgacggtctctcgcgcgggttctggaactcggtccggatcacagtaccatccgtcatcgtctcgatcgcgattgcgtcggtcaacggctatgcgctcgccaactggcgcttcaagggatcggaactgttcttctcgatcctcgtcatcggcgccttcattccctaccaggtgatgatctatcccatcgtcatcgtgctcagggaaatggggatctacggcacgctgacggggctgatcatcgtgcactcgatcttcggcatgccgatcctgacgctgctcttccgcaactatttcgcatcgctgccgcaggagctgttcaaggccgcccgcgtcgatggcgccggcttctggcagatctttctgaagatcatggtgccgatgtcgctgccgatcttcgtcgtcgccatgatcctgcaggtcaccggcatctggaacgacttcctgttcggcgtcgtcttcacccggccggaatactatccgatgaccgtgcagctcaacaacatcgtcaattccgtccagggcgtgaaggaatacaacgtcaacatggccgcaacgatcctgacgggtctggtgccgctcatcgtgtatttcgtgtcgggacgtctgttcgtccgcggtatcgccgcaggcgcagtgaaaggctgatccatgaattcaagcgtttccatcaaagacctttcgctgaacttcggcgccgtcagcgtgctcaaggatctcaacctcgagatcaatgacggcgagttcctggtgctgctcggctcttccggctgcggcaagtcgaccctgctcaactgcattgccggcctgctcgacatcagcgagggacagatccacatcaagggccggaacgtcacctgggaagaacccaaggaccgcggcatcggcatggtgttccagtcctacgcgctctatccgcagatgaccgtggagaaaaacctctctttcggcctgcaggtggccaagattccgcaggccgatatcgagaagcgcgtggcccgcgcctcggagatcctgcagatccagccgctcctgaagcgcaagccggcggaactatccggcggccagcggcagcgcgtggcgatcggccgtgccttggtgcgcgatgtcgatgtgttcctgttcgacgagccgctctccaacctcgacgccaagctgcgttcggagctgcgcgtcgagatcaagcggctgcaccagtcgctgaagaacacgatgatctacgtcacacacgaccagatcgaggcgctgacgctcgccgaccgcatcgcgatcatgaagaacggcgagatccagcagcttgccgatccgacgacgatctacaacaagccgggcagcctgttcgtcgccggcttcatcggctcgccgtcgatgaacttcctgcgcggcgagatcgccaagcggggcgatgccaccgtgttcaccgccaacggtgtcgatttcaacgtcgatgcctatgaggcgagcgggccgctgcaggcgggccgcaaagtgacgctcggcgtgcggccggagcacatcaaggtcaacgagaacctcggcgccgaggtgcacgacgcgaccgtcgatatcgaggagccgatgggcgccgacaacctgctgtggctgaagcatgccggacatacgatgtcggtgcgcatcaacggcgcccgccgcttcaatcctggcaccgccgtcaagctcggcttcgacatgtcgctggcgtcgatcttcgacgccgagacggaactgcgcctctagacgactacgctgcgggcggcgccgtcccaagcggttccgcccgttcttccaataccacattcggccgcagcccggtgacgggttctcccaagagcggcctgatcggacagtgctatgacatccttgcccaccaacgggttcaacctcgacctctcaggctcgtggaagctcacctccacggatggtgaaatcaccgcgccgatcacgcttcccggcgacgtgcattcggcgctgcatgccgccaggctcatccccgatccctatttcggccgcaacgaagaggtcgtgcagtgggtggcgcatcgcgactggtcgatcgagcgcagcttcacggtctccgagcccgatggcgactggtatctcgatatcgattatctcgacaccgtggctgcggtcttcatcaacggctcgccggcgcttgtcgccgacaacagcttccgccgctatcgcccggatgtcagcagtcatctgaaatccggcgagaacgtcatccgcatcgtgctgcattcgagcatcgcggcgggcgccgaccggcagggcaagcagcctttctacattccctattcgaccggcaattcgccgatccccaacggcaacatgctgcgcaagccgcagtgccatttcggctgggactggaacatcgcgatcgcgccgctcgggctttacggcacgatcgcgctgcgtcggctcgacaccgcccgcatcgagcatgtcaccacccaacaggtgcataatctcgacggttccgtcgatctcaaggtctcggcgacgctgtttgccaagaaccccggcatcgttcccgtgcatttctcgctcgatggcgagcgggtgcgtctcgatgtcggcgtcagcgctggcgagaccgtcgtcaaccatgtgttcgagatcgccaagccgcgcctctggtggccggcgggaagcggcgagcaggcgctttatgcgctgaccgtcgatctgccttccgatgccgtcaccaagcagatcggtctgcgcacggtcgagctcatcaccacgcctgatgccgccggcgcccgcttcgcgatgaaggtcaacggtcgcgagatcttctgccgcggcgccaactggattcccgccgacgcgctgttttcgttgtcttcgcccgagaagaccgaggacctgctgcaatcggccaagtccgccaacatgaacatgatccgcgtctggggcggcgggttctacgagcacgatcatttctacgacctctgcgaccgtctcggcctcatggtctggcaggacttcatgttcgcctgcaacctctatccctcgaccgaggacttcctcgacaatgtcgcgctcgaagtcgactaccaggttcgccggctgaactcgcatccgtcgatcgcgctctggtgcggcgataacgagctggtgggcgcgctcacctggttcgaggaatcgcgcaaggaccgcgaccgctatctcgtctcctacgaccgcctcaaccgggtgatcgagcaggcgatgaagaaggcggcgccggatgcgatctggtggccgtcgagcccggcgtcgggctatctcgatttcggcgatgcctggcatgccgacggttccggcgacatgcactactggtccgtctggcacgagaacaagtcgttcgacaattatcgctcggtgcgcccgcgcttctgctcggagttcggcttccagtcctatacctcgctgcccgtcatcaggacctatgccgaggccaaggacatgaacgtcgcgtcgccggtcatggagcttcaccagaagaacgccggcggcaacgagcgcatcgccggcacgatgttccgctatttccgcttcccgaaggatttcccgaacttcgtctatctcagccagatccagcagggtctcgcgatcaagacggcggtggaatactggcggtcgctgaagccgcactgcatgggcacgatctactggcagctcaacgacacatggccggtggcctcgtggtcgagcctcgattacggcggtcgctggaaggcgatgcactatctggtcaagcgcttcttccaaccggtcgcggtcgccgccattccgtccgacgacggcaagcagatccgcttctcgctggtcaacgacacgcttgccgacgtcagtatcgacctgtcgatctcgatcatcgacatgaagggcgagcgcaagcacctcaaggatgtgcaggcggtctgcagccctgacgcggcggtgacggctgccagcatcgaggtctccgagatcccctcgggtacgctgctcgcctggcgcttcacggcgtcgaacggcatgggcggcgaggggcattacgttgatggcacctacaaggcgctggagctcgagcccgcgggcctgatggtcacgcacgaatatgtcgaggaggacggctctgtctgcctcaacgtcaccgccaagggacttgcgctcttcgtgatgatcgagaccgaggccgacggcaagtattccgacaatgccttcgatctggcggcgggcgagacgcgccgcatcaccttcaccccggccgcgccgcttgctgatggcgctttgccggacttccgtttctacgacctgcagtcctgccagtccgtggattgatcctgattgaaatgaatgggcacgaggcccaaggaggatactatgacgaaactgagcttccagctttatagcgcccgcaacttccagccctattcggcgatcttcgaaaagctcggcaaggccggctatcaggaagtcgaaggcttcggcggtatctatgccgatctcgacgatgccggcctcaagggcctgcgtgccgaactcgacaagaacggtctcacgatggcgagcggtcacttcagccccgatttcctcgatggcgaagtgcagaagtctttgaacatcgccaagatcctcggcatggattccatctacgcaccgcatcttgccgccgatgaacgtccgaccgatggcgccggctggctggccttcggcaagcgcctgcaggaaatgagcaagccctacaaggatgcgggctacgagttcggctggcacaatcacgacttcgaattcgtcaagctttcagacggttcgctgccgatcgagcgcatcttcgaaggcgcgccagacatttcgtgggaagcggatatcgcctgggtcgttcgcggcggcgcagatcctttcgcatggatcgagaagctcggttcgcgcatcacctcggcgcacgtcaaggacatcgcgccagctggcgaaaacaagaacgaggacggctgggcggatgtcggccatggcacgctcgattgggcgaagctcgtcgcggcgctgaagggcaccaagaccaggcactacgtcgtcgagcatgacaatcctgccgatatcgatcgcctgatcacccgctcgatcgcatccttcaagacctactgaggactatcatgaccaaggaacttggcgtcggcatcatcggatgcggcaacatctccaccacctacttttcgctggcgccgctcttcaaggggctcaagatcgtcgcctgcgccgatctcaacaggtcggcggccgaggcgcgtgccgccgaatatggcgtcaaggcgcagacgatcgaggaactgctcgccaatgaggaggtcgacgtcgtcgtcaacctgaccatcccggatgcgcatttcccggtgtcgaaggcgatccttctgtccggcaagcacgtctattcggaaaaaccgctggttctcaccctcgagcagggtgaggaactgcgccgtatcgccaaggagaagaacctctccgtcggttgcgcgccagacaccttcctcggcggcgcgcatcagctcgcccgcaagtatatcgacgagggcggcatcggtcgcgtcacctcgggcgcatgctacgtcatgagcccgggcatggagatgtggcatccgaacccggatttcttcttcctgcccggcggcggccctatcctcgatctcggcccctactacatcgccaacctgatcaacctgatcggaccggtgaagcgcgtcggcgcgatgacctccatggcttcgccgacccgcacgatcaccagcgaaccgcgcaacggcgaggttatcccggtcagaacgccgacgacgatccaggcgatcctggaattcgtcaacggcgcgacagtcacgctgaccgccagctgggacgtctggtcgcatcgccacgccaatatggaactctacggtaccgatggttcgctctacgtgccggatccgaactttttcggcggcgtcgtcgaggccagcggccgcgacaaggacatcaagccgctcgacgactgggagcatcccttcggcatcttcaaccaggagagcccgcagggaccgcgcgccaactaccgcacggcgggtctggccgacatggcgatggcgatcatcgaggggcgcgatgcgcgctgctcgctcgatcgcacgctgcatggcgtcgatgtcatgacatcgatcctgaagtcgggtgacgaaggtcgcttcatcgagctgacgacgacctgcacgcagccggccgcactcggcatcgaagaggcccaagcgcttctgaagtgattggctctcttgaagtgattggcgcttatgacgtgacgggcactcttgaagtacgtgcctaaaggtctatggtccggcgcgggcgaccaacccgcgccatttctacatgagggacgaggacatatgagctggcaaccggcttccgaccgctattcgaagatgaagtacaaccgcacggaccgttccggcctgaagcttccggccgtttcgctcggcctctggcacaatttcggcggcgacacgccgcatgaccgcaagatcgacatgtgccgcacggcgtttgatctcggcatcacccatttcgatctcgccaacaattacggcccgcctcccggcagcgccgagaccgctttcggcgagatcatgcgcaccgaattttccggactgcgcgacgagctgatcatttcgtccaaggccggctacgacatgtggccgggtccttacggcgagtggggcagtcgcaagtatctgatcgcctcctgcgaccagagcctgaagcgcatgggtctcgactatgtcgatatcttctattcgcaccgctttgacccggataccccgctggaagagacctgtggcgcgctcgaccatatcgtgcgctccggccgcgcgctctatgtcggcatctcgtcctacaattcgcagcgcacccgcgaagccgccgccatcctcaaggatctcggcacgccgtgcctgatccaccagccgagctattccatgctcaaccgctgggtcgaggacgacaagctgctcgatacgctcgatgaggtcggcatgggctcgatcgtgttctcgccgctggcgcagggcatgctgacgacgaaatatctcggcgggatccccgaggacagccgcgcggcgcagaaccacttcctcaagaaggatttcatccgcccgcagatcatcgacaacatccgcaagctcaacgagatcgccgaacgccgcggccagacgctggcgcagatggcgatcgcctgggtgctgcgcggtgaccgcgtgacctcggcgctgatcggcgccagccgctcgtcgcagatcgtcgattgcgtcaaggcgctcgacaatctcgagttcaccgccgaggagctgaaggagatcgatggttacgcccgcgaggccgacatcaatctctgggcgaagtccgccgaacgcgaataagcagacgcgcccggaacgatcttccgggcgtttttcatatccgatgtgatgtacgtgccgcaaaatgcacgcctgtgggaggagacgtcaccatgatccgcaatccaatcctgccgggcttcaatccggacccgtcgatctgccgtgtcggcgacgattactacatcgcgacctcgaccttcgaatggtatcccggcgtgcagatccaccactcgcgcgatctggtgaactggacgctggtacggcggccgctcgagcgcgaatcgcagctcgacatgcggggcaatcccgacagctgcggcatctgggcgccctgtctctcccgtgccgacgggctgttctggcttgtctataccgacgtgaagcgcttcgacggcaacttcaaggatgcgcataattacatcgtgacctcgccaacgatcgaaggcgaatggtcggagcctatctatgtgaactcctcgggcttcgatccgtcgctgtttcatgatgaggacggccgcaagtggtttctcaacatgcagtggaaccaccgcaccgagagcttcggcggcgcgccgaagtctccggccttcgacggcatcctgctgcaggagtgggatgcggagacgaaatcgctgaaggggccgatcaggaacatcttcgccggcagtgcgctcgggctcgtcgaggggccgcatctcttcaagcgcaacggctattattatctgacgaccgccgagggcggcaccggctacaatcacgcggtgacgatggcgcggtcgcgggcaatcggcggtccctacgagatgcacccgaacacgcacctcatcacctcgaaggatcatccggaagccattctgcagcgggcagggcatgggcaatatgtcgaaacgcccgacggtcaggtctatcacacccatctctgcggccgaccgatgccgccgaagcgacgctgcacgctgggacgcgaaaccagcctgcagaaatgcgtgtggaaggacgacggctggctctatctcgaaaacggcacggtggttccggatgtcaccgttccgggacttgatggcgcggtgccggtcgagaagccgacgcgtagcgaatacagcttcgacggttacgcgcttccctccgcctttcagtggctgcgcacgccgaggccggagcggatattcaacctcacggaacggcccggccatctgaggctgatcgcccgcgagagcatcggctcctggttcgagcaggcgctggtggcgcggcggcaggagcatcacagcttccgggccgagacggtcgtcgaattcgatcccgagacctaccagcaggtggcggggctgacgcattattacaacaggcacaagttccatgcagtggcggtgacgctgcacgaaacgctcggacgttgcgtgacgatcctgtcctgcgaaggcgactatccgaacggccggctgagctttcccgccggcagcggcgaggcgcttcccgccagcggccgtgtccagctctccatggaaatccgcgacaacgacctgcaattcttctggcagacggagggcatgggcgcttggcgggcaatcgggccggtgctcgacgccggcgtggtttccgacgaaggcgggcgcggcgaacatggctcgtttaccggcgcattcgccggcgtcttcgccttcgacacgtcgggtcgagcaaagacggccgatttcgactggttcaactacgaggagctttaagcggagtggcatgagcgagatcatcatcgagccgatcgcggatcggcacatcgagagctttcaccacgcgctcgacacggttgcccgcgagcgccgctacctgacctttctggaggcaccgccgctcgagagcacgcgtgacttcgttcgggacatgatcgcccatggacactcgcagttcgtggcgagctcggaaggcgcggtcgtcggctggtgcgacattcgccggcactctcagccggttcatgcgcatggcggcgcgctcggaatgggcattcttccgggctttcgcgggcaggggctcggggagcggctgatcagggtcacgatcgacgatgcattggcaaagggactggttcgtatcgagctcaacgttcacgccgataacgtccgcgccattcgtctctatgagcgtgtcggtttcgctcgcgaaggaattggcaggcaggcagtccgtatcgacgggcgtttccttgatgtgattgcgatggcgttcgttctatacgaacattaggatattttaataagacattgtgaggattacggaaatttaatcaaattttcagtttcggttcattatttcggggctaggtatggggtgtgttcaaaacgaggaacccccaatgaaaaagatgttcgccgttcttctttccgcttctttcctggccgcgccgctgatggccgcgacccaggcgagtgcgcaggatcaccgccgaccagccgccacgcaggatcaccgccgaccggccgtcgggcaggattaccgtcgtcccgtcatcgtggagcgcgaggtcagggtcaccaagtataaatggaaccgtggccagcgcatgagcgctgcagagcgccgccggatgcaggacgttcgtgattatcgccgctaccgcctttcggcgccgccgcgcggctatcgctgggtccgggtcgacaacgactatctgatgattagcattgccggcaatgtgatctctaacatcatcagcggccgttgatcggccgatgggcttgatcggatattgatcgggaaagggcggcttcggccgcccttttcctatgcagtgggccggtctcagctttcgcgtgacaggcaatccttcagattattggcgatcgcgcgcatcagcgtgaaatagagatccggaccggcgtcgagcgtaccggcttcgggatcgagcacgcccgcccttgcccttgtaccctcgagcacgacgtcgacgaggcgcggctgaaactgcggttcggcgaaaacgcaggtggcgccgaggtcgactaccttcttgtggatctcggcgatccgctccgcaccgggaatggtttccgggctcacggtgatcgagcccgcgacgcgcacatgatagcggtgctcgaaatactgataggcgtcgtggaagacgatgaagggtttgtccttcaccggtgacacgatgcctgaaatttccttgtcgagcgcatcgagcctggcgttcagcgcctcggcattgccctggtaggcaagggcattggcgggatcggcggcgacgagcgttgtggtgatctcggcggccatcgccttggcattgacggggtctagccagagatgggtgtcgaaggcgccatggccgtgatcatggtcggttccgctcttatcgccgtcatcgtcgtcgccatcgtcatgagcctcgaaggcgccgccttcgcggaacttgagcctggtcaggcccggcgcgctgtcgagttcgacaatgctggcatcggtcccgagcgtttccagcggctttgccaggaagacctcgaggccggggccgatccagaagacgaccttggcgttctgcagcgcgcgcgcattggacggcttcatcgaataggtgtgcggggaggcggcgccatcgacgatcagctccggcgtgccgacgccctgcatgatggcggagacgagcgagtgcaccggtttgatcgaggtgacgacgacgggtgcgtccgcgccgtgcgccgtgccggcaaggaggagggccgggagtgccaggccaagggcgcttgaaagcttcatgtatctgctccgcttgatttgcgtgtgtaatgttattacatcaattgcgttatgctataacatgtgcgatagcaacccccaacagcactttcggaaaaacgatgccattacccgcaacttccgaggcgaggccacttgtctcgctttccaatgtcggtgtccgcagaagcggccgctggctggttcgcggcgtcgacttttcggtctcgcgcggcgagatcgtgacgctgatcggccccaacgggtccggcaagtcgacgacggtgaagaccgcgatcggcgtgatcaggcccgacgagggcaaggtcacgcgcgcatccggcctgaaggtcggctacgtcccgcagaagctcgctatcgactggacgctgccgctcaccgttcgccggctgatgacgctgacgggaccgctgtcggacagcgacatgaacgaggcgctcggtgccgtcggtctcgcccatatgcgcgacgccgaggtgcagcatctctccggcggagagttccagcgggcgctgatggcgcgcgccatggcccgcaagcccgatctgctcgttctcgacgaaccggtgcagggcgtggatttttccggcgagatcgcgatctacgacctgatcaagacgatccgcaacacgacgggatgcggcatcctgctgatttcgcacgacctgcatgtggtgatggcggcgaccgataccgtcatctgcctcaacggccatgtctgctgccggggcacgccgcaggcggtgacgcagagtgccgagtatgtaagcctcttcggcagccgcgcggcgcagtcgcttgccgtctatagtcacgatcacgatcatacgcatctccccgacggccgcgttctgcatgcggatggctcggtgacggatcattgccatcccgaggatggtcatcaccgtggccatgatcacgctggtcatgatcgttcgggccactcgcatgatcatgcccatcatgagcacgggcatgcttgccgtggccacgctcacgatcatacggccgatgacgggcaggggcataagcatccggcgggagagcgccatgtttgacgatttcttcgtccgcgccatcattgccggtatcggcctggcgctgaccacggggccgctcggctgcttcatcatctggcggcgcatggcctatttcggcgatacgatctcgcattcggcgctgctcggcgtggcgctgtcgctgctgatgcaattcaacctgacgctctcggtcttcgtcgtcgcggccgccgtctcgatcctgctgctcctgctgcagaagcgccaggcgctgtcggccgatgcgctgctcggcatcctctcgcatgcgacgctggcgatcggactggtgatggtcgccttcatgacgtgggtgcgcatcgacctcatcgccttcctgttcggcgatatcctcgcggtctccaaggccgatatcgccttcatctggggcggcggcattctggtgcttggtgcgatcgcgtggctgtggcggccgctgcttgcctcgaccgtcaatcccgagcttgccgaggccgaagggctgaagccggagcgggcgcggctgttcttcatgctgctgatggccgtcgtcatcgccatcgccatgaagatcgtcggcatcatgctgatcacatcgcttttgatcattccggccgccgccgcccgtcgttttgcctcgacaccggaggtcatggcggttttcgcctcgctgatcggggcgattgccgtcgtcggcgggttgttcggctcactgacttacgatacgccttctggcccgtcgatcgtggtcgcggctctcattctcttcattttcagcctgctgcccaagctcgggcggggccaagcggtcacggaaggacaaggctcatgagcgcacccgcattgaccaagaatcaggcgcttgtcttcgacgtcctcgaaaaggccgacggcccgctcagcgcctataccattctcgacaagctgcgcgaccacggctttcgtgcgccgctgcaggtctaccgggctttggaaaagctgctcgaatacggcgtcgtgcaccggctggagagcatcaattccttcgtcgcctgcgcccatcccggcgagaactgccacaagcacggcatcgtcgccttcgccatctgcgagagctgcggccaggtgatggagttccacgaccacgaggtcgacaatcgcctgacggactggaccaaggccaggaagttcaaggccgagaagacgacgatcgagatccgcgggctttgcgaggcctgcgcggcttgatccattaatccagccgcttcagatcgcgggcgaaacgctgccagttggcgacgtatttttccgccgagcgcctcagcccttcgatcgccttctcgtcgagggtgcggatggcgcgggcgggcgagccgacgatcagggaattgtcgggaaattcctttccctcggtcaccagcgcattggcgccgacgaggcagttgttgccgatcctggcgccgttcagcaccgtggcgcccattccgatcagcgaattgtttccgattgagcagccatggacgatggcatgatgaccgatggtgcagccttcgccgatcgtgacgggatgaccgggatcggtgtgcagcatggcgccttcctggatattcgtggccgctccgaccgtgatcggctcgttgtcgccgcgcagcaccgcgccgaaccagacgccgacatcgggcccaagcgtgaccttgccgatcacatgcgcatcgggcgcgatccagtatgtgcctgatggcggcagatccggttcgtggcccgagagcgcatagatcggcatggtcattcctccttaggcgacgtcgatcgacagcttggcgatgccgtcgatggcgcaatcgatatggtcgccgcgcttgacggcaccgacgcccgccggcgtgccggtcatgatcacatcgccgggcgcgagttcgaacagcttcgacagttcggcgatgatttcaggcaccttccagatcatctggttgagatcgccatcctgcacgcgcttgttattgagatcgagccacacgcggccggcgtcgggatggccgagctttgccgccgggacgatcgccgagaccggggcggaatgttcgaaggccttcgccagctcccacgggcggccgagcttcttggcgtccgcctgcaggtcgcggcgggtgaaatcgatgccgacggcatagccgtagacgcaatcgagcgcgttctcgagcgcgatatccttgccgccggccttcagcgccagcacgcattcgacctcgaaatggacgtcgttcgacagcggcgggtaggggaaatccttgccgtcggacaagagattgttggcgttcttctggaaaaagaagggtggctcgcggctcggatcatgacccatctcgatggcatggtcggcatagttgcggccgacgcaataaacgcggcggaccggaaatcgatcggacgtgccttcgacggggatgaggacgggcgcgggaagcggaatgacggtgccggcggccggggcggaagaggagagggacgttgacatggatggaggatgctcttgctgtttccgtgagtccggtcatcttagccgcaaaagcgaagcggggggaagcgtggaagacctcaatcgcttgtgagccaacaccctctctggcctgccggcctgccggggccgagccaacggtctcggcccgcgcttcgcgcccccaagggggggaggacccgtggcagctgcctgcctcaatttgaggttcgacagagcggccgagtcaagcccttcccttgtggggagggtggggaggggatctttgtcatacgcggttgtgatcacgttccgacattgctgccctgcgcggggaaactggcgttttcatgtgctttgcgctatgagcgcggcatgaccacatcgcatttctacaaacaggcgctcgaaacgaagcggccggtcttcgccgtcgcgccgatgatcgactggaccgacaggcattgccgctacttccaccggcagatcagccgcaacgcgctgctctacacggaaatggtcgtcgccgacgcgatcatccatgggccgcgcgagcggttgctgtctttcgatgccgccgagcatccggtggcgctgcagctgggcggctccgatccggagaagctggtgaaggcggtggagatcgcggcgccttatggttacgacgagatcaacctcaatgtcggctgtccctcggatcgggtgcaatcgggcaccttcggggcctgcctgatgctgacgcccgatgtcgtggcggattgcattcgggcgatgaaaaaggtgtcctcggcgccggttaccgtgaagtgccggatcggggtggacgagcaggagccggagaaggcgctgcccgatcttctcgaccgggtgctcgatgccggcgccgacgcgatctggatccatgcgcgcaaggcctggctcaagggcttgtcgccgaaggaaaaccgcgaaatcccgccgctcgattacgacatcgtctaccgcacaaagcaggcgcggccggatgtgttcatcggcatcaatggcggcatccagacgctggatcaggccgaagagcatctgcggcatgtcgatggcgtgatgctcgggcgggcggcttatcagaatgccggcgtgcttgccgatgtcgatcaccgcttcttcggggcggaggctcaggccttcgactgcgagctgctgcgcgaccggatgatggactacgcggcgcggcatatcgccgatggcggccggctgcagcaggtggcgcggcatatggtggggctgttcaccggcctgccgggcgcgcggcgctaccggcagatcttgtcgaccgatgcggtgaaggccggggccgggccggaggtgatcgcggcggctttcgcggcggtggatttctcgggtgtggcggaggatgcggtcagcgcttgagggggtaggcacaaggtctccacggcacaccaaaaaccccacgccgcccgaaagcccgtggtttcaaccatgcacttcactcggacggggcgctggaaatcacctcgatggagtaagtaagatatggcgcttcccagcgccccgttcggcggtttttatccgcgactccgatctctctgcctttccgcccaacttcgcggcggaaccatgtgtgcctcacaggcacgtccgggttcaactcaggcccgtcttgcgacagaacccgccgtcaccggagggagatcattttccgcggacccggaccgtgaagttttgcgtcctaccctcacgctccgcgccgatcccgcctcgccggcacgcctgccggggtatccgatgacgggacgccgacattgtagggcggggtttcggcgcggggaaaattgttgtgatgatttttcgtgaattgctgatgtgaaacctacatcatgccgacagagcggcggtcacgccgccgcccttgaccgacacccccctacaaactccgacaaaacgccaacgacggcatgaagaaatactcgccgcctttcatcgtcaccgcctgcggtgtcgcggtcgtggtcgcggtggtcgagccgccccattcgaccgggcagtggatgtccgggcgcgggttggggctttggccgatcacgaggtctaggcccggtgcgccggcgcctgggggaacacgcgggaagccggggttgttggcccaggtcgattgtgcgaactcgaactgttcggcgatatcggcgttgaaggccatgaacagcaggccgacatccttgctcggcttgttttcgatgcggccgtcgttgggctggtcggtgcgcacgccataggtctggccgcggcgcgccatgatatgcaggcgttcgacgtccacttgttcgaagccgccggagccgcgcgggttgaccttgcggatatgagcgaagaacggacacttggcgccattcggatcgctgtcataatcgaagtcgttgggaaccgggtggtggttgccgtcggcgaattgggtggtcagcggcgtgccgtcctcgaagcggccgaccagcatggcgccggcccgctcggcatcctcgcccttcagatgcagccgcttggccaacgccttttcctgcttcttgaactgcttgacgttctgctcaagcttgcggaacacgaagtagctgccaaagtgcctggagggatcgggggcggctgtatccggcacgatcacgcggttcagcgcgaagccgggatcccagttggtggcgccgtcggacgtcaggcgctcgtcgtcgatatcctcggtcaggaacagtggctggctgcggccgtcgacatagccgaagtgctcgataccgtcgccattgctgttgtgcagtccgtggcccttttcctcgccgagaatctgaacaccatgggcggcctggatcaggtggcggaccgccgtcagcgccttgttgcgtgggccggacatctggtcgccgacgaggatgacggcgtggatggcgttacggtagtgcggctcccaggtcgccggcgccggatcgttcaggccggcattcttcatgccggatcggaacgaggcgtccggcgggatcttgggggcagggatattcagcgccgcgtagccgtcgccggtgagaccgacgctgacataaggcgtgcccttggtgcccgtcgccttgaaggccttgacctcctgcaggtgggttctcgccgacttcaggagcggcgtgcctgtcggcggctgcgacagcgcctttagcagcgcgcgaccgccggcggggtcggaaaacttcaggaacaggatggtcaggaattcgcgggtatgggccttgacgatgttcggctgaagctcgtcgagcatcacggcggcgtctcccgcagcgctttcccatgaaagcggttgggtcagatcgaaaggcatggctcctcctcctcggggctggtcggcctgggatgtcttcatgcgcatagctggaacggctcagaccgacggttgatctgttgatgtcttgctgatgtctaaaatcatcggtttttcgcaagcggtatcatcgccgccagagactggcgggcgcattgccggcatgggtgcaatctatctgtgcttgctttttatggttgcatatgcaacctatcatttatatctcatattttgctaataatcgcaatagctatttaaaagcagtggcttggagggagttttcgcgccagaatgaaacgctcgctctctggtggtcggtcctgatcgggttgcgtgtggcgtccgtcagcatggtcgcggacacgatgcgatcacgacgaatgtgatggaacaagggcgatttgccggcgtttcgagatgctacctgtcacagctctatcccgctgttcggtgacgagaaaaggaatgtgcgcttcggctcggaggatgccggagggccgcaccgcgccgctggcgcgtgagcggcatggggcggccgtgttcgaacgctgtttcgatgcaggtgccgccccttgcacccgtttcgatcgatgtgtattctacctccggtaggtttttgttaacgttgagtggctagcgcttttgatcgacgcgctgtttgcatgccgtttttcgtcatgctcgttcgatgggtgccgcagtgaattttgcctttatgctcccggtcatgatgttgaccttcggctgcaccttcctcgtcgtttcaaggttcggatcgcgcgaagccgggttgtgggcggcgggctttctatccgctgccgtcgccttctcggtgccgatgtttttcgcatggctgccgattcccgttcaggcgctcagcgccgacgcgctttttctctccgccttctttttctatagcggtgccctcctgaagcgctttcgccagccgtcgcgcatggttttgcgcttgggcgtctgcgccgtaatctacgcggcgctggcctattcggttctggtgctcgaaagcctgccggccgagcttctcatcagcgacatcgcgtgctcggccttgcttatattcgcgatcggctcgtcgctcggcagcgcccggcggacgatcgaccgcatcctgctcggcgtcgcttcgctgatcgtggtcgaggcgatcgtccgcaatgtcatcctcttggtgatattctcgcctgggggcgacttggagagcttcggtacttccacttacgcgtttgtcatgcaggcgggggcttccgtcatcgcgctgctgtttgcgctttcggcgctggccgcgacgacgctcgacacggtcgagcgctaccgagatgccgccgagagcgattccctcacgggtctgctcaaccggcgcggcttcgaggaaacgaccagcaggctgagagcccgcggtgcgctgaagggcgccattcttctctgtgacatcgaccacttcaagcggatcaacgacacgttcggccacgccgctggcgacagtgtgatcgccggccttgccgaactcttgaaggcgcgcctgcctgagggcgcgttcgccgcgcgtttcggcggcgaggagttcgtggcgtttctgccgggcgcggcacttgccgacggcggcaaggtcgcgaatgcgatccggctcgccttctccgccgccggacagcccgatatcgccggcgtgggaaagatcaccgcgagcttcggcgtcgcctgcgtggcatcaagcgacgtgtcgctgaccgaaacgatcggccgcgccgacgctgccctctacgcggccaaggatgccgggcgcaaccgggtgatgctggaaggcacgccggcgcaagaggcgcccgccattcatgtggcgtcctaggcgggccttttgtcactccaagccaaagcgtttgaagctcacgagcaccggttatctcagggaccggatgaacagttccggccgggacattccctgggtcgccgtgcttgaatgtttgatctagggagcgtgattggttcctggcgatgtctcaactgtcgcgcagcctgaaatgtcgcggcgcgggcagcccagcctcttgaagccctttcgttcggcggtacatgctggcgccagcttcaacactcgggaatctcacatgccatttgccctcagccccgcggccatctggccgatcgtcatgctgcttgcctccaacgtgttcatgacattcgcctggtacgggcatctcaagcacaaggggacggcgattttcgtcgccatcgtcgtcagctgggcgatcgccttcttcgaatactgcctggcggtgccggccaaccggatcggttcggcggtctatacgacggcgcaactgaagacgatgcaggaggtgatcacgcttctggtgttctccggcttctcggtgttctggctgggcgaaagcctgacctggaaccacgtcatcggctttgcgctgatcgcggtcggggcgtccttcatctttcgcggatgattgcgatcccgcctgatgggatcggtaagtccttgaattacaaattgtccatgtcgcggctccgcctcaatttccgacggttttgacgacagcctgtcaccatccggggatatggaggtgacaggtcatgagtctttcctttccgacgatggcggccatccgcttcggttatggatttcggccaggcgaggcgccgccgcgaaacaaggacgacctgcttcgtcagttgagcggggggcaggcgaccgcggatgcgcgagcgccagtcgcctttcccgtcggcggtatcgagcaacggcatcaagtgatcgccgagctgcaatccaacctgcgtgatctcggacaaagcggcgacgacgaccagacgcgccgggcgcggcgcaaggtgttgcagaagcaggcgcagcgcagcttccagctggatgccaatgcgcggctgctgcaggctgtcatgtcgcccaacggttttgaggagcgtctttccaccttctggaccaatcacttttccaccagcgccaacaagagcctgccgatgcggctgctggtgccgctttacgaggccgaagcgatccggccgcgtatcggcgggcgcttcgccgatcttttgcgcggtgccaccgagcatccggcgatgctgatctatctcgatcaggcgcagtcgctcgggccggattccaagggcgggatgcggcagaagaaggggctcaacgaaaacctcgggcgcgaattgctggaactgcatacgctcggggccggcagcggctacacgcaggccgacgtgcgggccgccgccatggttttgacggggctgacggtcgaccggcaggagatggacatggcgtttcgtcccaacatcgccgagcccggccgtcacgaagttctcggtgtcagctatggcggcgacaagcggcgagcgggcgattatctcgccatgctcgacgatctcgccgccaatccgaagacggcggcgcatatctgtcgcaagctggcggtgcatttcattgccgatcagccggatcagggactgctcgccgagatggccggcgcctggaagaagaccgacggtgatctcagggcagtctacggcgccatgctcgaccatccggcggcctgggcgaacgacggcgcgaaggcgcgtcagccgttcgatttcgtcgttgccggtctccgggcgctgaatgccggtgtcggggacggaacggtcgcggccttcttcagggataaccagcaggacgatgccgtcgctccgggcgctgctgacatgggtggcgatatgagcggcggctccaagggcgctatgaaggacggagagaccgtcgtcggcggcgggccgccgacgaccgatcctggcgacgacgacaggggcaagcgccgcaaggcgatacggacggcaagggcgctcgggcagggggcgctgaggcgcatggggcagccgatttggttgccgccaagcccggccggcttcgaggagagcttctcggcctggatcacggccagccagcttgccgagcggctcggctgggcgcggcgggcgacggcgcagttcgggcaggggctcgatccccgcgaattcctgaaggcaacgcttggcgatgccgcgcgcgacgacacgatccgcgtcgtcagtcaggcgcccaacaaggcaaccggcctgatgcttgcgcttgcgtcgcccgagttcaaccgtcgataggagcttcgaaatgaccgatttcacgctatcgcgccgcggcttccttgcttccgcctgctgcctcgcggcggcccctgtcctgacgcccgtcaccttcgcgtcgatgcccggagacaagcgcttcgtcaccattgtgctgcgcggggcgatggacgggctggcgctggtgcagccctatggcgatgccggtttcgccgcgtcccggccgacgttggcactgacgccggagaccgggcttatcgatctcgacgggaatttcggcctgcatccttcggcggcgggtctgatgccattgtggcgcggtcgtgagctcgccttcgtgcatgcggtatcgacgccctatcgcgaccaacgcagccatttcgacgggcaggatatgcttgaatcgggcggcgagcatgtctcggaggaaaagacggggtggctgaaccgcgcgcttgccgtcattccgcgatcggacgcgcgcaaggcgatcgatgtcaacacctcgacggagctgatcctgaccgggcccaacaatgtcgatgtgtgggcgtcggattccaatctcgggccggcccgcgacgagacgcagttccttaaacggctttatgccggcgacccggctttcgccaaggcaatcgaggaggcgacgcgggccaacagcgcctcgatggtggccgagcccggcgggccacgcggccagaaggtggcggatgtggcggcacttgcgggcaacatgctgaagggcgattaccggatcgccagcttctccatcaccggctgggacacgcatgtcggccagatcggacaattcaagcgtccggtgcaggatctgacggaggcgatcaccacgctgaagtcgacgctggggccggatatctggtcgaagactgtggtgctggcgatgaccgagttcgggcggacggtgcgggagaacgggtccggagggaccgaccacggcacgggcggctgcgcggttctggcgggcggcgcgatcagtggcggtcgcattctcggccgctggccgggccttggcgaccagcagcttctcgacgagcgcgatctggcgccgacggccgacgtgcgcgagcttgcggccgccatgctctaccgacagttcgacgtgacggtggacgatctgacggcgaagatatttcccggcgtcagcttcgacaagggatcgcagttcctgcaggcttgaaccggcgcgccggttcgtccgggccctcagcgctcgacgaaggcgcgcaggcgttccagcgcatcgtcccactgccgggagacgccgtcgagatagccgcgcatgatatcgatgccgtcgcgccggaaactgtaatggctttcgcggccgaccttgatgctttcgacgaggccggctttttcgagcacgatcagatgcttggtgaccgcctggcgtgtcagctccgtgccgccggagagactggagatcgaggatgtgcggccgtcgctcagcgccgtcagcagggacaggcgagtggggtcgccgagggccgaaaaaagtgccgcggcgtcccggccgctggtctcggcatcgacctgcggcatgctttcaccgttcggcattcgatcagcgctcgacatgggccttgatgttcttcacctgctccgcccagccgccctcgttcatccgcagtgcttcggcgcggcgatattcggggaccttgtcgaagccggattcggtgatcgtcaggcgcgtgcccttcgatgtcggctcgaggcggaattcgaccagcgtcggcgtttcgctggagtaatcggtatcgggatcgaccgcgtaggggatccaggtgaaggaaaacagcgtcggctcgtccatgcacttgatcgtggcggtccagcgaacatgctcgtagccgggataggtgatctggccggttgcgacctcacccgagacgaagggggcgtcgatcctgacgcggaaccactcgccgaattcgcgatgatcggtgatggcctgccagactctgctgacaggggcattcagttcgatggtcttctcgatgcgatctgacatattggcaacctcccggttgccttttatcgccccggttcgattggaaaggcaaccaaaaagttgcctttcctcgtttgtgacctattcggccggcacgggcgtcggctgaccattctcgtcgagcgccaccatgatgaaggtgccggcggtgactttttccatcttgttgtagcgggctcgggtcgcccaggcctcgacacagagggtgatcgaggtgcggccgacgcgttcgatgtcggtatagatggacagcgtatcgccgatcttcacgggcagggcgaaggccatctccttgacggcggcggtgacgacgcgcgccttggcgcgttcggcggccgagatgcccgatgcaaggtccatctgcgccatgacccatccgccgaagatgtcgccggccgggttggcatcggcgggcatcgccatggtcctgagggtcagcgtgcctctcggcttttgttcttcggtcatcggcgctccttttgacggcgggttttctggtcgattccgacggaccctagcgtatcggcctgaaaaccgaaatcgcagcgtgccgacaaagtgcggcttcgtgagcggaccggcgagtggatgctttcggtggggtggaaacgcttgagttttcgcgttccgatagtaagcttcgcggcgtctgtccggttcctgtcgtggccgagggcgggcttgtccgtacggggatggggaagcgtatgaggcgtctgctcggtggtctttttcgctcgctttcggtcgtcgggctggcgctcgccttcgctttcttcgccgcgtcgctgacgccgacgctgatgccgcgatcctacatcgtccagggcgttctgtcgggtgtttgcgcggctgtgggttatctcatcggcgtggccgccgtcagtctctggaagtatctcgaactcccgtatcgcgggccgctcctgtcgcagcggatcgcagttctgatctgcgggttgatcgttgcggtcgtcttcctgtggcaggcggccggctggcagaattcgatccgggagctctggcggatgcagccgctcgaaagcgccgagcccttcaagctcggagcgctggctttcgtcgtcttccttgcggccgtgcttatcgggcgattgttcctcctgaccgttcgatggacatcgcggcggctcgatcgcttcgtgcctcggcgtgtctccaacgtgatcggttttgcgatcgccgtggtgctgttctggtcggttgccgagggcgtgctgctgcgcggggcgctgcacgcgatcgattcctcgatgcagcggctggacgcgctgatcgaggacgacgtgccgatgcccgcggatgccgccaggacgggaagcaaggcgtcgctggtcacctgggacggcctcgggcggcaggggcggcatttcgttgcctccggtccaagcgcttccgatatcggcggcttctggaaaggcgaggcgcgcgaacccatacgcgtctatgtcggtctcaacaacgccgatacgatcgaggcccgcgccaggcttgcgctcgaggagctgaagcgcaacggggctttcgagcgatccatgcttgtcatcatcgcgccgaccggcaccggatgggtcgatcccgccgcgatggacacgctcgaatatctcaagcgcggcgacgtcgccagcgtggcgctccaatactcctacctgtcgagctggttgtcgctgctggttgaatcggaatatggcgcgcagtcggcaaaggcgctatttcgcgaggtctatggctactggacgacgctgccgcgcgacaagcggccgaagctctacctgcacggcttgagcctcggcgcgctgaactcgcagctgtccgccgacatcttcgacgtcatcgccgatccgttccagggcgcgctctggagcgggccgcctttcgagagcagcatgtggaacgcggtgacggcaggacgcaatccgcaatcgccggcatggctgccgacattccgcgacggctcgataatccggttcaccaaccaggagaaccaactcgattttcccggcgctgcgccatgggggccgatgcggatcgtctatctgcagtatgcgagcgacgcggtgacgttcttcgatccgcgctccttctaccgggagcccgcatggatgcaggcgccgcgcgggccggatgtttccaagagcctcagatggtttcctgttctgaccatgttccagctgctgttcgacctgatgattgcgacgacgtcgccgattggctatggccatgtctacgcgcccgaacactatatcgatgcatggatcgccgttgccgcgttgaccgtcgatcctggcgaggtggccgcgctcaaggcacgtttcgctaatgcggcggcgcaacagggcgacaacgattgaactggaatctggccgcgcgttcaccgtctgtccggtttcgagtgttcataagcgggaatatcgtcccgattaaccacgtttgttatgggttcgtttaggctctcatagcagtttgcccgcgagtggctgggaaaccacatctttgaggttcaaactgatgacttatagcgggttgcttttttccgccgtcgttgccggcctggtcacgatccttgccatcggcagccgtcctgcatccgagaccgcgtccaactggccgcagatgaatctggagaagaccgatcgcatcgttaccggaagcgtgcaggcgcggtaactccacggatcgggtgaagccgctgcgcgcagctttgccaatgccatcgcggcggtggccgtcgggaaggtgcggaatacaataaatcatccattcgttttcacgggtggcgcaaagaaacaattaatcggccgcaacctaggagagtgaggtagtgaaggcgtttactgatgaatagctccagaccacgttacgatgtcatttgcgatccgctcgatatgtggatggtctgggatcatcagaccgacgagcctgcatgctttggcggccagattctcaacggattgaccgaaggctatgccgtcgaggtcgccaagatcatgaacgagatctacggaaccggccgcccggctggtcatcgcgtcgcgatcaaactgtccgacgacaaggaagtgctttacgccaactgacgcctgatgcgacgcggcttgcgtattcgcgccgccatactttcatccgcttcttcaaattcctgatcgccgcgtgcagtcgcgtgacgagaagcccgttcgcatcgccggctggtgactttcgcgccgtgatcatcgcattcccgcagccgaacagggctattgtttcaaacttcccggcaatcgtgatcggtgagccctcggtcgctcaacccggggtaaggtttcgttcaccgctttttattaaatttgaactgaagtttcttggtcactgccgatctcaggaagcgataagagtatggcgtttgtttccaccatgcggcgttacgtgctgcccgtgctgttgtcgacggcgctggtgacgtgctcgacggacgcgcttgttccgcccggcagcgtggatcgcggcacgaaggtcgggtccatctcgccgccacgacgccaggcgcctgtcgacattccgtcctccgccactgaacaggcctatcccgccagcagccagccggtccagggctcagccgattatctcaatacggccgatcgtgccggccgcgggcaatcgaccgcgctgccgccgatgaacagcgatcaggcgtccgcgggcgcgcgcggtgtcgcgggccagttcggcggccagccggcgagctggggcggaacgcagtcgcttgccgtgccggccgagggcgtcaacatggatgccgaactcggagccgagccggtcaccgggcttgcggaggaacaacagcagcagatcgccgaggggcaatcggaccagcctgtcgtcgatggtatcggcacggacaatcccacgcagttgaacagcatgcgttcaccaggatcgcgaagtcagccgacgggcgggcaggagcagatatggaacgacgccagcactgtcgcggcgccgtcgcgggtgcctgaagagagcgagccgcaggacgtggcgatgctgcggccgaacgatccgatggcgaacgaccggatggcgagcgagccccagatgagccagccggcggtgccggacgtgatgccgagttcggaactggcctgccggcgcgagctgaagcgcatgggcgtgatcttcaccgacaagccgccgatctccaacggggcggcgtgccaggtgccttacccgatttcgctgcagggtctgtccggcaatatcggcgtgcgcccggcggcgacgctgaactgccaggtgacgctggccttcgccaagtgggtgaagaacgagctggcgccatcggcgcggtatcgctactggtccggcatcaagacgatcgagccgctcggcggctatagctgccgccggatgaacaacagccggcagaaatacaatccgatgtccgagcattcgcgcgccaacgcgatcgatgtcggcaagttcgtgctgaagagcgggcaggaaatcgacgtacgcaagaaggggctgttctccttccgcgaggggcggctgctgcaggccgtgcgttccgacagctgcaagtatttcaacacggtgctcggtccgggcagcaatgcggagcactggaaccacttccatttcgatctgcgcgagcgcaagagcggcaagatctattgcgactgagcgtgtgggcggtccggcatcgacgtagccgcgggaatcgctttaaacgggctccccatcgataagaggagaccgccgtggtcgaaggcaagcgccccaatattctgtttttcgtcgcgatcgtcgtcattgccgccgtcgcggtgttcggcggccgttggtacatgtatgtggcctatgcgagcgatccgttcgatgaggtcggtatcagcctcaacatgaagatgccggaattcattcgcgccaagggctgcgagatgctgaaagagcgcttcgagggcaagacgctgccgccggcgggctgcagcgtcaatggtgcctggtaggcgggacgcttgccggaaggcgaaaccgcgttttcaattgcgtcgttttcgagcaaatgaatactctgttcggcgtgcatgggatgtcaaattgtcgccgagcggctatatagcggcgaaatccttccgttcgtcttcaagagccctgcatggcccccatcatttccatccgcaatcttacgaaaatctacagtaacggctttcaggccctgaaaggcatcgatctcgatgtggagaagggcgagatcctcgcgctgctcggtccgaatggcgccggcaagacgacgatgatctcgatcgtctgcggcatcgccaatccgagcggcgggaccgtgctcgtcggcggccacgatgtggtgaaggatttccgggcgacgcggtcgatgatcggcctcgtgccgcaggagttgaccaccgaccagttcgaaacggtatggaacacggtgagtttctcgcgtggcctgcacggcaagaaggccaatcccgcgcatatcgagaaggtcctgcgcgacctgtcgctgtgggacaagaaggacaatacgctgcgccagctctcgggcggcatgaagcggcgcgtcctgatcgccaaggcgttgagccacgagcctgaaatcctgttcctggacgaaccgacggccggcgtcgatgtggccctgcgcaaggacatgtggcacgtcgtggaaaagctgcgcgaggcgggcgtcacgatcatcctgacgacacactacatcgaggaggcggaggagatcgccgaccgcgtcggcgtgatcaatggcggcgagttgcttctggtcgaggacaagacggcgctgatggccaagctcggacgcaagcagttgatcctggagctgaccgagccgctcgacgcgctgccggagagcttcctcggcaacggcctggcgatcacatccggcggcaaccgtctgacctacgacttcgacgccgagaacgatcaggaaagcatcgccgccctcctgaagcggcttgccgaacacaacatccatttcaaggacctgtcgacgcagcagagttcgctcgaagacattttcgtggcgctcgtgggaggcgcaaaatgaacttcgaagccatcaaatccatctatctcttcgaaatggcccgcacccgccgcactttgctgcagagcgtggtctcgcccgtgatctcgacgtcgctctacttcatcgtcttcggcgccgccgtcggttcgcgcatccaggaagtcgaggggatttcctatggcgccttcatcacgccgggcctgatcatgctgactctgcttgggcagtgcatcggcaatggttccttcggcatctattttccgaagttcaccggcacgatctacgaagttttgtcggcacccgtggcgatggccgagatcctgctcggatatgtcggggcagccgcgaccaaggggctgatgatcggcgtgatcatccttttgacggcgaacttcttcgtcgaggtcaggatcgagcacccgttcatgatggcgctgttcttcgtgctgacggccgtgaccttcagcctgttcggcttcatgatcggtctgtgggcgaacaatttcgagcagctgaacctgatcccgatgctggtcgttccaccgctgacattcctcggcggcagcttctattcgatcaacatgctgccgcccttctggcaggcggtcagccacttcaatccggtgctctatctggtcagcggctttcgctggagcttttacggcatcgccgatgtcaatccgctgatcagcctcgggatgatctcgctgttcctggcgatctgcctgggaacgctcggctggatgttcaggacgggttacaagctgcgcaactgacgcggctctaatcgcgcatcctgagttcgtccggctgcatctgcagcgagcccagcgttccgaggaagctcatgccgagcaggctctggtcgagccgtccatcctcggcgacgctgccggcgatgttgttgcgcacgatggggccgatcgccacttccgacagcgtgacaggcgctgcctgggtgcggccgttggcggtggtgacgctcatggaataggtcaggttgtcggggatgatgccgacgcgctcggcatcctggcgcgagagcgcgatcatgctggcgccggtatcgaccagcatcgagatggtctggccgttgatctggacatcggcctcgaaatgaccgttctgcagcttgtacaggatgacctccttgctgccgtcgctcgtggttgtgacgacggcccggccgggtatcagccccgccagcaggcggttgccgacgctgagtgcgtcgtagcggtagaggtaggcggtggcgaggccgaggatcagcaccagccagatcatcatatggcgcattgtctcgccgacgctgatgcgtcgtccccatatgccggcggccagcatcagcgcgatgggaaggagatagagcatgcggccgaaatcgtcggtcctgacgccgaggatcctggggctgtcgctgttgaagagcaatatgagaaggccgatgccgagaccgccaagtccaatcgtcagcctgttcatgcggtgagctccgtgcttgccgtggtcgcgggcgatgtcgagggcccaatcattttcatccgggcgggcagcaggcgcatcaccgcgtgccgctcttcatctgaaaacgccgcccagccggcgatttcctcgatcgttcggccgcagcccgcgcacaagccgctggatgaagcaatggagcagatgttgatgcaggggctgaccatgagaaatcatatcgttgtttcacaaagccatggcaagagcgcacagcgccgccatctcggaaatttgagcggtggcgcccagcgtatcaccggtatggccggatagggtaagacgggccagtcgggtgaagatcatcgcgctcagaccggcggcgagcagggcgcagatgagcggcaagaggcccaggctcggccagatcagcagtgccgccagcgcgcaggccgagacgaccgccatctgcatgacgccttcgctcggctggccgacggcggcggccacgccatcggctttcgccggcggcaggcggtgccagtgccagaccagcgcgccgcggctcatgcagccaacggcgggcagggcgagggcggccgcgagcggaaccgcgccgcgggcgatcgcggcaatggcggcggcgcgaatggtgaaggagaggatcagcgcgatggcgccataggtgccgatgcggctgtccttcatgatcgacaggcggtgggcgcgatcgcggccgccaccgatgccgtcggcgcaatcggcaaggccgtcctcatgcagggcgccggagacgatcgcctgtatggccagcgccaccagggccgacatcagccggtccgcttgcaaagcgagcatcaccaacagaaccgccgccggcagcaggccgatgacgatgccggcgaccggaaaggcgcgcgcgacgcggccgagttttccgtcgtatcccgcgaaggcggctttcggcatcggaatgcggctgaggaacgcggtggcgcgcgcgatatccgccacataggttgcgatgttcatgcgcgtccgctcccggggatgatattaggcgctttttagagttgttccgcttcgcggctggatttaagagtggccgcgaaagaagctgatttgcagccataagacaagattacagacgagacaaggaagccgcatccatgagcgtttcaggcctgccgttcgacgatttccgggcacttctgcgcgatctgccggggccggacccacgggctcttgtcgccgcccgcgagcgcgatgcccagttgaccaagccgccgggctcgctcgggcgtctcgaggaaatcgctttctggctggccgcctggaccggccgcacgcccgccgtcaaccggccgctggtggcgatcttcgccggcaaccacggtgtcgtgaagcagggcatcacgccctttccgccgacggtgacgcagcagatggtcgagaatttcgcggccggcggggctgcgatcaaccagatctgcgtggcctacgatctcgggctgaaggtgttcgacctggcgctcgattacccgaccggtgacatcaccgaggagcccgcgctttcggagcgcgactgcgccgcgaccatggccttcggcatggaggccatcgccggcggcaccgatctgctctgcatcggcgagatgggcatcggcaacacgacgatcgcagcctcgatcaactacgcgctctatggcggcaacgcccgcgactgggtcggccccggcaccggttcgcaaggggacatgttcgagcgcaaggtcgccgccgtcgagaaggcggtggcgctgcacagcgatcacctcgacgatccgctggagatcatgcgccgcctcggcggccgcgagatcgccgcgatggcgggggcgatcctggcggcgcgcgtcgaacgcatccctgtgctgatcgacggttacgtggcgacggcggcggccgccatcctgcaggcggccaatccttcggcgctcgatcactgcctgatcggtcacgtttccggcgagcccggccatctcaaggcaatcgagatgctcggcaagacgccgcttctggcgcttggcatgcggctcggcgagggcacgggggcagcgcttgccgccggtatcgtcaaggccgcggcggcctgccattccggcatggcgacgtttgcacaggcgggtgtgacaaacaagcacgagcactgagcccatcgcctgtattcaggttcgtgacaggtttatgacagaaggcttgcgatacgggcgtgcgcacgctattcgcatttttctgatatgaagcggcaggcattgccgccatctacctgacgacgaggacgcctgatgaaacctgccgtgaccaaactcaccggcatcagccacttttttgccgccgccggctactcgctcggcggcttcaggcggctgatcaaggaagcggcgttccggcaggagcttctattcgccgtcgtggcgcttgtcctgctcctggcggtggacgcgacgcttgccgaactgatgatcgccgtcatcctgtttctcaccgtcttcgccatcgaagcgctcaacaccgcgatcgaggaagtcatcgatcgcatttcaccggaaatctcgagcgtcggcaagcacgccaaggatctcggctcgttcgccgtgctctgcatgctgacggcctgcggcatcttcatgctgtttacgatcggcaagcatttgatgttcggctgaggatatcaagcaaagctgcggcgcttgcgggagacggcctgggcgtcctcgacggccggaaccgattgcagcacgcgccttgccggcaggatggcgatgacttcggtgccttcgcgcagcttggacttcaggatgaactggccgtcgtgcttggcgaggatcgcctgaacgatcggcaggccgaggccggtgccctgttcggcgctcttgatggcgatcgagccctggccgaaggcggataggacgaccggtatctcgtcctcgggaatgcccggtccgttgtccttgatcgagatgtactggccgccgccggccgtccagccgaccttgaccatgatctcgccgccctgcggcgtgaacttcacggcattggacaagaggttgaggatcacctggcgcatcgatttctcgtcggcccagaccgcgggaagttcgagctcgaactgctgcgagatggtgatgttcttgccgcgtgcgcgcagctgcaccatgccgatgcagtcttcggaaatatccagcagcgagatcgcctcctcgctgagctcgtattttccggcctcgatacgggaaaggtcgaggatttcgttgatcaggttcaagagatgctggcccgagcggtggatgtcgctcgtgtattccttgtaggtcgcgttgttcagcggtcccatgacttcggccgacatcacctcggaaaagcccaggatggcgttcagcggcgtgcgcagctcatgcgacatggatgcgaggaagcgggacttggcgaggtttgcctcttccgcccggcgccgcgcctcgtccgacatggatttggcgacttcgagttcggcgatcaggtcgtccttctcagcctgataggcgaggatgcgcaggttctgccgaaacagctggtcgctgatgtagtgaaaaaagatgacggtcgtggtcagcgtcgcggtcaggctgatctcgaggatctcgcgcgaaatgccggatttggcgacgagggcgaagacgacgggcgaaaaggtcaccagcacgcacggcgtgagcatgtaattccacatcgccgtcagcgacagggcgatcaacagcgtcgcgcccttgtagagcacgaggttggccggctcgcaggtggcgcagtcctgaacggcgaaataggcccagcagcagccgatcaggaactggccgagcaggagcaggcggcgccatttgcgggtgcggatcagcgtcatctcgtgcttgcgggcgcggcgcgccagatacacgttggcggcatgggccgtcagcgtcagtatggcccagagcacgatctgggtgtcgccggtgaaatagatgccgagtatcgcgatgatgatcacgaacagcgggatgatcgaggcgccctgcagcacggcgttgatatagatggtcagcacgtcgcgatcgaaggcgccgctcggcgcatggctcgattgcaggcgctcacgcgtcacacgtacagcctttgcgacgggcttgttgcggtgactccgtgacttgtcgacgatattcttatcggtcgatgtgctaacgccgttactcattccacacgtgacgcttgatctgcagacgtcggaatattagggctcaaatattaagaagttgtttgccaattttgccaagggtttgtttttgaaggaggcgaaaccgtgacgtggggtttcaggaccgttcgtgacggggtgacggcgttcgcgctgctcgctgtcatctggatgatcgcggccaagctcaatgatgtctcggagatttcccttgccggccgcttccgcgccgccgatggcgacagccttgcgatcggcgcggagaggatgcggctgaaggggatcgatgcgcccgagcttgcccaggcatgcgagcggggcggtgcgcgatgggcatgcggcgaggaggcgaggcgcatgttgcagggcctcgtcgccgccggcgatgcgcgctgcgccggcacgcaaagggatcgtttccagcggctgctcgtggtgtgtcgtgccggcggcgccgatctaaacgctttgatggtgcggcggggcatggcggtttcttacggcgcctatggtgacgaggaggccgaggcgcggtcgcgaaaggctggtctttgggctggctccttcgagaggcctcgcgatttccgcgacggcagccaggatggcagccgctccggcggcggcagaggtttcttcggatggtagacgcgacggatggactggaagcgatgcgcgccgcgatcgggcgctgccgggtctgtcgcgacgaacctttgcgcggaactggtcaccagctgccgcatgagccgcggccggtcgcggtgatttcgaccaaggcgcggatattgatcgcggggcaggcgccgggcttgaaggttcatgagagcggcattcccttcaacgatgcatcgggcgaccgcttgcgcgaatggctgcaggtcgatcgcgacaccttctacgaccgcgaccgcttcgccatcgttccgatgggcttctgctttcccggttatgacgccaaaggcagcgacctgccgccccggcgggaatgcgcgccgctgtggcggctgcccgtgcttgcggccatgccgcagatcgaactggtgctggtcatcgggcaatatgcacaggcatggcatttgcggaacgagcgacgcggcagcgtgaccgagacggtcctgatgtggcgggagatcctgttcgccaatcgatcgccggcgatcctgccgctgccgcatccgagctggcgcaactcaggctggatcaggcgcaatccgtggtttgaggaggaattgctgccggtcttgcggacgcgcgtcacgatgctgtcagcctgaaacaaatttctttcaaatggctggaatcgcgctatacaagaaaaataattcgaagggggctgcgttatggaccgtctggaccgcaagattctgcgtcttttacaggaagattcaacattggcggttgccgatctcgcaaagaaggtcggcctttccaccaccccttgctggcgccgtatccagaaaatggaggaagacggtgtcatcaagcgccgtgtggccatcctcgatccggaaaaggtcaacaccaaggtcacggttttcgtgtccatccgcaccgcaacgcattcgatcgaatggctgcggcgtttttcggaagttgtggcggaattccccgaggtcgtcgagttctaccggatgagcggcgacgtggactatctgctgcgcgtcgtggtgcctgacatcgcggcctatgacgccttctacaagcggatgatcgccaagatcgagatccgcgacgtctcctctgccttcgcgatggagcagatcaagtattcgacgcagctgccgctcgactacatgatcctcgacagctcgaagtccaacgaggactgatcctcagccgctgatttgactgacgacgggcgagaggtttctcgcccgtctgttttcttgttgccgtcagtccgggaaaaggatcgtcatttttccaggcgggcgagcagcgaggacgtatcccagcgattgccgcccatggcctggacgtcgccgtagaactgatcgacgagagcggtgaggggcagcttggcgccgttgtggcgggcctcgtcgagcacgatgccgagatccttgcgcatccagtcgatggcgaagccgaagtcgtacttgccttcgttcatcgtcttgtggcggttttccatctgccaggagccggccgcacccttggagatgacgtcgacgaccttctcgatatcgaggccggcgcgcttgccgaaatggatgccctcggcgaggccctggacgatgccggcgatgcagatctggttgatcatcttggtgagctgaccggcgcccggcgcgcccatcagcccgaccatgcgggcgaaggcgtcgatgaccggcctggccttttcatagacggcgtcctcggcaccgcacatgaccgtcaacacgccattttcggcacctgcctggccgcccgatacgggggcgtcgataaagccgacgcctttttccctggccgcggcatggagttcgcgggcaacgtcggcactggcggtggtattgtcgatcaggatcgcgcctgattgcatcgtctgcagaacgccgtccttgcccgatgtcaccgatcggagatcatcgtcattaccgacgcaggtgaagacgaaatcggcatcgcgtgccgcttcggccggtgtcggggccgacttgccgccgaacttctcgacccaggcggccgacttggcggcggtgcggttatagacagtgacatcatggccgcctttcaccttcagatgacctgccatgggaaaacccatgacgccgagaccgatgaatgcgacttttgccatttgcctatcctttcatgaatgctggcttgaggagtagcccaaatagggcgaggcggaaagccgccgaaatggtgcgcgtcgtgcctcttggaacaaaattccgctcaacggccgaaatcgggtcaggataatttcgagcgggccgaaaatcacaaacataattgtcgatataatttatagaattcaacaaactttcctcatcgtaaacacggcggcttcggagatcgggccggaacacgccgatcgaaaaggggacagccatgatttcacgtcgacagacactgggacttctgggcgccgcagcagcgaccgccgtgctgccggccatccggccggcgcgcgccgcggccacggagtttcgcatcggctggcagaagaacggcgtgctggcgctcgccaagcgccgaggcgcgctggagacgcggcttgccgacaagggcattgcggtaagctggtccgaattcacctcggggccgccgctgctcgaggcgctgggggccggcgcgctcgatttcggcgcgacgggggacgtgccgccactgtttgcgcaggcggcgggcggtcagctctattatgtcggcacctatcgcggcagcgccgccggctcggcgatcgtcgtgcccgaggattccgacatcaagacggtcgaggacctgaagggcaagaaggttgcgttcaagcgcggatcgagcgcgcacaacgtgaccgtcaagctgctgcgcaaggccggcctcaagatcgaagatgtcgagccgatcgacctgtcgccggcggatgccgcggccgccttcaagaatggcagcatcgacgcctggtcgatctgggacccctatctcgcgatcgtcgaggccgatccgaagacgcgcatcctgtcgacggccgaaggggtcgtgccgtcctacagctacttcctcgccaattccggtttcacggatgcgaacggccaggtcgtgagcgatgtcatcgacgaactcgcgaaggttggccggtcggcgcagggcagcctcgatgacacgatcaaggagctttcggaaatcaccggcgttcctgtcgacatcacccgcgtcacgctgacgcgcgcgggcgcggatctcggcggcgtttcgacgatcagcgacgaggcggccgcctaccagcaggcgctggccgacgagttctacaatctcggcatcgtgccgaagcagctcaccatcggtagcgccatctggcatccggccagctgagcgcgtctcccatacaaggatcactctcatgagcatcaagcacgatcccatcaattttctctggttcattccgacatcgggcgatggcgcctatctcggttccaacgatctgaaccgcgcgccggacttcgattatctcacgcagatcgcccaggcggccgatcgtctcggctattccggcgtgctcctgcccaccggtgtctcctgcgaggaatccttcgtgacggcggcggcccttgcgacgaagacggagaagctgcaattcctggtcgccatccgtcccggcacggcatcgcccgcctattacgcccggctgacgacgacgctcgaccgcatctcgaatgggcgcttgctgctcaacatcgtcgtcggcggcagtcccggcgagcttgccggggacggcatcacgctggcgcatgacgagcgctacgcccatgccgacgagttcttcacggtgttcgaggaactgctcgagaagggtgtcgccagctatgacggcaagtacatcaaggccgccaatgcgcgcctcggtttcccctccgtgcagaatccgcgtccaccgctctacttcggcggctcctcggatgccggtatcgatttttcggtcggccgggtcgacaagtatctgacctggggcgagccgccggcacaggtggcggagaaggtccagaaggtgcgcgcggccgccgcgcataaaggccgtgaggtcagcttcggcatacgcctgcatttcatcgttcgcgaaacagacgaggaggcttgggcggcggccgatcggctgatctccaagctcgacgacgaaaccatccgggaggcgcagcagcgcttcgtcaacgagtccgattccgtcgggcagaagcgcatggcggccctgcatggcggccgccgcgacaggcttgaggtgtcgccgaacctctgggccggcgtcgggctggtacgcgccggcgccggcacggctctggtcggttcgccgaagacagtggccgcgcggctgcgcgaataccaggatgccggcatcgatacggtgatcggctccggttacccgcatctcgaggaagcctatcgcgtcgccgaattgctgttcccggaactcggcatcacccgcaaggagcagcgccacgggttcgacagcgacttcggcaagcgccagatcttcggcggcggcagccatggcggcaatctcaaggtggtctccggatcctgatcgaacatgcgcgctgcccgccaggcgcgggcggcgtttcaatggacacatgtctgccgcgggcctgaccacggcgacacagaggcgaggaagaatccatgtcgacattcgatacgccgatcggccgggcgccggcggagcggaaagctggcaggagcggaggcggagcgggctttcgcctgccggcgccggggcgcgacaagttgctgccatatctggtgccgctcgccatcatcgtggcgtggcaggccggctgctcgatgggcttgatctcgtcgcggatcatgccatccccggccgacgtggccatggccttctggtcgacgacgctatcggggcagttgccgaacgacattctggtcagcgcggggcgagccttcgccgggctcgtcgtcggcggttcgatcggatttctgcttgggatcgccaatggtgtctcgaagctttccgagcagctgaccgatacgacgctgcagatgctgcgcaccattccgcatctggcaatgatcccgctggtcatcctgtggttcgggatcggcgaggaatccaagctgttcctgacgtcgctcggcgtgctgtttcccgtctatctcaacacctatcacggcgtgcgcaatgtcgaccgcgatctgatcgagatgggccgggtctacgggatgagcagctggacgctgtttcgcaaggtggtccttcccggcgcgcttccgtcgatcttcgtcgggctgcgctatgcgctcgggatcatgtggctgacgctgatcgtctcggaatccatcgccgcgtcgtcggggatcggtcgcatggccaacaatgcccgcgaattcatgatgaccgatgtcgtcgtgctggcgctcgtcatctacgcgcttctcggcaagctcgccgatgtcgtggcccgttcgctcgagcgccgcgcgctcaggtggaacccggtctatcagaagtaggagacaggccatgaccctcatcgcacatgagcgcttccagggcgcagcggatgcgccggaatatacgatcgacacggaccgtcgggcgcgtagcggcggcgccgcgatcacgctgaaagggctggagaagagctttggcgccaaccgggtgctgcgggggatcaacctgcacattccggccgggcagttcgtcgcggtgatcggcaagagcggatgcggcaagagcacgcttttgcgtatcctcatggggctggacgcgccgacatcaggcgagcttgccttcgatgcgcccggcggcgtcgaagccaatgcgcgtatcgccttccaggagccgaggctgctgccatggcttgatgtcgccgacaacgtcgccgtcggacttggcgacaagctcgaccggcggatcgtggcgcgggaggtcgaggccgtgctcgccgaagtgcagctggcggaaaaggccggtgagtggccggcgcggctttcgggcgggcagcggcagcgcgtggcgcttgcccgtgcgcttgtgagccgtccaggtgtcttggcgctggacgaaccgcttggcgcgctcgacgcgttgacgcggatcagcatgcaggagctcttggcgcgggtctggcgggagctcggcttcaccgccgttctggtcacgcatgacgtcagcgaggccgtgcatctggcggaccgggtgatcgtgctcgacgagggcagggtgtcgctcgacctcgccattccccaaccgcatccacgccgtcacggcaacccggatctggcggagctggaggggcggctgctatcggccattctcggaacggatggtggtcactgattagtgacggggtgcgcttcagccttcggcgtcgttcggcctgaaacgggtgggcaggttctccttgtagggataatacttgaaatatggcatggcttcctcgagcacccgggccaccgacgggcgctgcatcaggcgctggtgataggctgcaagcttcggcaagtcgctgccgtaaggcaccagtgtctcggcgtagaacaggccgggtgcggcggcgcaatcggccatggtgaagctttcaccggtgatccagccgccagccgccagcttgtcctcgatcacggcataggcgcgcttcagcgcctgacgcgcttcctctgcccttgcctcgcttccatcggaccgcatgcgctcgctgacgatctgctgcatcggctcctgaacatagagatcgaaaaaacggtcccatagccgcacatccagcgccgcgtcgaaatccccggggatcaaccgcgcgccgccgggatgatagcggtcgagatattcgatgatgatggaggtctcgaaaacggtccggccacggcccttgtcctcaagcgccggcatcttgccgagcggcgagagcgcgagaaacgccgtgcgcgaggcctgatcgccgagatccaccagcacacgctcgaagggcgtgccgccttcgtagagcgcgatcagcaccttgtggcagaaggaggcaagcggatgctgatgcaggacgagtgtcatgagaacgtatccttcgcgccattcctggatgtcgaatggcgcgatatcagcatgtcgtcatgtcagcggcaagcgcttatccgccagcgggcctttagcgcagcttcgcgatcaccaggtgtcccggcgtcggctggccttcttccatgcggacgttgatgtcggtgatctcgatcagctcgaagccggtggcgtcgaggcgttcgcggacataagccgcggaatgggcgaagcgctggtgcgggccgaccatgtaggcgcggccggcaagcgtctcctcgggcagggtttccgaggaaaagatgaagaggccgcccggtgtcaggttctcggcggcgccgaagaacaggggctcgaggccgcccagatagggcaggacgtcggtggcggtgatgatgtcgaagggctcttcgtcattgtcgtcgaggaagtcctcgacctcggcgacgaacagcgtttcgtagaggtccttctcgtgggcgatctcgaccatgttttccgagagatcgatgccggtcatctcctcgcagagatcgcgcagcgtgccgccggtgagacccgttccgcagccgagatcaagcaggcgcttgaatgggccgaggttaagcgcctgcaggcgctggcgcaccagcatggggacgtggtagccgagctgctcgacgaggacgtcctcgaagacttcggcgtgctggtcgaagagcgtttcgacataggcgtcgggcgccttggccggcgtttcgccgcggcccatggcggcgatgcgcacggcagcaccaccgtgatcgtcgggatcgatcgccaatacttcttcataggccttcacggcggcatcaacatcgccggccttttccagcgccaatgcgcggttataggcttccgcgagcgcgtcttcgtcgatcttcctggccatcacaatccaccatcgttttctcgttgccctgcctctaaggcgagaggcgcggttttgcaatggcgaggttgacggcggccgatcagttgatgatgaactcgcccttcagcgcgcgccattccgtggccgagatcagcttgcggtgaatgtagcgcaccgagtgcagcggtccgtccagcgtctcctgccagaatttcaggaagccgcgcatttcgggaaagtcgggagcaagatcgtaatcctgccagatgtaggtctgcaggatcgcgtgatgatccggcatgcgatagaggatctgggccgttgtcaggccgtaaccctgaagctgtctttccatgtccttgtgcatttgatgcctcgcctgttcccatccggcgcttattagcgtcagatgaaatgagagcatgacatggttacgcgaagcttgcgaaaaagctacaagaaagcatatatcattgtttattttcaatagcttggcagctctccgtcgggagtgctgccaaggctttagcgcttcaggtgccgcgtcaggcggcgctcgatccagttccagaggtgcctcaggctttcgaccatggcgagatagaagatcgccgcccagagataggtctggtagtcgaaggtgcgcgagaaggcgtagcgcgtctcgcccatgagatcgagcacggtgatgatggcgacgacggccgatcccttgatcaggagaatgatctcgttgccataggggcgcagcgccacgatcagcgcctgcggcagcacgatcttgcggaaggcgatgatcttgtgaatgccgagcgaggaggccgcttcgtgctggccgcgcgggacgctctcgatggcgccgcgcaggatctcggcctgataggcggcggtgttgatggtcatggcgaacaggccgcaataccaggcgtcacggaagaaccaccagagccccaccgcctcgagctgcgggcggaactggccaaggccgtagtagatcaggaagagctgggcgaggagaggcgtgccgcggaagacgtagacatagcagaaggcgagcccgttgatgatcttgttcttcgacatgcgggcgaaggcgagcggtaccgacaagatggcgccgcatgcgaccgatactgtcaccagcacgatcgtggtcatcaggccgtggagatagcgcgggccgtagcgggtgaatttctcgacgtcccaacccttgatgatcatgccgaccagcgcgatcgcgagaacgatccacagggcgaccacgagacagcccatgacgcgggagaaggtcagcggcttgtcgaggtgtttcggggccggctgcggggggatcaggacctctgcatggctcatcggctgatctccgagcgcttcgcccaccgttcgatatagcgcaggccgaacgaggaaaggatggcaagcccgagatagatggcacaggccagtgtgtagaacagaaacgcctccttggtgaccttcaccgccacgcccgtctggcgcagcacgtcggcgaggccgatgatcgagacgtaggaggtgtccttgagcaggatcatccagagattgaccaggcccgggagcgcgatgcgcaccaactgcggcaggatgatcagcatcatcgtgcgaccgcgatgcagaccgagcgcgtcgccggcttcgtactgacccttggggatggcgcggaaggcggacaagagcacttccgagcaataggaggagaacacgaccgacagggcgatgacgccggagaagaaggcgttgatctcgacgcgaccgtcgtagccgaaccaggcgagcaccgactggatcaggatctgcatgccgtaatagatgatgaacagcgtcagcagttcgggcaggccgcgaaatatggtggtatagataccggcggcgagccgcacggccttttcttccgattgctggccaagcgccacgatgaagccgatcaacaagccgatcggaagcgtcacgagggcgaccgcgaccgtcaccttcaggccggcggcgatctcatcgccccagccggtgtcgccgcaggccagaatcgtcgattggccgagccatgtgaaaatgccgactggtccgcatagcgggtcaaacacagatccaatccaggtccagagcgaacccagtgcggaggacaatccgcccatgccaagtttcccctcgcggcttttgccgccttgatattgcactctttgtcaaacaaaaatggcggaagggcaagcctcccgccatggcattctttcgaggactacagcttattcggcgccgtagacgtcgaaatcgaaatacttgtcctggatcttcttgtaggtgccgtcggcacggatcgcggcgatcgccgtgttcagcttttcgcggagcggatcgccctgacgaaccgcgataccagcgccaacgccgttgatttccttgtcgaccggcagggtcgtcaggatcttgcagcatgcgccggcatccgacttaacccactgcgacagaacgacgacgtcatcgatgacggcatcgacgcgaccgctggaaatgtcgagcttgtactcgtcggccgtcgggtagagcttcagctccgtgtcggccaggtgcttttcagcatagttggcgtgggtggtcgaggtctgcgcgccgatcgtcttgcccttgaggccagcaacgtcggtgacggtggagtccttcggcacggcaaccgccggcggggtgttgtagtacttgttggtgaagtcgacgagcttcgaacgctccggcgtgatcgacatcgacgagatgatcatgtcgaacttcttggcgttgaggccggggatgatgccgtcccaatcgctactgacgatggtgcagtctgccttcatctgggcgcagagcgcgcgggcgatatccatgtcgaagccgaggaactggccgctggcgtcaacatattcgaagggcgggtaggtcgagtccgtaccgatgacatacttctcgtcatcggccatggccgagcccgcgaaaagagacatcgcggcgatcgaggcggctgcgagaaaacgggtggagatatgcatgtgagtcctctctgttggttgccgcatgccatccttttgttttttggggcatgaagcaggacgctgctttgcaacgccttgccgcgataatcaaaccttttttgcgtgaattgcaactgctttcactggcttcttgtgcatcgcaaccatggcaaagctgaaccttcgcagaccgtcatattcataccgggttaatgcggcaattcataagaccatggaacgaatcctggcgtgctcagtttagcaaggcttgtttgcgtgccgaaaagagacgtcgttgcgaacgcgaagaataaaacaaggaacgaggaaccctatgggaatgaaatccagattgtttgccagcgcggcctttccgcttctgtccctgtcgcttgtgctgccgccggcgcacgtgtttgcggcagcgacgagcgtggaagaggtcggagcgacaaatcgggtcgccgcgggcagctacgaggtggcgcaggatgcaacctccgaagaagagctcctgaagaagcgtcagcagcaggaacaggaacagcagcagcaggcgccggccgaagcgcctcaggctgccgaaccgccggccgaggcaccacccgcaccgaagcaggaagcacccgccgaagctccgccaccggccgccgagccggcgccgcaggccgaagcgccggcggaaaagccgagaaagcgcgagcccgccgccgaacagcccgcagcggagcaacccgccgccgagcaacccgcccagcaggaagcgccggccgagaagccgcgccgccagaagcagcccgccgccgaacagcagcaggaacaggtagcgccgagcgccgagcagccggccgaacagccgcgccgcaagaagcgtgaacagcagcaggaccaagccgctccgcaggcggagcagccgcaggccgaacaggcgcagcctcagtcggagcccgagcaggcaaaaccgccgcgcaagaacggcaagccggccgccgccgatggtggtgagcagccggaaaagccgcggaagaagccagcagccgaagcaccgcaggccgaaccggctcaaaagcctaccgccgagaccgctccggccggcgagcagccagcccccgacaacgccgcgaagccgcaggaaacgcccgcaaccggcaaggcgccggttcccgccgggcagccgggcgaggcgcagccgcaggctaaccccggcgaagcacccgcccagcagcagggcgagcaggtcgttccgactcagccggacggcactcccgccgagcagccagccggccaggccggccagccgccagcaggtcagccacccgtcgcgcagaccgagcagcctatcccggcgcccgagaaggtgacgccacaggaactcgagcgtcgcaaggaaatcgccgccgatccgagcaagagcacggagaccgtcgttctgccggtccagaacggcgcggccgttctcgacagcgacaaggacgcggatcgttccggcggcgtgcagtctcgccgcgaccgcgacaggcagcgcgggcaggagcagcaggtgcgcgtgccgaagtccgacgccgacgcgcaaatggcgccgggtggggcgcagccggcgccgctgaagatcgaggcgatcaccagcgagcagggtcggcgtctcgatcgtaggccgcaatttgcccgtcccgacggcgccaacttcggccagcgtggcgacgacaaccgcgtcatcatccagttcaacaaccagacttacgttcgtggcgacgacgaccgccggttcctgcgtgacggcgagcggccgatctacgagcagttgccgcgcgaccgctatcgcgagacgatcgatcgcgacggctaccagatcgtgacggtgcgcaatcgctacggcgatatcatccagcgttcgcgcctcgacaatcgcggtcgtgagcaggtgctctattacacgcccgaactctacgacaatccggaccgcgactacttcgacgatccgggcgccgagctgccgcccatgcgcctgcgcatcccgctgcaggactacatcatggataccagcagcgacgaaggccgcgactattacgacttcctgcgcgagccgccggtcgagccagtcgagcgcgtctactcgctcaacgaagtcaagtattcggcccgtatccgcgacaaggttcgccgtatcgacctggataccgtgacgttcgcgaccggcagcgccgagatcccgatgagccaggcgcgcagcctgcgcaaggtggccgacgcgatcaacgaggtgctgaagaaggacccgaccgagaccttcctggtcgaaggccacaccgacgccgtgggctccgaccagagcaacctgatcctgtccgaccagcgcgcggaatcggtggccaatgtgatgaccgatgtctatggcatcccgccggaaaacctggctacccagggctatggcgagcgttacctgaaggtcaacacgcagtcggccgagcagcaaaaccgccgcgtcaccattcgccgcgtgacggcgctggtaaggccggtcgcgtcgaacaactaaggacgccggcaagtatcgacaagcgaaaggccgccgggcgatcggcggcctttcccgtttcaaccgctgctcacttcagcggcgggagatcgatggttttcgcgatgaagtcggcgatggcgagcgtgtcgtcgagatcgaagacgggcagggtggtgtccgtgatcgggtgatcggcggcgatggcgacgatatggggatcgccgggcgcgagcggttcgcggtttgccgcctccagccgacgggcctcgatcttcgggatgggctcgcgcttgtagccctcgatgaggacgagatcgcagggggtgatgcgcgaaaggatctcttcgaaactcggttcggcggcgccgcgcagctcgtgcatgatggcgtagcgcgtgcccgacacgatcgtcacctcatgcgcgcccgcctgccgatgccggtagctgtcggcgcccaccttgtcgatgtcgaagtcatgatgggcatgcttgatcgtcgagatccggtagccgcggcgggtgaactcctcgacgagccggaccgcaagcccggtcttgcctgaattcttccagccggaaatgccgaagattcttggccgcccgctcatgtcagcaccttcatccagcgctccgcctcggcgagatcgtcgggcgtattgacgttgaagaacgggtcgagcaggcttgcccgggtcgggcgcagcgggaaggcaacttccgtaacgtcatgccgtaacaggaagtcgcgaacgctgcgtttctcgtcggttgcgatccagctttccaggtcgtttgccagtgcgaccggccagaggccgaagacgggatggctgcgcccctcggaggtggcgatggcgatcttcgcgggcgtgtcgatggcggctgccagccagtcgacgagatcgtgcgggaagaaggggctgtctacggatacggtcacgacatgggtgacacggggcaggcgcgcgccgtgcgccatggcggcgtggatgccggccatggggccggccttgccgggaatgatatcgggaataaacggccggtcgcagcgatcggggacggtgtcggcattgacggcgacggagatgacctgcggcgacaactgctcgatgacgcgatcgagaagcgtgcggcccgaaagcgcgacacctgccttgtcgcgccccatgcgcgaggagcggccgccggcaagcacgacgcctgggatgttggatcgctcgagcgtaaagctgcttgctgtcgggttggccatcagaccggtactctcggttcggattcctgtgcgaccggcgcgccgcgccgtttggcctcacgatagaaagtgtagagcccggaggcgataacgatcaaggcgccgatcacggtccagcgatccgggacttcgaagaagaagacccagccgagcagcgccgagaagatgaggctggtgtagcgcagcggcgcgacgaaggagatttcgccggttcgcatcgctgcgatgatgcactggtagcccaccagtaccgtgaccgcggcaaccgcgatgtgcgagaacgacgtcgcgctgactggccgccagccgccgaggacgggtgtcagcagagcgccgaacacggtgaccgccatggcggtgatgaccgttatcatcagcgaggggatttcgggatcgatcctgcgcgtcgcgaggtcgcggccggcggtgacgagcacgctggcgatgcaaagcagcgccgccgaggtgaagccgccggcatcggggcggacgatgatcatgacgccgatcaggccggccaatatggccagcatgcgccgccagccaacgggctcgccgaagaacagcaccgcgccaaaggtgacgaccagcggcagcgactgcaggatcgccgatgcattggcaagcggcatcatgccgagcgcggtgatgtaggtcgcggcggcgaggatttcgcagatcacgcggatgacaaccatgggctggagcaggatgcgccaggagcgcaacgcacccatgtggcgcgcgatcagatacaccagcgcgctggtgatgaccccgcgcatgaacatgatctggcctgcgttcatttccgatatgaccgatttcgacagggcatcgcccgcggaaaaaaaggccatcgcgatcgtcatgtagatcgcgccctgagtattgcttgaccgcggcatgaagcgattccgattccgtcccgcgctcttttagagcgggagcgtggcgattggaatcgaatgctgggagcacgcgcgataattcgattgcgcagtgcacaatgcagtcgttcagacagccgtgatggtgcggtcacccgccggtgacgctcatgtggcggctgacggcgggacggttgtgggtgcggtcgatgatgaagtcgtggcccttgggcttgcgggagatggcttcgtcgatcgcggcgtagagcaatccgtcgtcctcggtggcgcgcacggccgagcgcaggtcggcggcatcgttctgcccgaggcacatgtagagcgtgccggtgcaggtgaggcggacacggttgcagctctcgcagaaattatgggtcatcggcgtgatgaagcccatgcggccgccggtttccttgacggtgacatagcgggcagggccacccgtgcggtagccgatttcactcatcgtgaactgcttctcgagatcggcgcgcagcttggagagcggcagatagcgatcggtgcgatcctcctcgatctctcccatcggcatggtctcgatgacggtcaggtccatgccgcggccatgcgcgaaacggatcatctcgggcatctcgacgtcgttgaaatccttcagtgcgacggcgttgagcttgatgtgcaggcccgccttctgggcggcatcgatgccttccatgaccttgtggaaatcgccccagcgggtgatctcccggaacttgtccggatcaagcgtatccagcgacacgttgatgcggcgaacgccgcaatcgtagagctcgtcggcgaagcgggcgagctgcgaaccgttggtggtcagcgtcagttcgtcgaggccggagccgatccgcttgccgagttcgcgcacgagatgcatgatgttcttgcgcaccagcggttcgccgccggtcagcctgagcttgcgaacgcccttggcgatgaacgcggaacagagcctgttcagttcttccagcgtcagaagatccttctttggcaggaagttcatgttctcggccatgcaataggtgcaacgaaaatcgcagcgatcggtcaccgagacgcgcagataggtgacggcccgcttaaacgggtcgatcatcggtttcgcatcggccacgaggggcgcggcgttggcgatcgttccaaccttgctgttcactacagcctccaatccatacccaatgtgcgtactgtgcggggcaacgtcaagcaataggcggcacgcatacgctaatttgaacttgcctcaaagaggcgcattgcctactcctcaaaacgaagaggagcattctcatgagcgacatctggccaacggagctgaaggtatcgaaggatcggcagcggctgatcgtcaccttcaacgacggcgagagttttacgctcagcgccgagatgctgcgcgtgctgtcgccatcggcggaagtgcagggccatggaccgggccagaaggttaccgttcccggcaagcgcaacgtcgcgatcatctcgatgacgccgaccggcaattacgccgtcaggatcggcttcgacgacatgcacgacacaggcatcttcacatggtcttacctgcgtgaactcggcgaacgcggcgaggaactctttgccgcctatgagagcgaactcagcgaaaaaggcatgaaccgcgatacatcggaaaagcctcgctaggcgcgacgcgggcccgatcgcaacgccagatgccgcgtgtcactcccgcgtcatcttaggcggctaattaccgtgaagaaacaaggcgatggcacagtcatgaaaatcatcgagaccgtcgaggagcttgccgcgatctacggcggtggcgtgtcggaagcatccgtggcgaaggtgacgcattatctgacgccgctctaccggcagatgatcgaggcgtcgcccttcgtcgcgctggcgaccgtcggaccggaggggctggactgttcgccgcgtggtgacctcggcggcgtcgtgcgcgtcgtcgacgacaagatgctgcagatgcccgactggcgcggcaacaaccgggtcgattcgctgtcgaacatcgtgcgcgatccacggctggcgctgatgttcctcatcccgggctcgaacacgacgatgcggatcaacggacgcggcgtggtttccaacgacgatgcgctgctgtcgtccttcgagatggatggcaagcatccgcgcacggtcatcgtggtgacgatcgatgaggtgtatttccagtgcgcgcgggcgctcatccgctcggaactgtggaatcccgatcatttcgtcgatccgaaaggccttccgacgccgggcctgatgctgaaggcggcgacggaagcgttcgatcacgagacatatgatcgcgaatgggccgcgcgcgcggccaggacgatgtggtagcgatcgacaagagcctgccgcgcggcgacggtcaggccttgtagatcagccagctcttggtgaaatccttctgcatgccgtcctcgaagaggatgctgcagttgcggccggcattcttggcgccatagagcgcgacgtcggtcttgtggtaaagttcgcccgcgtcctcggtgttcgatgccatgcaaacgccgaccgacaccgtgaccggcccgtagttgacgcgcgtgcgcgaattcttgaacggcgtggcctccagcgtacggcgaatgcgctcggctatggccatgacttcgtcggcggtgttgccctcgatgatcagcgcgaactcttcgccacccgtgcgggcgacgaaaacgtcacggcgcacgttggcgcggatcaccgaggcaaccgtcgccaggatcttgtcaccgaccgggtgaccgtaggtgtcgttgatcttcttgaagttgtcgatatcggcgagcacgagcgccgtgaccgggcgcatggccgggttgttgaagacggcggcgaggcgatcgtcgaaggcgcggcggttggagagccgcgtcagcgaatccgtgttggcgatgcgcttgtactcgtcgagttccttgcggacctgatccatttcgttggagcgctggacgacgttttcgacggtgcgctcgccgtgcgccatggtgcttccggtggcctcggtcaacagatgcagtgcgttctggatgaggtcggcgctcgatgcattcttggaggtgatgcggctataggtctcgccaagcagcctgttgtagctctcgagagacgtctgctcctgacggagaacacgcagtaccgattcgagttcggcggcgatgcgggtgtgggcgtcgtcgaagacgcggccggcaccatggctgaagtgctgggcgccgagctcgtcgagctcttcctgtgacgcctggttgccaagggcagcgagatcgcgcgtcagcgccggattggagccgatataagcttcgtagaagagttcgtaattccgcggaatgggcgccacacccatggagcgcatcgcaaaagtgatctggcttgccacatcgggaacttgcgtctttggcgccacagccgtcgtcatccggccactcctctggtatatctcaaaagtcttctcttatttcttaagctacaattgttttgaaatgattaaggttggatataccagagattacatgtgaattttgtttcatttggtttctctcttcttatccgtatgatttttatataggaatccgcacgatgccggagggcgcctacgcgttttgagggtatcttttctttaaattataaagccgagatattcgtcgccattaacgtcgtcaatgctgcgttgacaatgggtgtcttatttcggctcttttgtgaacgacgacaagctgccaagttatccttcgaagcaccgtatcggtgccaatggaaggcagtaagccatgcagacgtcccgcaactcaccccctgccatgctggcggccgcaatcatcgccggatctcttttcctgatccagcaacagggcttctttcatggtgcgttttcgtcggaaatactggcaagcatcgatgccggcgatgtgcttgtcacgagcgatcatatcgcgacaagcaaagaccggtcggccggcggccgcgtgaccgccgtggcccgctgatcgatcaaccgaggttgaattcctggaagaagtcgttgcccttgtcgtcggtgacgatgaaggcggggaagtcctcgacctcgatcttccagacggcttccatgccgagttcgggatattccagcacctcgaccttgcggatgcaatcctgcgcgaggcgggcggcggggccgccgatcgagccgagatagaagccgccatgggtcttgcatgcttcgcgcaccgcgcgggagcggttgcccttggcgagcatgatcatcgagccgccaaaggactggaactggtcgacatatgagtccatacggccggccgtggtcgggccgaaggagccggaagcgtagccggcgggcgtcttggccgggccggcgtagtagaccgggtggttcttcatgtaatcgggcatgccttcgcccttttccagccgctcgcgaatcttggagtgcgcgaggtcgcgggcaacgatgatcgtccccgtcagcgacaggcgggtcttgaccggatgcttgctgagttcggcaagtatatcggccatcggctggttgaggtcgatgcgaaccatcgattccgaaagcttcgtctcgtcgatctcaggcatatacttcgacggatcggtttccagttgctcgacgaagataccgtcgcgggttatcttgcccttggcctggcggtcggcggaacaggagacgccgaggccgatcggcagcgacgcgccatggcggggcaggcggatgacgcgcacgtcgtgacagaaatacttgccgccgaactgggcgccgacgcccatctgctgcgtcagcttgtggatttccttctccatctcgacgtcgcggaaggcatggccgctttccgaaccctcagtcgggagatcgtcgagataacgcgtggaggcgagcttgacggtcttcaggttcatttcggccgaggtgccgccgatgacgatcgccaggtggtagggaggacaggccgccgtccccagcgtgaggatcttctccttgaggaagtcgatcatccggtcatgcgtcagcagcgacggcgttccctgataaaggaaggtcttgttggccgagccgccgcccttggcgacgaagaggaagttgtattcgtccgtgccttcctcgtagatgtcgatctgggccggcaggttgttcttggtgttcttttcctcgaacatcttgatcggcgccagctgcgagtagcgcaggttcttcttctcgtaggcatccatgacgcccctggcgagtgccgcgtaatcctcgccctcggtccagacacggcggcccttcttgcccatgatgatcgcggtgcctgtgtcctggcacatcggcaggatgccgccggcggcgatgttggcgttcttcaagaggtcgtaggcgacgaaacggtcgttgtcggtcgcttccgggtcgtcgaggatcgaggcgagctgcttcaggtggccgggacgcagcaggtggttgatgtcggcgaacgcggtctcggccagcagacggatgccctcgggctcgacggtcaggatatcctggcccttgaagctgtcgacagagacatggtcgctgctgatcttgcggtattgggtgctgtctttgccgagggggaagagatcgtcagccataaaatgacctttcgtgcgggcctgaatggaaatcgcagacggtctatgcgggcgtttggccaattgcaatcattctaaaaccttcaaaaaacgctcaagaatgcatgaaaaacaccgccacggaggtcgtgacggtgtcttgtcggtcatgagtggtttggaggcggcttgcttgccgtaagttcgcttgacgttacttggggccgatcatggtttccgggcggacgtactggtcgaactcttcgttcgtcagatagccgccgccgacggcttcctcgcgcaacgtcgtgccgttcttgtgggcggtcttggcgatcttggcgcagatgtcgtagccgaggcggccgttgagcgccgtcaccagcatcagcgagttctcgacgcccttcctgatgttgtcctcgcgggcctcgatgccgaccacgcaattgtcggtgaaggagacggcggcatcgccgagcagctgcaccgactgcaggaagttataggccatcatcggattgtagacgttgagctcgaaatggccctgactgccggcgaaggtgagggcggtgttgttgccgaagacatgggcgcagacctgcgtcagcgcctccgactgcgtcgggttgaccttgccgggcatgatcgacgagccgggctcgttttccggcagcgacagttcgccgaggcccgcgcgtgggccggaacccaggaagcggatgtcgtttgcgatcttgaagagggcggcggcggcggcgttgatggcgccgtgggcgaagaccatcgagtcatgcgaagccagcgcctcgaacttgttcggcgcggtgacgaagggcaggccggtgatgccgctgatctcttcggcgaccttctcggcaaagcctaccggcgcgttgaggccggtgccgacggcggtgccgccctgggcgagcttggagagggccggcagtgtcagctcgatattggcgatcgcggaagcgacctgcgcggaatagccggagaattcctggccgagcgtcagcggcgtggcgtcctgcgtatgcgtgcggccgatcttgatgatgtggctgaactcggtgaccttcatgtcgagcgcggcatgcaggtgcttcaggcccggcagcaggtgatggacgatctgctcgacgcaggcgatgtgcatggccgtcgggtaggtgtcgttcgacgactggctcatgttgacgtggtcgttcgggtgcaccggcttcttcgagcccatgacgccgccgagcttttcgatggcgcggttggagatcacctcgttggcgttcatgttcgactgcgtgccggagccggtctgccagacgaccagcgggaagtggtcgtcgagcttgccgtcgacgacttcctgggcggcgtcgatgatggcgttgccgatcgcgggttccagcttgccgagcgccatgttggcgcgggcggcggcctgcttgacgatccccagcgcgcgcacgatcgacagcggctgcttctcccaaccgatcttgaaattgccgagcgagcgctgcgcctgcgcgccccaatacttgtcgctttgtacttcaatctcgccgaaagtatcggtttcgatacgggtggaagtcatggccatgcctttctttcgcgtaagcggctgcaaagatgccgtcttataggtcgcaaaccagcccaagaaaacagcggggatcaaaaatatgatccgaatagtcatattattggccgtatcatgcgtggttttttggccacgtcttattttttatcgaacaacaccttttgggggactgtgtgggcaggtgaaaataaggtaaaaaattaaccaataatttcataattttgtgtgaactgtgacaaggcggcgggtttgctgcgtcacgtaagagcgagttcctcgaggctggcggtggcgtcccgtttctgccatgtcacctggcggcgacgggtgagtaaaagagttttgagctgggcgaagcccatcaccgaagacagcatgagactgggactggaaaaagcatgacattcttcttgaaaggtgcggtttccgcactggcactttcttgcggcgtggccgcgatgggtgttgcacccgcgcatgcctatacgctcatggacatgatccgaggtgatcgtgcccgtacccagagcacgatcgtcaatccggctcccgaagtggcgccgccgccgcaggtcaataccagcgcaccgctgccgaaggtgtcttcgccgcagtattacacctacaaggtggacccgatgcggcttgtcgataccggcaagttcaccgatcctgtcgtgacgggcgccgttgtcgccgccgtcggtacgccgggcgatgccacgccgtcggtgcagcgtcgctatctgatcgatgcgaaggtgcgcgcgcccgtcgacgtcgccaaggcgctcgagagttactacggcgacagcaagaacgagatggtctggctgaccggcaccgagatcaacgatcgcgccaagtcggcgatggccttcctcgccaatgccggttccgtcggtctcgacccggccgactatgccgtcgaggttcccgccgtcgatccggccagtcccgatcccgcgatgcgcgaccgcgccctgacgcagttcgaactgcagctgtcggccaaggttcttgcctatgtgcaggacacggttcgtggccgcgtcgacccgaacaaactttccggctatcacgatttcgtccgcaagacggtcaatctcgatccggttctgaagctggcgcgaatgagccctgacgtcggcgcctatctgtcgagccgtacgcccaatggtccgcagttttcggcgctgaaggccgagcttgcgaagctgaagggcgagggcagcggagagcagccgatcaccatcgcgatcagcggcgcgctgcgtcccggcgaaacgtcttcggaaatccccaacatcgtcaaggcgatcggcaagtacggctcggccgcgctgaagagcgaaaatgccgcaacgctttcggcttatgccggcggtaccgactactcgcccgagatcgtctcgctcgtcgaagcgttccagaaggaacgcggcctgaagcctgatggtatcatcggccaggcgacggtgcgtgtcatgactggcggcgacagcaatggttcgaagatcgagaagctgatcgtggccatggagcaggcccgctggctgccggccgatctcggcccacgctacgtcttcatcaaccagcccgcctacatggtctattactacaacgacaacaagcaagagttgtcgatgcgcacggtgatcggcaagaccaccaaccagaccttcttcttccaggaccaggttcagaccgtcgagtacaacccgttctggggcgtgccgcagtcgatcatcatcaacgagatgctgccgaagctgcgcgccgacccgggctatctcgaccgcatgggctatgaagtcgctgtcggcggcaaggccgtgccgtccgcgagcgtcgactggtacggttcgaccgcgaatgtcgcggtgcgccagccaccgagcggtgacaacgcgttgggcaagctgaagatcctgttcccgaacaagcatgccatctacatgcacgacacgccggagaggaccttcttcaagcgtgacatgcgcgcgctcagccacggctgcgtccgtctcgaggaaccgcgcgtcatggcggcggccgtcctgagcaccacggtcgacaaggtgaacgaggagatcgccaccggcaagaaccacgccgtgcaggtgccgcagaagttcccgatctacattgcctacttcacggcatggccggacaagaacggcgtcgtccaatacttcaacgacgtctacgaccgcgatagctacgtgcgcaaggcgttcgacgccacgaccaaggcacgcggcgcacagatctgatgttcgacgccgcgcggccaaccggtcgcgcggcgttttctctagatatttcgatgtccaatgatatcggcggtcagcctgcgtggaggaagcggatcgcttcgtcgcggcggaagagatagagcagggtgcgtaccgcattgcccctttcggacgtcagttccggatcacgctcgatcagataggccgcatccttgcgggcgatctccagcaaatcggcgtgtgcctctaggcttgcaatcctgaagcccggggttcccgactgccgcgttcccaacagttcgccttcgccgcgtagtttcagatcctcttcggcgatcctgaagccgtcttccgtgtcgcgcatgatcgtgagacgcgcgtggccggtttcaccgagcggaccgcgatagagcaggatgcaggtcgatgcctcgtcgccgcgcccgacgcggccgcgcagctggtgcagctgtgccagaccgaaacgttcggcatgttcgatgaccatgatcgtcgcatcggggacgtcgacgccgacctcgaccacggtggtcgccacaaggaggcggatctcgcccgatttgaaggccatcatgatcgcgtccttctccgagccgctcatgcggccgtggatcaggccgacctggcttccgatcgcgcgcccgagcgccgagaccagcgtggcgtggcgttcttcgaccgacatcaggtcgctctcttcggattcctcgaccagcgggcagatccagtaggccttcttgccgtcggcgagcgccgccttcaggcggctgacgatatcgccgatgcgttcggtggggatggtgatcgtctggatcggcttgcggccggcgggtttctcggtgagcttggagacgtccatgtcgccgaaggcggcaagcaccagcgtgcgcggaatcggcgtggcggtcatgaccagcatatggggcgtgatgcccttggcggtcaggcgcaggcgctggtggacaccgaagcggtgctgctcgtcgacgacagccagcatcaggttcttgtagttgacggtatcctggaacagcgcgtgggtgccgatgacgatctgggcctcgcccgaggcgatgcgctcaaggatttcgtcgcgttccttgcccttggtgcggccggtcagcacttcgatgcggatgccggcggcggccgtgtatttggcgatggtcgcgtggtgctggcgggcgaggatttcggtcggcgccatcaagacggcctggccaccgctttcgatgacggcagccatcgccatcaacgccaccagcgtcttgccggagccgacatcgccctgcagcagccgcagcatgcggtcttcgccggccatgtccttcaggatctgcgcgatagcctcggtctggctgccggtcggcgaaaagggcagggcctcgaggatctggcggctgaggtggcccgtcgcatgcaccggctggccggcgaccttgcgcaatcgctggcgcaccagcgccagagacagctggccggccaggaactcgtcataggcaaggcggcggcgggcaggcgcctgcgggtcgatgtcggcggggtcgcgcggctcgtgcaggccgtggaaggcatcggcggtcgagggcaggccctgcttttgggccaacgccgcatcgatccattcggggaactcgggcgtcttcggcagcgcggcttcgatgatcttgcgcagcgtcttcggcgaaagacccgccgtcagcggatagatcggctcgaccagcggcaggttttccgcttcgctggctttgacgatgtaatccgggtgcaccatcgaggcgcggccgttgaaccagtcgatcttgccgctgacggtcacctcttcgtcgagaggcagctgcttctccagccatgtcgactggccacggaagaagacgagcgtcagttcgccggtctcgtcatgcaggaagacgcggtaggggatgttgctcttcttgttcggcggcggctggtggcggtcgacgcggccggtgatggtcacgatggctccctgcggcgcgcgcgcgatgcccggctggttgcgccggtcgatcagcgagtgcggcgcgtggaagagcagatcgacgacgcggcaatcctccggcgtctcgcggccgaagagcttggcgagcagttcggcgatcttcgggccgacgccgggcaggccggagacggaggagaacagcggatcgagaatggcggggcgcatgccggcaaaatgcgacgaacaatgcgtgcttggcaaggctgacaagccgctttcgagggtctatagaggcgcatcaacaggaagctatgccatgacaggtgtcacactctcgagcgccgatctcgatccccgccgccgccggatactgttccgctgctggcatcgcggcatccgcgagatggatctggtgttcggacagttcgccgagcgcgagatcgccggcctctcggatgcggaactcgacgagttcgagacgatcatggcggaagaggacaacgatctggtgcgctggatcatgggaacatggccgacgcctgagcgtttccagacaccgatgttcgagcgcctgtgcgcctacaagcccgatttcgagtaccccgccgacagcctgcccaggaatggatgatgatccccggttttgatgcgaagaagctgacggcgctgaacgtgccgctgacgataggcaatgtgcccgccggactggagccgatgctgctggcggagcttgcccgcgccggtgcgccggttgcctacgtgctctcggacgggcagcgcatggccgatctggagcagatgctcggtttcgtcgcgcccgatattccggttctgacgctgccggcctgggactgtctgccctacgaccgcgtgtcaccgagcgcagacacctccgcgcgcaggctcgccgcactcggcgggctgatcgcgcatcgcaagaagccgcatgcggcgatcgtgctggtaaccgtcaatgcgatgctacagaaggtggcgccgcaggatgtgatcgagagcctgacgttttcggcgcggccgggcaatcaggtgcggatggacgacatcgccggacggctggagcgcaatggcttcgaccgcgtcgccacggtgcgcgaagtcggcgaatacgcggtgcgcggcggtattctcgatgtcttcgtgccgggctctgaggagccggtgcggctcgatttcttcggcgacacacttgagagcatccgcagcttcgatccggccagccagcgcacgacggggcaggtgcgctcgctcgacctcaatccgatgagcgaagtgacgctgacaccagatacgatcagccgcttccgcaagaattatctctcgaccttcggtgccgccacccgcgacgacgctctttatctggcgatctcggaggggcggcgctatcctgggatggagcactggctgccgctgttctacgaccagctggagacggtgttcgactatctcaagggcttccgcttggtcaccgaccacacggtgcgggaagccgccgaggagcgctcgaagctggtcttcgactattacgacgcgcgtctgaattcgggcaagccggtgaagggcatgtcgcagggcacgccctacaagcccgtggtgcccggccagctctatctcgacggcaagacgttctcggcgacgctcgacgccttcgatgcgatgcggatcacgccgttcagcgagcatgagggcgaggcgcgccgcgtcgtcaatctcgatgcccgccagggcgagcgctgggcgcggccgagtgccgagggcggcggcaatgccgagcgcgtcaacgtgttcgacgtcgtcgtcaagcacatcgccgacaggcgggcgagcggcgccaaggtgctgatcaccgcctggaccgagggatcgctggagcggctgctgcaggttctttccgagcatgggctggcgcgcgtgaagccgatcgcggcattgaaggagatcgacaggctcgaacagggcgaggcggcagccggcgtctacagcctggagacgggcttcgaggtcggcaatctcgtcgtcatcggcgagcaggacattctcggcgaccgcatggtgcgccgctcgaagcgccgcaagcgggcggccgacttcatctccgaggtcgcgggtctcgacgagggctccgtcgtggtccacgccgagcacggcatcggccgcttcatcggtctcagcaccatccaggcggccggcgcgcagcatgcgtgtctggagctgcaatatgccgacgaggcgaagctgttccttcccgtcgaaaacatcgacctcctgtcgcgctatggcggcgaggggacggaggcacagctcgacaagctcggcggcggcgcatggcagatgcgcaaggccaagctcaagaagcgccttctcgacatggcggacggcctgatccgcatcgccgccgagcggctgacgcggcatgcgcctgttctgacgacgcctgaggggctctacgacgagttcgccgcgcgcttcccctatgacgagacggaagatcaggacaacgccatcgaggcagtgcgctcggatctcggcgccggacggccgatggatcgcctcgtctgtggcgacgtcggcttcggcaagaccgaggtggcattgcgcgcggccttcgtggctgcgatgaacggcatacaggtcgcggtcgtggtgccgacgacgctgttgtcgcgccagcatttcaagactttcgccgagcggttccggggtctgccggtgcgcgtggcgcaggcctcacgcctcgtcggctcgaaggagctggcgctgaccaagaaggaagtggccgagggcaagaccgatatcgtcgtcggcacgcatgcgctgctcggctccggcatcaagttcgccaatctcggcctgctgatcatcgatgaggagcagcatttcggtgtcaagcacaaggagcggctgaaggagctgaagagcgacgttcacgttctcacgctatcggcgacgccgatcccgcgcacgctgcagctggcgatgacgggtgtgcgcgaactgtcgctgatcaccacgccgccggtcgaccgcatggcggtgcgcaccttcatctcgccgttcgattcgctggtgatccgcgagacgctgatgcgcgagcattatcgcggtggccagagcttttatgtctgcccgcggctggctgatctcgaggaggttcacgccttcctgcagtccgatctgccggaactgaaggttgccatcgcgcatggccagatgccgccgggcgagctcgaggacatcatgaacgccttctacgaagggcgttacgacgtgctgttgtcgacgacgatcgtcgaatccggtctcgacgtgccgacggccaatacgctgatcgtgcaccgcgccgacatgttcggcctggcgcagctctaccagctgcgtggccgcgtcggccgctccaaggtgcgcgccttcgcgctgttcacgctgcctgtcaacaaggtgctgacggcgacggcggagcgccggctgaaggtgctgcagtcgctcgatacgctcggtgccgggttccagctcgctagccacgacctcgacattcgcggtgcgggcaacctgctcggcgaggagcagtccggccatatcaaggaggtcggcttcgagctctaccagcagatgctggaagaggcggtggccgaggtgaagggcgtcgacgagatccaggataccggctggtcgccgcagatctcggtgggcacgtcggtgatgatccccgacggctacgtgccggacctgcatctgcgcatggcgctctaccggcgcctcggcgagatcaccgagctcaaggagatcgatgccttcggcgccgagatgatcgaccgcttcgggccgatgccgatcgaggtccagcatctcttgaagatcgtctacgtcaagtcgctctgccgtatcgccaatgtcgagaaggtggatgccgggccgaagggcgtggtcatccagttccgcaacagggagttcccgaaccccggcaatctggtgggctatatcgccaagcagggctcgatggcgaagatccgccccgaccacagcgtgtttctgacccgcgacctgccgacgccggaaaagcggctgcagggagcggccgtgatcatgacgcagcttgccgagctggcgaagtaggacggatcaccactctcctcatcccggccttctgccgggatccagcaggcccaagtccttgggccgtaagagtcttttcgccgcgcggacgcgcgtcggctggattcctgtgacatcgcccgagcgaagcttgggcacaggaatgagggagcagcggaattcagttcataccggcgcgggcttcggccttggccttggcgatatcgcgcagcgcgccggcgatgacatcaggcgtctgggcgccgctgacggcgtattgctggtcgaagatgaagaagggcacgccgttgacgcccatcttctgcgccgattcgatttcctcgacgacgaggaccttgtcggcatccgaggcgagcagggaggtggtcacggcgcggtcgaggccggccttctcggcgatgtcgagcagaacggcgtgatcgccgacattcaggccttcctcgaaattcgccttgaacaggccattgaccacgcgatcggccttgtcgcgatcctcgatcattgcccaatgaatgaggcggtgggcgtcgagcgtgttcgggccgatcttgatggcatcgaaattgaaattgattccgacctcacgaccgagctcggtcagcatcttgtgtccctcagcgacacgctcagcaccgccgagcttcttctcgagcgctgccttctggtcgacgccttccggcggatagtcgggattgagccgataggggcgccagttgatgtcgacgccgacttcgtcctgaacctccgatatcgccagctctagcctggccttgccgagatagcaccaggggcagacgacatccgatacgacgtcgatgacaatgcgttccattggctttcctttccgggttgcggccgggactgctgattgagatgatggccctgacgccattttcggacgccgcggtttgaagccatctagtctctgaggacgctcagttcaaccaggcaggaaaagagaaccacctgttactggacgctctggtcccaccatgccggcagctggtagccgtaaagcggcaccgtgtcgggacggccgatgcgcttgctgcgagcgacccactggttgttgacgtgatagagcggcagcacatagtgccccgacaggagcatgcggtcatgcgcgcggacggcggcggtgaagtcctccgcggagcgggacgtcaggatgttctggatcagcttgtcgacatccgggtccgcgacgccggcgaaattgtcggtgccatcgcggtcgcgtgaggccgacgaccagcggccgacctgctcgatgcctggagacagcgacgaggtgaaggatttgacgatgacgtcgtagtcgaaggtgttcgtacggctctgatactgcgaatcatccacggtgcggatggagacgctgatgccgagcaactgcaacgatcgctggaaggagacggcgagtttctcctgatcggtgttctgcgtcatgatctcgaaggccagcggccggtcgttggcgtcgctcatcctgccgttcttgatcgtgtagccggcctccttcagtatagcggcggcttgcttcagcacattgcggtcacgcccggagccatccgtgaccggaagcttgtaggtgccatcgaggatggcgggatcgatacgatccttgatcgggccgagcagcttcagttcgcgctcgtcggcggggacgccgaagctggaaagaccggagttctgccagtagctctgcgtcctgatataggcgctggagaaaaggttcttgttggcccattcgaagtcgaagatcagcgacaggccctcgcgcagcttcacgtcggcgaagagcggccggcgggtgttgaagacgaagccgaacatgcccgaaggcagcttgggctggaaggtgtccttgacgacgtcgcctgacgtgaccgccggaaaattataggcgctggcccagtggccggggctgccatcgggatagacgtcgatatcgcccttcttgaacgattcgaacagtgtcgtgtcctgcaggaaatactggacggtgatctggtcgtaattgtcgaggccgaccttggccgggacatccttgccccaatagttcggatcgcgctcgaaggtgatgctttcgccgggtttcagcgacttgatcttgtaggggccggagccgatcggcggcttcagcgtcgagcggtcgaaattctccgcgtcgatcgcgtgcctggggagaatcggcgtcgagccggcgagaatcagcgggaattcgcggtcggccttgtcgttgaaggtgaagcggacgctgttgtcgccgaccttctccattttctcgacggcattgaggcgcgtgctgaacggcacgcggcctttctcctttaggatattgaaggagaagatcacatcctcgggcgtcaccggctggccatccgaccatctggcggcggggttcagattgaactggatataggttcggtcgtcgtcccactcgacggattgggcgagcaggccatagagcgtgaatggctcgtcgcgcgagcgcagcatcagcgtctcatagacaaggttgccatattccgggtcccacatgccgcgggcggtcgtgcgcatgctcttcaggatgaacgggttcaggttgtcgtaggtgccgacgacgccataggagatcttcccgcccttcttcacatccggattgacgtagggaaggttcttgaaatcctggggcagggcgggcgcgccgtgcatcgcgatgccggtcacgggctcggcaagtgctgtgccgcaaacgagagcgaaggcaacggggagaacgatccggagcatagtcgaaatcctttccggaaaacggcgcgattcgcgcgaagactatcatgcgcgcggcccgattcaccatccacggcgaattctttcgggcgacacgcaaaacgccaaagaaacactggaaatctccgacaacgcgatgtaacagggaccccgaagtcggggggtcatgcatttgccttattgttttaagaggtcagatgcgaacaaccctgttggtgaggatggcatatcggctgtcccaacgggatatcaggagacggaattcgttatgatgttcaagtctgaaaagaaaacacgggcagccctgtccgttatggcagtgatgcttggcgcctctatggctccggtgtcttctttcgcgcaggatgcatcggccgatgccgcaagccaggccccgggcgctccgcgccttggctggtacaagacctgcagcaagcagcaggacaacgacgtttgcgtcgtccagaacgtcgttctggcaaccggcggtcagctcgttaccggcgttggcctcatttcggtttccggcaaggtcaacaacaagagcctgcaggtttctgttccgccggcacgtctcattcctccgggtatcggcatgcagatcgacggcggcaagccgcagaagatcgactatctgatgtgcatgcccgatcgttgcgtcgctcagattccgctgacggatgccatggtcgccagcctgaagaagggcaccgacctgatcctgacctcggtcaacttccgccgtgcgccgaacccgatcaagatttcgcttgaaggcttcaccggcgcattcgacggcgaagcggtttccgcttccaagctcgccgagagccagaagagcctgcaggacagcatgcagaagaaggccgacgaagcgcgcaagaagcttgaagacgcccagaaggccgccaaggctcagtaatgccagaggctcggtaatgtctagccctaaggattttcgagaaacccggcttcgcgccgggttttttgttgcctgcaatccggatcgcatccaaagaaaaaccccgctgggtgagcggggttttgaaatggatatgcagcggcttagtgggtgaagctcatcttgggtttgaactgccccgtcggtgccatatcgaaaatctggtagacctgttcattgcgaagcggctctccgctttcgtcattcatcaggttctgttcggatacgtaggcgacgtattcgttgtcttcgttttcggcgagcaagtggtagaagggctggtccttgctggggcgcacgtcggcgggaatagaattccaccattcttccgtattcgcgaattccggatcgacatcgaagatgacgccgcgaaacggaaataccttgtgccgaaccacttcgccgatactgaacttagctagtctttctttcatggtacgacttcctttcatcacctgatttggtgattggtctcacccaaatcaagatttgtgcgagaactcgtcacatgagtgtcacattcgcgcgcggcgtccgcgacatctggcaggcgaaagccccggcgaaccggggctttccaagggcttatgccgagtagtacatgtcgtattcgaccggatgcggggtcatgtcgtagcgcatgacctcgatcatcttcagctcgatgaagctatcgatctggtcgtcgtcgaagacgccgccggcggtcaggaacttgcggtccttgtccaggctttccagcgcttcgcggagcgatccgcaaaccgtcgggatcttcttcagctccttcggcggcaggtcgtagagatccttgtccatggccttgccgggatggatcttgttcttgatgccatcgaggccagccatcagcatggcggcgaaggcgaggtaggggttcgccatcgggtccgggaagcggacttcgacgcgctttgccttcgggttgctgccgaacggaatgcggcacgaggcggaacggttgcgcgccgaataggcgagcagaaccggtgcttcatagcccgggacgagacgcttgtaggagttcgtcgacgggttggtgaaggcgttcagcgccttggcgtgcttgatgatgccgccgatgaagtagaggcagctctcggagaggcccgcatattcatcgcccgcgaagctcggcttgccgctcttccagatcgacatgtggacgtgcatgcccgagccgttgtcgccgaagatcggcttcggcatgaaggttgccgtcttgccgtaggcattggcgacctggtgcacgacgtacttgtagatctgcatcttgtcggcgttgcggacgagcgtgtcgaacttgatgccgagctcgtgctgggcggccgccacttcgtggtggtgcttttcgacgacgacgcccatttccgacaggacggtcagcatctcggagcgcatgtcctggcagctgtcgatcggcggaaccgggaaatagccgcccttgacgcgcggacggtggccgaggttgccggtctcgtattcggtgtcgtcgttggacggcagttcggtggaatcgagcttgaagccggtgttgtagggatcggccttgtagcgaacgtcgtcgaagatgaagaactcggcttcggggccgacgaagacggtgtcgccgatgccggatgccttcagataggcttcggccttcttggcggtgccgcgcggatcgcggttataggcttcgccggagaccggatcgagaatgtcgcagaggatgaccatggtggactgcgcgaagaacgggtccatgtggaccgtttccgtgtcgggcatcagcaccatgtcggattcgttgatcgccttccagccgccgatcgaggagccgtcgaacatgacgccatcggcgaacatgtcttcatcgacgcaaacgacgtccatcgtgacgtgctgcagcttgcccttgggatcggtaaagcgcaggtcaacaaacttgacgtcgttatccttgatttgcttgaggatttcgcttgcggtcgccataaaatggttccttcatttgagaagacgggacgattgtctcgcctggaccaacgtcagatcgcgtcgacaccggtttcgccggtacggatacgaatgacttcttcgatattggatacaaaaatttttccatcgccgatacggcccgtttgcgcggccttgcggatcgcgtcgatgacggcctccgcattttcatcggcgaggacgacttcgaccttcaccttcggcaggaaatcgacgacatattcggcgccacggtacagttccgtgtgacccttctggcgaccgaagccctttgcttccgtgactgtgatcccctgcaggccaacttcctgaagggcttccttcacttcgtccagcttgaagggcttaatgatcgcttcgatctttttcatgagaaaatgactctccgcttctcccgttatagcaggctcatacccaccccccgatatgatgcagttatcgtgccagttggaaagtggaatcttcgcggaaatggcggccacaggccgaaagtcgagtgattttcagtaatttcaacgatttttttgtcaaaatcggcgcgggttgtgcgcgaaaagcttaaaattcaatcgaaatctggaatattcgcgatgtctgatgctttctttatggtttgggcgcgcggttaaaatatatgcaaatggctaaataataagcttccagattttgcgccaatcggttgttttttaggcggattctgtttgaatgaccggatggacactcagctcgccgaccttctccttacacccgccgaaatgaccgccgtcgatgccgccgctgcttcctcgggtatcgacagttttgggctcatgttgcgggcgggcgccggggtggcagcgacttttctgcgccactatccgtcggcgaggcgggctgtcgtgctgtgcggccccggcaacaatggtggcgacggctacgtggcggcgcggtgccttgcggacagcggtgtcgaggtggcgctttttcatctgggcgatcccgcgcgattgacgggcgatgccgcgcgggcgcgcagccactggtccggtgtcggcgcgccgatcgaggactacaggcccgcggacggtgacgtggtgatcgacgcgctgttcggggccgggttggcgcgggtggtgcccgaggccgtcggtgccgtgatcggtcgtatcgccgatgccggcctgccggtacttgccgtcgacctgccgtcgggcatcgacggccggactggcatggtgctgggagcggcgttttccgccgcgcggacgatcaccttcatgacgcgcaagccgggccatctgttgatgccgggccgcgagctttcgggcgtgctcgaggtgctcgatatcggcatacccgcgcggatcgtgcgcgggcaggcatcgggcaagctggcggagaacaggccggacgcgtggcggcggtggctcccgtcatcggggcaggagacgcacaagtataaacgcggccacctcgtcgtcttctcgggcgagaagggcaagacgggtgcggcacgactgtcggccatgtccggattgaaggccggcgccgggctggtgacgatcgtctcgcccgaggatgccatggcggagaacgcgacgcatctgaccgccgtgatgctgcacggcatcgatggggacgccgagctcgccgattggctgaaggatgaacggttgcgcagcttcgtgctcgggccgggcttcggggccggccagaaggcgcggggtttcgtggccgcactttcgcaaaggcatctggtgctggatgccgacggcataacatcgttccgcgatgatccgaacgcgctgttctcattgttcgccgaaggggagacgcggctggttctgacgccgcatgagggcgagtttgcgcgattgtttccggacatcgccgcggacccgcgtctcggcaaggctgacaaggcgctggcggcggcggcgagggccaatgcagccatcgtctacaaggggcccgacacggtgatcgcctcgccggatgggcgagcgttgatcaacgccaatgcgccgatctggctcgccaccgcgggatccggagatgtgctggcggggatcatcggagcgctgatggcgcaggggctgccggccttcgaggcggcggcggccggcgtctacatgcatggcgaagcaggcagccgcgctggcaaggggctgacggcggaagacctcgtcagccaggtgctgccgctctgacgatctggcaggctgactacttgccgacctcttcctgcagcgcgatggcgccgaagggggcgttgaccttgccctcgtggatcatgaaggcgaagacgtcgcgcggttcgaccttgaccttgcgatcactatcgatgagcggcagatcatcaggcaccttgccctcggcccagctctccaggcgattggcccaggccttgagctccttcggcggatagcaggtccggatgtcgtccgagcccttctgcaggcgcgtgtagacgaaatcggcggtgacatccgccaccatcggataatcgaaatgctcggcgacaacaggggcgacgccgtatttcgcgagcagggccacgaactccggcaccttgaagctgtcgtggcggacttcgacgacatgttttagcggcaggccatcctgcttctctggcaagagcttcaggaagccctcgaaatcctcgggctcgaacttcttggtcggggcgaactgccagagaatggggccgagatgcgggccgagctcgacgatgccctggccgagaaagcgctcgaccgattcaccggcttcggagaggatctttctgttcgtgctgaagcggctggccttcagcgagaagatgaagccttcaggcacatcggcggcccacttggcgaaggtctcgggcttctgcgagctgtaataggtgccgttgacctcgatgaccttcagctgtcggctggcatagttcagctcgtccttctgcttcaggtcggaggggaagaagtggttgcgccagggctcgaacgtccagccgccgatgccgacgcgaatggtgccgggttttgtcatgacttcaatccatcctgttcgttttcgccgaaaccgattttcggatagtcgacctcgcgcggcaccagacgaaagacgcgcgaatccttctcggcacgttcgaaatcgcggtcacgaagcgcgcggcgtacgcgatccagcttgcggatatcctccgggcttaccgtcggggaccattcaccaccatcgtcgcgaagctccacgacgacctccgcggcatattccccctcgcgaatgagctgcgacgcctgtctcgtcattgcggcttcctcctagtgaaatcgtcattccagcggtctggatcgggaatgtatgcggttatcaacaccgccggttcgaatgcacctgatgggatgccccaaagcaaatgaatggggcgtccccgctcgtccgtctgcagaaccagaacacagggtcccttgtgatagctcggatactcctccacgagcaccgctgacgcgacatcggtcaccaacggttcgatcagcagatcgtcgttcagcaactcccgcagcgcatgtgccgagaccctgaatttgccgtcagcgatcagcacacgcaccgtggagaggatatcgctcactccgccgcctgcaccttcttcaccggccgccgctccagcagctccttcaggaactggccggtgtaggaccgcttttccttgacgatcgtctcgggcgtgcctgaggccacgatctcgccgccgccgtcgccgccctcggggccgaagtcgaggacccagtcggcggtcttgatgacttcgaggttgtgctcgatgacgaccaccgaattgccctggttgaccagttcgtgcagcatctccagcagcttcgccacgtcgtggaagtggagacccgtcgtcggctcgtcgaggatgtagagcgtgcgaccggtcgagcgcttcgagagttccttggcgagcttgacgcgctgggcttcgccgcccgacagtgtgttcgcctgctggccgaccttgatgtagccgaggccgacatcgaagagggcctgcagcttgtcgcgcacggcggggacggctgcgaagaactcgacgccttcctcaacggtcatgtcgagcacgtcggcgatcgacttctgcttgaaggtgacgtcgagcgtttcgcggttgtagcgcttgccgtggcagacgtcgcaggtgacgtagacatcaggcaggaagtgcatctcgatcttgatgacgccgtcgccctggcaggcctcgcagcggccgcccttgacgttgaaggagaaacggcccggctggtagccgcgcgccttggcttccggcaggccggcgaaccagtcgcggatcggcgtgaaggcgccggtataggtggcggggttggagcgcggcgtgcggccgatcggcgactggtcgatgtcgatgaccttgtcgatatgctcgaagccgtcgatgcgatcgtgatcggccgggatttcgcgtgcgcccatgacgcgacgggcggctgacttgtagagcgtttcgatcaggaaggtggacttgccgccgccggagacaccggtgaccgccgtgaagacgccgagcgggatcgatgccgtgacgttcttcaggttgttgccgcgggcgccgacgaccttgatttccttacccttcttcaccttgcggcgctcttcgggaacgatgacgccgagttcgcccgacaggtatttaccggtcagtgacttcgggttggccatgatgtcctgaggcgtgccgtgggcgatgacctggccgccatggatgccggcggcggggccgatatcgacgacgtcgtcggcctgcaggatggcgtcctcgtcgtgttcgacgacgatcacggtgttgccgatgtcacgcaggtgcttcagcgtttccaacaggcgggcattgtcgcgctggtgcaggccgatcgatggctcgtcgagcacgtagagaacgccggtgagacccgacccgatctgagaggccaagcggatgcgctggctttcgccgcccgagagcgtgccggagttgcgcgagaggctcaaatattcgaggccgacgtcgttcaggaagcgcaggcggtccctgatctccttcaggatgcggactgcgatctcgttctgcttggcgttgaagctgtcgggcagcgtttcgaaccagtcgcgggcgacgcggatcgacatgtcggtgacctggccgatatgcagcttgttgaccttcacggcaagcgcttccggcttcagacggaagccgccgcaggacgggcagggtgcggccgacatgtagcgctcgatctcctcgcgcgcccaggcgctgtcggtttccttccagcggcgctcgaggttggtgatgatgccttcgaaattcttgtgcgtcgtgtaggagcgggcgccatcgacgtagtggaattcgatcttctcctcggtgccgttgaggatcacgtcctgcgccttggcggagaggtcgttccagcgggcgccgagcttgaagccgaagtgcttgccgagcgcttccagcgtctggttgtaatagggcgaggacgacttggcccagggggcgatggcgccgtcgcgcagcgtgcgctcgggttccggcacgatcaggttggcgtcgatcttctgctgggcgccgaggccgtcgcaggtcgggcaggcgccggccggattgttgaaggagaagaggcgcggttcgatctcggagatggtgaagccggagaccgggcaggcgaatttttccgagaagagaacgcgttcgtgcgtctcgttgagcgacttgttggcggagccgccggcggcggtttcctcgaccggcagtggcttgtcggcgaactcggcgatggcgaggccgtcggcgagcttcagcgaggtctccaagctgtcggccagtcgcgccgagacgtcggcacgcacgacgatgcggtcgacgacgatatcgatatcgtgcttgtatttcttgtcgagcgcgggagcgtcggcgatctcgtagaactggccgtcgatcttgacgcgctggaagcccttcttcatgagctccgcgagttccttcttgtactcgcccttgcggccgcgcacgagtggcgcgaggatgaagagacgcgtgccttcctcgaaggcgaggatgcggtcgaccatctggcttacggtttggctctcgatcggcaggccggtggccggcgaatagggaacgccgacgcgcgcgaagagcaggcgcatgtagtcgtagatctcggtgacggtaccgaccgtcgagcgcgggttgcgcgaggtcgtcttctgctcgatggagatcgccggcgacaggccgtcgatctggtcgacatcaggcttctgcatcatctcgaggaactggcgggcataggccgacaggctctcgacatagcggcgctggccctcggcatagatggtgtcgaaggcgagcgaggatttgcccgatcccgacaggcccgtcatgacgatcagcttgttgcgcggcagatcgaggtcgatgcccttcaggttatgctcgcgcgcgccacggattgaaatcgtcttcagttcgctcatcgtcttctgcttctgtgctggaacaagccccttatttagtgatgccggcgggcgagtcgaggctgaatatcttgaaggtgcaaggttttcgattcggttgacacgatcatagggataaaatagaacaaataaagaacaaaattccttgtggatgaaccgctatggacgtccatcgcaccgcctctatggtttaaggtgcaccgattgtttcaagcgccgccgggcagggcggcaggtagggtgaaaagtatggctggcagcgtgaacaaggtaattctgatcggaaacgtgggtgcagaccccgagatccgtcggacgcaggacggccggccgatcgccaacctccgcatcgcgacctccgagacctggcgcgaccgcaattccggcgagcgtcgcgaaaagaccgagtggcacactgtcgtcgtgttcaacgaaggcctgtgcaaggtcgtcgagcagtatgtcaagaagggcgccaagctctatatcgaaggcgcgctgcagacccgcaagtggcaggaccagcagggccaggaccgttattccacggaagtcgtgctgcagggcttcggctcgacgctgacgatgctcgatggacgcggcgaaggcggtggtgatcgttctggcggtggttacggcggtggccgtggcggcaatgccggtggtggtgatttcggcggtggcggcggttatggcgacgattacggttcgccttcgcagtcgtcgggccgtggcggctcgggcggcggttcgtcttccggcggtggcggtaatttctcgcgcgacctcgacgacgatattccgttttgatcggacgacagaccgcagggtttcaaacggcgcgccagatggtgcgccgtttgcgttttgacttgggtttgacttcgagcgatggccttgaccgggagcgatgggctcagacgggcgagggagcgaggttcatcgccgacttgatgccatcgacgacgaactgggtcgccagcgccgccaggataacgccgagcagccgggtcaggatggcgcggccggtgacgccgaggaagcggtcgagccggtcggcgatcaggagtgccaggaagagaagcagcaggcttgcggcgatgacgatgatgagctgcgccagctcgaaggccgtctgcatcgagcctgcgatcaggatggtcgcggagatggcgcccgggcccgaaatcagcggaatggccagcgggaagacggcgatgttctggatgtggtcgacggtgatcgcggccgtgccggtcttctccttgcggtcctggcgcttctcgaacaccatttcgaaggcgatccagaagagcagcaggccgccggcgatgcggaaggcgccgatcgagatgccgaggacgccgagcacgctcgatccgaagagcgcgaagacggcgaggatgatgaaagcgatgatcgtgccgcgcagcgccacctgcttgcgctgggccctgctcatgccgacggtgaggccgagaaagatcggcgcgagaccgggcggatcgatcgtcacgagcagggtggtgaaggcgttgatcagttggtcggcgcttgccatcatgtctccgtatgcccatatccgggcctgattttcgcgcgattgtgaggtgggcaaaccaattttgcaaacggcgcggcgtgcgtgacggagattggggccgataagcctcgttttgccctgattagaccgtaaaagcctgttcaaaacctccggcaaaattggcttaggaacagcctttccgctataaatcttcaagtgattctagaagagatgtgatccattttgactgagcaaacaccccccggcggcgggaagctcccgccaggcatcgagcccatctccattatggaggaaatgcagcggtcgtatctcgattacgcgatgagcgtcatcgtcagccgcgcgcttcctgacgtgcgcgacggcctcaagcccgtgcaccggcgcatcctctacggcatgtccgagctcggcatcgactggaacaagaaatacgtcaaatgcgcccgcgtgaccggggacgtgatgggtaaataccatccgcacggcaacaccgcgatctacgacgcgctggcgcgcatggcgcaggactggtctcttcgcctgcccctcatcgacggccagggcaacttcggctccgtcgacggcgatccgccggcggccgaacgctacaccgaatgccgtctcgagaaggcggcgcattcgctgctcgacgatctcgacaaggaaacggtcgatttccgcgataactacgacggtacgctctccgagcccgtggtcgttcccgcgaaattcccgaacctgctcgtcaacggcgccggcggtatcgccgtcggcatggcgaccaacattccgccgcacaatctcggcgaggtgatcaatggctgtatcgcgctgatcgacgatccggcgatcgaactgcccgagatgatgcagatcattcccggtcccgattttccgaccggcgccaagatcctcggccgctccggcatccgttcggcctacgagacgggccgtggttcggtgatcatgcgcggtgtcgcgacgatcgagccgatgcgcggcgatcgcgagcagatcatcatcaccgagatcccgtatcaggtgaacaagtcgacgatgatcgagaagatggccgaactggtgcgcgacaagcgtatcgagggcatctccgacctgcgcgatgaatccgaccgccagggctaccgcgtcgtcgtcgagctgaagcgcgacgccaatgcggacgtcatcctcaaccagctctaccgctacacgccgctgcagacctctttcggctgcaacatggtggcgctcaacggcggcaagccggaacagatgcagctgctcgacatgctgcgcgccttcgtctcgttccgcgaggatgtcgttagccggcgtaccaagttcctgctgcgcaaggctcgcgagcgcgcgcacgtcttggtcggtctggcgatcgctgtcgccaatatcgacgaagtgatccgcgtcatccgccaggcgccggacccacagtcggcccgcgaagagctgatgacccgccgctggccggcgcatgacgtcgaaagcctgatccggctgatcgacgatccgcgccaccgcatcaacgacgacatgacctacaacctctcggaagagcaggcacgggccattctcgaactgcgtctcgcccgtctgacggcccttggccgcgacgaaatcggcgatgaactcaacaagatcggcgaggaaatcaaggattacctcgatatcctgtcgtcgcgtgtgcgcatccagtcgatcgtcaaggacgagctcgcggctgttcgcgacgagttcggcacgccgcgtcgcaccgagatcatggatggcggcctcgagatggacgatgaagacctcatcgcccgcgaggacatggtcgtcaccgtctcgcatctcggctacatcaagcgtgtgccgctgacgacctatcgcgcgcagcgtcgcggcggcaagggccgctccggcatgaccacgcgtgacgaagatttcgttagccagctattcgtgctcaacacgcatacgccggttctgttcttctcgtcgcgcggcatcgtctacaaggaaaaggtctatcgtctgccgatcggcacgccgacctcgcgcggcaaggcgatgatcaacatgctgccgctggccccaggcgagcgcatcaccaccatcctgccgctgccggaggacgaggacagctgggcaacgctcgacgtgatgttctcgacgacgcgcggcaccgtgcgccgcaacaagctcagcgacttcgtccaggtcaaccgcaacggcaagatcgcgatgaagctcgaggaagagggcgacgaaatcctctccgtcgagacctgcaccgagcatgacgacgtgctgctgacgacggcgctcggccagtgcatccgcttcgcggtcgacgacgtccgcgtcttcgcgggccgcaactcgatcggcgtgcgcgggatcaacctcggcgataacgaccgcatcatttcgatgacgatcgtcggccatgtggatgccgagccgtgggagcgcgcggcctatctgaagcgcgccgccaacgagcgtcgcctgacgacaggcgaggccgaggaaatcgcgcttgttggcgaggaagtcaccgaagagggacagctcagcgacgagcgctacgaagagctgaaggcacgtgaacagtacgtgctgacggtttccgagaagggctacggcaagcggtcttcctcctacgacttccgcatctccggccgtggcggcaagggcatccgcgccaccgacacgtcgaagacgggcgagatcggcgaactcgtcgctgccttccccgtggatgacaacgaccagatcatgctggtttcggatggcggtcagctgatccgcgtgccggttggcggtatccgcatcgccagccgcgcgaccaagggcgtgaccatcttctcgaccgccaaggacgagaaggtcgtgtcggtcgagcgcatccgcgatccggaagacgaggtcgaggaaggcgccgagaacggcgacgagaccgccgttttgccgggcgaagagccggccgctgaggcgggtgacgaaacgccgccggacgccgaggcgtaagagtttccgcgcaccggctttcccggtgggtggatatgaattgaaagagaaggggtcggacctgatgggttcggccctttttgtttcgggtggcgtgaccttgccgcaggtcactgcgcgctttccgcgcgggatgcagatggctcttcggaggcggagagcctttgtttttcctggcaaataccggggttgcggtcgtcgttgcttttggtgaatattcctcacgatgcaaccagatggcgattcgcgggcatgatggaggatccgctcgccaatcgctcaagggccggtgaggaggatgtcatgcacccgtatctgttacagtcactcgagaccgctcaagcctcgggccgccttgaagggtccgacgccgcgcagaagcgtgcgctcgtcatattggccgcgagagcgatcaaccgcatgcatgccgaactgggtatcgatctcgcggaaagcgagttgcggcgcggccatatcgtctatgatctcgcggaacttgcgacgctgatcgatgacggcgtgccggatcatgtggtggcctccgggctgaaggaagctgccgaggtaatggcgagcctttgccatttaatgatggagaatgccgccgcggagtgagcttgcggcgccgttatctcgtgcggcggtggtcgcgagcattgagtattcggcccaagccaacagaacaaaaaggccgcatcgtttccgatgcggcctttttgtttgtctctggttccgccttagttcaggcggcctgccgcgtgggcgagcatggtgtagaccttgccggtgtcggaggtcaggtaggactgggtgatcgtccggtcgcggtcggtgcgggcgacgtcggcgagcagcttttcgaagtcggcgatgtaccggttgacggcggtgcggaattccggctcgcggtcatacttgtgcttgatctcgtcgaaggtctgctggcccttcagcgtgtagaggcgacgcgtgaagacgtcgcgctcgccgcgctggtagcggcgccacagatcgaccgaggcatcgtgatcgatggcgcgggcgatatcgacggagagcgagttcagcgattccaccacatggcgcggattacggttgtcgccggcgcgcggcgcctggggtgccggtgcctcggcgcggggcgcctgctgacgggaaaccgcgtcctcggcgctctcgtcgcgcgatgcgccacgcagcaggtcgctgatccagccgccggatgccggcgaagcggcgggcgcctgggttacggccggggcacgctgcggcgttgcaggcgttgcggccgtcgggccgagcgaaccgcgcaggccgaagccttcgatcgaggagggtgggatcgaggagggcgggatggcggcggcggccggggtcggcagcggcgcgggtgccggagccggcacgggagccggctgctgctggatcgcggactgtaccggcgcctggcgcggggcaggttgtggctgcggctgctgggccagcgtgcgggcggcgggctcggagacttcgagctgctgcgtcgagcggccgacgatctgcgagatgtcctgcagcgccttgatctgctcggaaacggcgcggcgcatggcggcggcgctctccttggcttcctcgggcaggtcgaacgcgccgcgcttcagctcgctgcgcgtcatgtcgagttccttgcggatatcgccggcggagcggcggatttcctcggtggcgccggagaagcgggcgactgcttcgtcgacggcttcgcgcagcgattcacgcatctgctgtgcggcgccatccgacagacggcctgcgtcgcccatcatccgctcgacttccgacagcgatgccgtcaggccgccgcgaacgcggttggcgagttcgccggagcggcgttcggcattgccgagcgtggtgtcgagcgtcgcgttgacgtcgtcgctcgcctggctgacgctgctgcgcatcgcgtcagctgcttcggcggcgcgcttttcggcatccgagagcgtggcgctgatatcggcgaaggaggactggacgccctggcgcaggttgttgctgacctggttcgagcgctgctcggcgcgatcgaatgccgagtcgaccatgctgccgagggcacgcatcgtcttttcgatgtcttccgagcgctgcacgaggccgaccgacagcgtctgcaatgcggattcgcgatcttccagcgtcgaaacgaggttggactgcgcggcgccgagcaggttggacgcctgcgtcaaaaccttggagtgctcgtcgaagcggccgatgatgctgccgacctgcgacagcgtctggcccgagatgtcggagaggcggtctaccttgccttcgagaaggcgggtggaggccgcgaccatttcggcggccttggaggccgagtcggtgaagcgcgaggtggtgtcgccgagccggccatccacggcgctgagttcctcggcggcgcggctcatcatctggcccatgaccatgctgttgtcggacaggcggtcgatcaggcggttgacgttggagagcaggctgttttcgatcgcatcgacggccgaggtggcgcgttcggtgcgggcgttgatggcgtcgatcagcgcgttgttttcagtgcgcaaacgctcggcgctctgctcgccggccgaggtgatctgcgccgcggcatcccggccggtctgcgcgtagcgatcgatcatcgggcgggcggtctcatcgagaatgcgcgacagttcggtcgtgcggcccgcgagcatcgagttcagttcgcgggtgcggtcgtcgagggcggcgcggatggagctgccgcgtgcctcgagcgcctgctcgacggtgttgagcgtgccgtcgagttcgcgcgagcgctcctcgaggccgctgcggatcgcattgccgcgggcttcgagcgcgcgatcgacctcggccatcgtcgaggcgatctcttcgctggcgctcgatatcgtcgtgcggatatcggtgccgtggctggcgaaggtcgtctgcgcgtcgttcagcgccttggagatggcgccgacctggccgctgaccagcgtttcggcctcggccaccttgttgatgatggcgttgccggcttcggagaaggtctgggcgacggctgcggcctggccggcgaggcggttctgtgcctcggagacgcggctgacgatctgctcggagcgctcgcccatggagcgggcgaaatcgctgctcttggcgtcgagaccttcggcgaactgctggccggtctggttgagggaggctgcggcgcgtgcggcttcctcgtccatgccctgcgtggtgtcggccaccgcgctgcgcagcgaggcggcgaggccggcggccttgccttcgatggtgcggttgacggcgtcgaggccgacattcagcgcgcggtccatggtcgacaggcgctcgtcgatcttggcggtgccacgctccatggcctcgccgatgccagcggtgcgggcgtcgatgtcggaggtcaggcttgccgcgcggctgtcgatctcggcggcgaggtggctggtgcggccatcgatcgtctcggagaacttggcgatgctgttgtcaactgcggatgcgatgcggcccgaggtctcgtcgctcagcgcgccaagtctggagatgccgtcggtgagcgtgccggtcaggcgttcgcccgcggcatcgacctgctgggcaacgccgccgacgccgtcgcggatgcggttttcgagcgcggcgaggccggcctcgacgcgcgatccggtgtcggcgaagcggccggtcatgccctcgatggactggtcgaggtgcgaggcgaagctctcggtcgagcgggagatttcgtcggccgcgttctggaagcgaccggcgatgttgccggtgctgtcgcgaaggcggtcctcgagcgactgggcgctgttgtcgatcgcctggcgaatggaggcttcgcgatcttccagcgacatttcaagcatgctgacgctcgcggcgatcgaggcgccgatggtcgtggcctggtcggacagcgtctcgccgatctgggtctgcgcttcgttgagcgtcaggttgatcgcctgggtgcggtcgtcgagcgtcgcgcggatgcgggcatgcgccgagacaaggccgtcttccagcctggtcgtggcgttgccggtcagcgcctcgaagcgatcggcggccgaggtcaggccgccttcgatacggtcggttccgtcggtgatggtgctggagatggacgaggcgtgttcggcgagcgtgcgctccaggcgctgctggttttccgtgtaggcgccgcggatttcctgggccttgtcggtgaacgcgccggccacgcgggcttctgctccggcgacggtatcgatgagcgcgctggtgcgggcgtccagaacctcgtcgaagcggttctggctatcgccgagcgagatcgccagcgccatcgacttttcggcgagcgtgtcggcgaggcggtcgtggacgtcggcaaccgtgtcgttgatcgacttggcgttctgcgaaagcgtgctctcgatgcgatcgtggccgctgacgagcgagctcgcgatgctttcggcatgatggccgagcgtgtcctcgaggcgcgaatggctttcgttgagcgcgatcgccaggcccatggccttgtcgtcgagggcttcgctgatgcgctcgtgaccggtggagagcgaggccgcgatgccatcggcatggtgcgccagcgtgtcggcgaggcggccctggctatcatccatcgagatggcaaaggccatggcgcggtcgtcgatcgcttctgtgagcttttcctggccggcggcgagcgattgcgagatggcctgcgcgcggctgtcgagcgcggtctcgatcaggccacggccctcgttcatcgacgcggtgaaggcggcgctgcgttcggccatggtgtcggaaagcttgcgctcgcccgtcgccagcgactgcgagatcgcgccggcatgggtgccgagcgtttcctcgatgcggctgtggccttcgttcagcgagatggcgagcgccatggcgcggtcgtcgagcgtctcggctaggcgatcgtggccggaggcgatcgaaccggcgatggcatccacctgcgtcccaagcgtctcctcgaagcggttctggctttcgttgagcgagatggccagcgacatggccttgtcgtcgagcgtatcggcgaggcggtcatggctgccggtgacggcttcgatgatcgcttcggagcggctggcgagggtgttttcgaagcgcgactggctgtcggacagggcgccgaggaagacaccgctgcgcgccgacatcacgtcgtcgatgcgctcatgggcggaatccagcgcctgggtgatatcctgggcgcgcctggagatcgtggtgttcagctcgtcggcgcggccgaaggccgaggtgatctgatcggttccggccgaaaccgccgagctcagatccgaggtcgtcgacagcagcgtgtcgcggaattcggtggcgcgggcggacaggttgttgtggagctccgaggtgccggaggcaagcgccagcgagatttcggaggtggcatggctgagcgccgaggtcatttcggccgtgcgggcgccgatcgcgctcgtgacttcgtcgaccttgccggaaagcgtgctttcaagcacttcctggccggtcgaaagcgccgtggtcagcgcgaaggactggtcggtcagcgacgagccgatgcgctcgatgctggagctcaggatgccgttcagcgagtccgagccgccggtcagcgtgtcgttgatgcggttcaggctttccatcagcttggtgtcgagcgtgccggcgcgcttgtcgaaggcgttggcgaattcggcgacgcgttcgtcgaaggaggtggaaagctgcgcgacggtcgcctgcaggcgctcgtcgaagaagccggagcgcaggtcgagatccatgatggtgtcgtcgacgctggactgcaggctgtggcggaagctggtgccgcgctcgtcgagcgtgctgttcagcttggcgagaacgtcatccagcgtgctggtgatagtgcgttcgccgcccgtcaggctctcgttgatatcgcgggtgcgcgcgatcaggatctcgttcagctggcgggcgcggtcgttgagcgcggcgttcagcttctcggcgttgctgtccatggtggacgcacgcgtctcgaactggctgagaatcgtgttgccatggtcgctcaggctagacgtcaacgaatccaggcggttatcgaactcgttggcgagcgcgaaaccggaggaggtgagggtctgcagcagcgaatccgtcttggcggcaagcagcgttccaagcgactggatggcggattccgacttctcggtgatcgtggcggcgcgggtgtcgatcatcgaggcgaaggcttcgcccgaggtcgccaggcgcacggcgatttcttcggtcgccagcgacaggtcttcgcgcagctggtcgtgaacgccgacgatcgaggtgcggatacgctcggcgtgattgacgatcgcctcgcgctcggagccgagttcgtgaacgaggccgcgcacgcgcagttcgttgtcggcgtagctgcgctccagcgcgttgacttcggagtggacgagggtctcgagctcggaggcgcgggcgatggtgcgctcgatgccttcgttcatggcggagacttcacgacgcacggcctggccgaccgtcatgatgcgttccgacgcgatcgtttccggttcggagaggcgaagtgccacttccgccatcgagcgggcggcgtttcgcatgtcctgagcgcgcgccatcatgatggcgaaggcgtagaacaggagaacagggatgatgatgccgacaaggccggcgatcacgccgggcagggcgacgaggtcggccagcgaacggatctgccagatctgcggcgaatagaggagcgacatcaggccgagaccgccgacgatccacagaagcgaaacaagcgtggcgttgcgcagcgccggacgggcggagccgttgtcgagcgatttcaaaagcgaagcggggctgaccctgctgccatcgttggcggcgaatgccggcgcgcgcgatccctgctcggcggagcggggcgttgcggcggggcgctgctgcttggcatcgtctttacgctgattgcggacagttggcttttcggacacttttgcctccgaggcgtcttgcttcctgacttgtggagacggcgtatcatcgtcctcgaagtcgatctgcagggcttcatcaagcgccttgaacgccttgtcctcgatcgattcgttgtacttgttgttcgccattccgttacgcctcgttacatctcagccggtttactacgcatccgggatttccgcgtcacccgaacaaaccttgcctctgaacctgtccgccccgaattcgtagagcggataagtatgtcatttcagagtggatagctgctttcgcacacttacggtatcaaaacattaccattatccacttggagagcaaaggcatccacaacccagctctcccagtcgtatcgtagtgacacatccgggcctgcgagacaattaacgccttcggtcaaatgccaggttattaacgcttgattaacccgacttaacgccggggcggccttgaaatccaatgtgttagaggcgtttgaccggcgttaaccatatggcgagaaattcgccctcattgcgcccgaatttaacgcgattggcaccgcgcccccgcaacatcattgaaacggcgggacctaagacgggagaattggcatatggcagcagtcagtattgcgttcgcggcgccagatcatggcaagggacaggttccctcgcaacagcggccggtcgaccttgttcacctggccaaccagacgatgggcgacaagacgcttgaattggaagtcctgcagatgttcgcgcgccaggcccgcgcctgcctgcaggacatgtcttccggcgaccgcaaggcggttgcggcagccgcccacaagctgaagggtgccgcgggcgccgtcggcgccttccgggtgcgcgatgccgccgaagcgctggagggcaattgcggcgatgcctcgaacatggcggccgtcggcgtcgccgtcatcgaggcggagaatttcattctgaagctctgccgctaacgtcagacagcgctggcaagtgttcgatcatgggacccgttgatccattgcggagcaacgggtctttttgctcgcggcgtggcgcaatctgacaagcgtgtcgcttccaaatctggaatgaagagcacaagggcggtcgttgttgactgcctcgcgtaattgttggaagtaaaaatccaaacccatcccattgatgatcaccggaaaacaccatgcctaaactgaccattgtcgctttcgacggtacgcgcttcgatcttgatgtcgatcagggatcgaccgtcatggaaaacgccgtgcgcaactccgtgccgggcatcgaggccgaatgtggcggcgcctgcgcctgcgcgacctgtcatgtctacatcgacgaggagtggaccgagcgcgtcggtccgcccgaagcgatggaagaagacatgctcgacttcgccttcgacgtccgtccgacctcgcggctctcctgtcaggtccgcatgaaggcggcgctggacggcttgaccgtgcacgtgccggagcgccaggcttaatcctcccgaggaagagccgtccaaaaaaagcctcgcttgccgatgtgacgagcgaggcgaggtaggcgcattacctacgatcgagggaggatcgaccgcggcttcgcaacgcgccaggagaacccagagaacgaaagtccagactgaccgatctgaactttcgaatgactgaatattagcgcgttgtgtttcacaaagctatggtgagaaataaccattcattggctggggccgtgccggtttcgcacaattttcattgcgcggctaagtttcagccgtcgtttttcgcccgggaatcagctatctttcgccgccggatggtttgaggcggttgttgagaaggcgcagcatccgcttctggaagttgaccgcctcgacctgatcgaatcgcgcctgcagcctgtcatgctcggcgatcccgcgtgtcgatacctcggtcaccagttcctgcatggcttcgcaattgggttgcggcggcagcgcgagtatcttgcgctccatgctgcgcgcctgggtccgggcgatctcggcgtggcgttcctcgtgccgcttgatgtcgctcgacagcgtgtcccagatcatcgacagctcggggctggcgccgcgacggttgttccagcgcggcaggatgatctgcgtatgcacggtgacgcgggcggtgccgacgcggcagcggccgttttcctcgacataggtggcatcgccgccgaagcggatcttggtggcgccggggtggcgggccgacgagccattggccgtggggccgcgcatgctcagctgctcgtccagttcgtcggcggttttgcccttgatgctgaaatacgaatagctctttgtggccaccacggcggcgcttgcgggattgccagcggacagcgaaacggaaatggcgaggaggagcggcatataacgcgacacggacggcattctgcaaatactcatgttgaagtttgcgggagcttggggcatagccacgcctagcgcaatatgatgacgctgttttttcgatcgataggatgaatgcaggtggcacagcttggcggcggtttctggcgggtcgggcatggccgcgagattgagctcggttcgacggcggtcatcatggcgatcgtcaacgtgacgccggactccttttccgacggcggtcgctacgacagtgtcgacaaggccgtggcgcatgcccttgatgcagtccaggcgggtgccggcattgtcgatatcggcggggaatccacgcggccggacgccgagagcgtcgatgcgcgcgaggagcaggcgcgggtgctgcctgtgatcgaggcgttgcgcggcaggaccgaggcgctgatctccatcgatacctatcgcgccgagaccgcccgccttgcggtcgccgcgggcgcgcatatcgtcaacgatgtcttcgggctgcagaaggagcctgagatcgccgatatcgccgcgaagaccggcgccgggctctgcgtgatgcataccggccgcgaccgcgacaagctggacgacgtcatcgccgatcagttgctgttcctggaacggtctttggagatcgccggacgcgcaggcgtggcgcgggaccgcatcgtgctcgatcccggcttcggctttgccaaggatacgcaggaaaacctggaactgatggcgcgcgccgacgagcttcaacacctcggctttccgatcctggccggcacgtcgcgcaagcgtttcgtcggcgcggtcacgggccgcgaggcggctgagcgcgacgccggcacggccgccaccagcgtgcttttgagactgaagggcgctgcgatttttcgggtgcacgatgtcgcaatcaacagggacgcgcttgccgtgactgatgctatgctgaaggcacgcgacgcattcgagcggaagggcacctcatgagcaccacctacaccatcaccctgcaaaactgcgccttcttcgcccgccacggcgttcacgatgaagaggagtttctgggccagcgtttcttcgtcgacgccgagctggatgtcgtctccggcaatgcgctcgagacggattccatcgacgataccgtcaattacgggatcgcgttcaccgtcatcgaggagatcgtcacgggcaagcgacgctatctcatcgaggcgctggcgctcgatatcgccaaggggctctgtcagaaattcccgcagatcaagcgggccaggattaccgtccgcaagccgaacgcgccggttccaggcgtactcgatttcgttcaggtgagcgtcgaacattttgtctgacatggattttcagaacgccacgctcgggcttggcggcaatatcggcgatcctgtccacgccatggctcttgcgctgagggcgcttgacgcgcgcgcggattgccgtgtggtcgcggtctccaggctttaccggacgccgccctggggcaagacggaccagtcgtttttcttcaattgctgcgcgcaagtggcgacgtcgcttcagccggaagcgctgctcgacgtctgcctcgacatagagcgcggcatgaagcgggagcgcatcgaacgctgggggccgcgtacgctcgacatcgatgtcctgacctacggtgatatcagccaggacgcgccgaggctggagcttccgcatccgaggatgacggatcgaggcttcgtgctgatgccgcttgccgacttcgctccagacctgatcgtcaatggtgtcgccgtgcgcgactggcttgcccgcgccgacatcgcgggcatcgaggtggccaacccaggcaccgactggtggcgcaacgcctgaaacgcgagaagcggccatccggccgcttcgtcgagtgcttcgttcgtctgaatcgtttactggaccgagccgaccgttatctcgtcgagctggcgcgacaacgtcagcccgatgacggggatcatctggctctccaccttcacggacacagtcacgttcatcgtcttgtcgtcgcggacgcgggcaatcatcgcgccgttgagcttggcacggttgaggccgaccacgacggtgtcgtcggtgacggtgccggagacgacgtcgagacccttgccggcggcgccgtccaagaacttgcccttgtagctgcttccggactgggtgatcagcgcggtcatcggctgcttgaagacaccgacgcggcaggtgccgtcgagcttgacgcccgtgccattaccgtcggtgacgggctcgccgatcaggttgcaggtgaacttcgtgcccttgtacttgccggcgacgatttcgcccggaccgcgccaggagccagcgacggattcgaagaatgccttgtcacgcgtggcggcggtagccgccggagccgtgtcggcgataggcgacaaagcgattgccgcgagaccgaagagatagagaaacttgcgcgagtacatggattttccttggcgaaccatatcgcttaactgacgccaagttttgccgaaaaatggttaatgcttggtttctaatgggtcgaaagcggcgcgtttgcgggcttttcaacgcgagccaggctcatgccttgcttctgtaagccattgaaacgcatcggattccaaaaatcggctggctggagcgaatggtttacggatatcggcctaattccgaccgttgccatccgtcttcgtcatcgacggggtcaggtcgccgatgaaatcaccgattcccgggcgcttcagggcgcggaacgccagcggacggcagaggtccatggcggcgattccgatgcgggcggtcatcagcccgttgatcacgccttcgccgaggcgagccgagagcttggatgccaggccgtggccgagaacctgctggacgaggctgtcgccgacggcgatcgagccggtgacggcaagatgggccagcacgtcgcgcatcagccgcaacatgccgaaggtgccggggcggccgccgtagaggtcggccatggcgcggatgagcttcgcggcctcgtagagaacgtagagcaggtcgacgatggcgcgggggctgacggcggtgacgaccgagacgcgtttggaggcgttgaggatgaggttgcgggcctgccggtcgagcggcgcgagcagttcccgttcggcgagcgccaccagatgcggcgcgtcgatgatatcggtctccgccgccttcagcgtcgcgcggccgcgcgcggtctcgggcttgttggacagaagatgctccaggctcttgacgagcgcgcgcgccttggcgggcttggtctcgaggatcgccgcttccgcttcggccttgatcgtctgcacagcggcgagccgcatgatgccggcggtttccctgataaccacggcaatgaccgccaggacgccgatgccgacggcggcgagcgcggcatagccgagccagtcggcgcgggtgaagaggtcgcggatcaggctgtccgtccagagcccgaaggcgagcgagaacagcacgccaaaggcgccaagcgcgatcttgccgaaggaggcgccacgcctgcgcggccgggcgacgggcagggccgggaggtccttgtccggattgatgaagggatcgtcctcgtccgatgtcagcgtgatctcgcccgagaaggcggccggcttgcggggctccgccgtcggtcggccggctttggtctctggcttctgctgctcgcgttcgtcctcataggcgaaggccgcgggcgcgcggcgcgggggctggtcggcgggcggcttgatcatgcgaggcgatctccgaacagaaactgcattgccctgtcgagccggatgtgcggcaccgacagctttatgccgccgccggtctcctcgagactgggcgggcgaaagcggacgacgttcacgtcgggcagcccgatagcgctgtctccggcctcgatgcttgcgaacagggcggaggggtcttcgggcaggtcgccggggaagatcgcggttttcctgatgccgtcgaaggtttcgcctgaaatcgtctctccctcgatcggcgttccgacgatgacgggcagttcgtggccgtcgcgcttgaccgtcgcctcgcgcgttgcccgcacggaggcaagcgccatgacgtcgatgccggcgcccgccatgccgatgcgctggatggcgcggtcgacgaggcggcgcgtcagggcgtcgaggcggtggtggctctcatgatgcaggtggtcggctttggtggcggcgacgagaacgcggtcgatgcggcggccgagcagcgacgacagcagcgaattcgtgcctgggcggaagcaggcgagcacatccgtcagcgcgcgctccagatcctgcacggcctcggggccgcgattgatcgcctgcagggcatcgacaaggacgatctggcggtcgatgcgggagaaatgctcgcggaagaacggcttgacgaccacggacttgtaggcctcgtagcgccgctccatcatcgcccagagcgatcccttttccggctttccggtcggcggcagaaccagcggcgcgaaggtgagcgcgggcgagccgtcgagatcgccgggcagaaggaagcggccgggtggcagcgtcgacaatgagcgctcgtcggccttgcaggccttgagataatccgcgaaggcggtggcgagttcgcgggcgcgcatctcatccgcggcggctgcgatgtcgcaattgtcggtgagtgtcagccatggccgggagagttcggtgcgtatgcccgagcgggccagcgcgatcgtatcctcgctgaaagtgcggtagtccttggccaggagcggcaggtctagcagccattcaccgggatagtcgacgatgtcgatcgagagcctgcccggcgagaagaagcgggcccagccgctggcgctctgataatcgatggtcagccgaagctctgatatggcgcgggtcgaatcgggccagatgcggtccctgaccagcgccttgatgtggtcctcgtactggaagcgcggcacgctatcgtccggctgctcttcgaggcgaacggcggagacgcggcccgactggacggcctcgaacaagggcaggcggccgccatgcagcaggttatggaccagcgaggagatgaagaccgtcttgccggctcgcgacaggccggtgacgccgaggcggatcgtcgggtttacaaggcccgaggcgcgatccgacaggttgtcgaatgcgatgcgcgcgtcgtcggtgaaggatgtcatgcttggcggcaaggcgaaattccgattgctggtggacgccatataggaaccggcacgccgaagaaaaagacgtctggcgcccgtcagtcgatcatgaagtcgatcaggcgccagttgtttcggccctggtcgaaatcgagtaccgcgagaccgcccggcggaaagccgttcgggagcgcctgcgccagcagctggtggccgatcagcgcttcgagcgtctgttcgatgacggggttgtggccgacgagcatgacggctcccatgtcctgttgcgcgccgaggatgtcgagatagatctcgggcgtcgcgttatagagcgcgtcgacgaagcggatatcgaggttttcacccatggcgcggtgcatggcctcggccgtctgccggcagcgtatggcagtggagctgacgaccaaatccggcttgtagcttttgtcggccgcgttctcggcgaggatctcggcagcggcatagccgcgctcgctcagcgggcggtcgaaatcgctctgtccgggggcgggaaatgccgcttcggcatgtctcaaaagataaatccgggaaggcggcggcacgattgctgtcatcggaaagtccccggtcgattgatctatttcagtagcgccagcccggtgtcttcgtcaaccggcgcgcggaatccagtgggcaagttgcgcggcaaatgctacttcagctagcaggcgaaaagccgggtcttgaaaaatagtgatgtaaaaatagtccgttagctcaaaattgtgacagatttaaaaatgtgtttacctagcggattgggcttgaatcggacgccgtggtcgggatatacagccgccagatgagatgttcttcaggagaatcgcgttgagtgagaagatcgatcttagcaaatacgtgccctcggaagaggaagagttcatgaacggaaaccagcgcgcctatttcagggcgaagctggtggcctggaagaacgacatcctcagagaggcgcgcgaaaccctcgagcaccttgccgaggaaagcgcaaaccatccggatctcgccgacagggcgtcgtccgagacggacagagccatcgagctgcgcgcccgtgaccgccagagaaagctgatatccaagatcgacgccgcactgcagcgtattgaggaaggcacttacggctattgcgaggaaaccggtgaaccgatcggcctcaagcgtctggacgctcgcccgatcgcaacgctgtccatcgaagcgcaagaacgccacgagcgtcgcgagaaagtctacagggacgaataatcccggatataccgcaaactaaaaaaggcaccgctctcgcgcggtgccttttttagtttgcgtaaaaggggacggccttggccgcccgccgatcacttatcgcggttgacgctcatttcgccgaagatgcgggccacctcgttctggagggcggcgtcggcgcccgtgatcggcgccatctcgggatcgcggcgcggcatgttgccgggcacggggcgggccggagcattctgcgtcggcgcgctctgcacatgaaccgggcgttcagccgccagattgctcgtcatctcttcttcgagaacgcgctggaaatcgctgggctgggccgagggcgccgggcgcgcgacgggctgaaatgccgtcggctgcggagcgggcgcctgcggtgccggcggatagagatcgacgcgctgcggcggagagggcgggctcatcacctgcggctcgatcctctgcggggtcaggacacgctggcgcgccgaatcgagaatatcgacggccgccgccgtttcgatggggccgggttcctgtcgcgagaaggccggaggttgtgggcgcggcgcgacaggggccaccgacgccggcgcgatcgatgccgggagggggcgcggcgcgggttcgatctcggtttcgatctcgggttcgaagacctcatgctgctgccgctgcgctggctgcggtgcgatcggcggcgtctccaggcggtcggagaccggcgcgaactcttctatcggcgacaggccgcgcgtgggcgccgggcgcggcgccggcggaacgatgacggatggcgcggcttcggccatggcggcgctcacagctggctcggcgggtggcgcgctggcggctgccggctgcggtgcttcggggcgagccggttcgcgtgtgatctcgatctgcccatccggcaggatgcggctttcgatgacgacatcggacggccccccgatcaagatgaggtgttcgacatcgtcgcggcgcaccagcaccaggcggcggcgggcatcgacggcggctgcgtcgagaacctggaggcgtggctggcggttgcggccgccgcgaacgaagggcgaggatgcccggttgcgcatgatccagaggaccgcgacgagaagcagcagggcgatggcaacgccgcccgcggcaatgatgaagcggctgccataagattccatgatgccatcgaacatagtcacgtactcctttgcggcgttcaaccacatgacgacttttaagcttcctagacaagggggaggcggcttgtccagtcaccgaaaggtgcgatgcaacgtctgtggatcgtctcatcacgacatttaacggcaaaactggcgctgtagcttgtgaattcaatcactcttcatggagtgtggtgtttttggcgaggcagcaaattgctaagaaggaaaaggcgcctgattcctgcttcgtctgtttgtcacgaatgaaggccggcgggcaatgcgaggaagtacatgacgaaatcccgtcaggccgacaattttagcgaaccgctcgtggaccgcggagggcgggccggaaccgccgtgcggatcctgcttctggcgctggtgctgatcggcgtcgccgccgccttcgtcgtgttcaagacctcgctcgacaacgagatggtgctcggcgttctcggcgtgcttgccatggtcggcatcttcttcctggtgtcgtcgatcatcggcttcatcgaggtgatgccgcagcgccagtccgacagtctcgcccgcgcctttctcaacagtcatcccgacggatcgctgatcacggacgagaagggccggatcgtctacgccaatgccgcctatggcgcgctgaccggcgcccgcaagccgacggaggtgcagacgctcgaagcgcttctgtcgcgccaccgcgaatcgaacgaggcgctctaccggctctccaacgggctgcgcgagggccgtgagggacgcgaggaattccggctgctgcgcgcgctcggtccgtcgctgaacgggtccggcgcccattggtaccggctgaaggcgcgtatcctgcagagcgaggagagcggcggccggccgctgcatatctggcagatcagcgacatcacgtcggagcgcgacgaccaggagcgcttcttcaaggagttgcagaacgccatcgattatctcgaccacgcgcctgccggcttcttttcggcgggccgcaagggcgagatcttctatctcaacgcgacgcttgccgaatggctggggatcgatctcaccaagttcatccccggctcgatgacgatcggcgacatggtggccggcgaggggctggcgctgatccagtccgtgcaggccgatcccgggctgcagaagacggtgacgctcgatctcgacctgaagaaatcgaacggccagggcgttccggtgcagatcgtgcacagcgttacctcgatgcgcgacggtgcgcccggcgaaagccgctcgatcgttctgacgcggcgcgacaacacgaatggcgaccagtcggcgtcggccgcgtcgatgcgcttcacgcgcttcttcaacaacacgccgatggcgatcgcctcggtcgatggcgacggccgcatcctccggaccaacgcgccgttcctgaaactcttctccggcatcgtttcgcgcgatgacgtcgagaacggcgcgctgttcgaaaccatcgtgcaggatgtcgacaagccgaggctgcagggggcgcttgccgccgcgaaggaccggcagggcgatattccgccgctcgattccaagacgcaagccgacgatagcaggcatttccgcttctacgtcaatgccgtgatcgaccagagcgacgaagcgccggaagaggccgcgatcgtctacgccgtcgaggtgaccgagcagaaggcgctcgaggcgcagatggcgcagacgcagaagatgaatgccgtgggcacgctcgccggcggcatcgcgcacgacttcaacaacgttttgaccgccattcttctgtcgtccgaccatctgctgctgcaggcgcggccggccgatcccggcttcgcggatctgatggagatcaagcgcaacgccaaccgcgccgccgtcttggtgcgccagctgctcgccttctcgcgcaagcagacgatgcggccgagcgtgctcaatctcaccgacgtggtcggcgatctcaggatgctggtcgaccggctgctgtcgggcaccaacgtgaagctcgacgtcgaatacgggcgcgatctctggccggtgaagaccgacttgtcgcagttcgagcaggtgctgatcaacctttgcgtcaatgcgcgcgacgcgatgccggagggcggcaagctgacggtgcggacgaagaacgcgacggccactgaggtcgccgccttcaactattcctacatgccgcacgaggacatggttctggtcgaggtgtcggataacggcacgggtatcgcgcccgaaatcatggacaagatcttcgagcccttcttcaccaccaaggaggtgggcaaaggcacgggcctcgggcttgcgatggtgtacggtatcgtcaagcaatccggcggctacatccagccggaatcggaagtcggcaagggcacgaccttccgtgtgttcctgccgcgccatatcgtcgagccggcgatcgccgccgaagccgacgcggtcacgccgagcgccgacaacgtcgtttcgctggtgcccgccaaggccgagcagccggaggatctgacgggatcggccgtcatcctgctcgtcgaggacgaagaagcggttcgtcgcggcggcaagcgcatgctggagacgcgcggctacaccgtgcacgaagcgggatcgggcgtggaagcgctcgatatcatggacgagctcgacggcaaggtggatatcgtcgtatcggacgtcgtcatgcctgaaatggacgggccgtcgctgttgcgcgagctgcgcaagaaatatccggatctgaagttcatcttcgtgtcgggctacgccgaggacgcattcgcccgcaacctgccgccggactccaagttcggcttcctgccgaagccgttctcgctgaagcagctggccgtggtggtcaaggagacgctggaggggtgaggtgggggcgctggcaggcctggatgctagtgtttttcctgcggtttgccgggacgcgttgtgcggtttggccccctcatctgcctaccggcatcttctccccgcgggggagaagagtctcggggccggccgctcgctccatctccccttctcccccatggggagaaggtgcccgaagggcggatgagggggctgcgcggtacaaggttcacgagacgcgtgaccgcaccaaagaaagatgtaacagaggaagagggcagcctggcgccgcccccggttgtttatcttcaggcgttgagcgcaaccgcgatttcgccggcgaggcgggcgttgttttccaccagtgcgatattggtcttcaggctctggccgtcggtcaggtcgaagatggtgctgagcagatagggcgtgaccgccttgccggagatttcatcgcgttcggcgctgtcgagcgcgcgctggatgtagatttccatctcttccgccgggatttcgtcggcctcgggcaccggattggcgatcagcatgccgccgtcgatgccgagctgttcgcgcaccatctggaaattggcgattgccgccgggctgttcagcgtcagcgggctgcgcaggccggatgaccgcgaccagaaggccgggaattcctcgctctcgtaggtgaccacgggcacgccagcggtttccagcacttccagcgtcttcggcacgtcgaggatcgccttggcgccggcgcagacgacgatgacgccggtgcgggcgagctcttccaggtcggcggagatgtcgaagctctcctccgcgccgcgatgcacgccgccgatgccgccggtggcgaagaccttgatgccggcgcgttcggcggcgatcatcgtggcggcgaccgtggtggcgccatggcggcgctcggcgatcgcgaaggcgaggtcggcgcgcgagactttcagcacatccttggccttggccagctgctcgagttcctcggcctccaggccgatgtggagcgtgccgtggatgacggcgatggtggcggggacggcgccctgctcacggatgatcgattcgacgctgcgggccatctcgatattcccggggtagggcatgccgtgggtgatgatcgtcgattcgagtgccacgatcggcgcgccgcgctgcttggcgctcgccacttccttggaataggtgatcggcagctggggggatagagagttcgtcatcggagcttccatttcgtctgatcgggtttcaatgcagaattcttgccggcggaacaagagccagagcctgtttcagcagatcggcggagagattttcgttgaccgcgttgggcgactggaccgtcagcgccgccgcggcggcaccctcgcggatcgcctcgctcatcggcagcccgcgcaacagtgccgcgatgacgcccgaggcaagggaatcgccggcgccggtcacgtcggagacatgctcgacatcggccggctgcagcgccgccacgtgaccggcggaaaatgcaatcagctcgcgctgtccccgggtgacgacgccgcctctgaggccgatgtcaccgagcagggacggccagtggacagggttttccggccgctcgccggtgagcgccgtggcttcggcctcgttgagaaagagataatcgatcccctgcatgcaggccttcagtttcaccgcctttgccggcgagatggcgatcgccgccaccggcttgccgagcgccttggcgcgtgtcgtgatcgagaccagggtttcctccggcaggttcgcgtcgaagaggatcatgtcggtggcggcgaacgcgtcgcgcaccgaacggatcgacaggcggcgcggcacgaacatgcggtagagatccatgtcggccagcgcgatcaccagattgccgtcgcgctcgatgatcgcggtatagctcggcgtcttgcggtcgagaaagatgaaggggcggtcgttgacgccggcgagatcggcggcttcgctcaccatctctccggtcgggtcgccgccacgcggcgagatcatggtgacgtcgaagccgaggcgggcgaggttgcgggccgcgttgaagccgccgccgccggcctcctcgaaccaggagccggggttgctggcgccatcggccgtcgcgcccgatatgcggccgcggcgatcgacatgggcgccgccaagcacgagaatcttcttgctcatctcatcgctccgaaatgcggtcgtggccgaatcgtgcggtctttcgcatggcggggagccgccgtccaagcgttgtaagctcttgctttgcatggataaaacaaatgtagaacacaggccgttttacctctttctttcaatgccttgaacggcacttgcgtgatgagaacaaatgcggtacaaaatcgacatcggcggcgacattgcttgagcggcttcaataacctaaaggtggatcgaatgtcacagaatacattgcggcttgtagaggacaaatcggtggacaaaagcaaggcacttgaagcggcactctcacagatcgagcggtcgttcggcaagggctctatcatgaagctcggctcgaacgagggcgtcgtcgagatcgagaccgtttcgacgggctctctcggactggatatcgcgctcgggatcggcggtcttcccaaagggcgtatcatcgagatttacgggccggaaagctcgggtaagacgacactggcgctgcagacgatcgcggaagcccagaagaagggcggcatctgcgccttcgtcgacgcagaacacgcgcttgatccggtttacgctcgcaaactgggcgtcgatctgcacaatctgctgatctcgcagccggataccggcgagcaggcgctcgaaatcaccgacacgctggtgcgctccggcgccgtcgacgtgctggtcgtggactcggtcgcggcgctgacgccgcgcgccgaaatcgaaggcgagatgggcgacagccttcccggcctgcaggcccgactgatgagccaggcgctgcgcaagctgacggcctcgatctcgaagtcgaagaccatggtcatcttcatcaaccagatccgcatgaagatcggcgtcatgttcggttcgccggaaacgacgacgggtggcaacgcgctgaagttctacgcctcggtgcgcctcgacatccgccgcatcggcgccgtcaaggagcgcgaagaggtgatcggcaaccagacgcgcgtcaaggtcgtcaagaacaagatggcgcctcccttcaagcaggtcgaattcgacatcatgtatggcgaaggcgtgtcgaagaccggcgagctggtcgacctcggcgtcaaggccgggatcgtcgaaaagtcgggcgcctggttctcctacaacagccagcgtctcggccagggtcgcgagaacgccaagatgttcctgcgcgacaatccggagctgatgcgcgagatcgaaacctcgatccgccagaacgccggcctgatcgccgaccagctgcagaatggcggtcccgacgccaacgatgcggacggtgaataagcctcatccgcgctgaacgcttcaaaaccggctgcattccttgatcagaatgcagccggttttgtttgtctgctggacagtggttaacgtcagcgataaaagccactgaattttcaagatctgacctgccttgggcagcactgaagggcatagcatgagcggtgtgaacgaaatccggtcgaccttcctcgactacttcaagaagaacggccacgagatcgtttcctcgagcccgctggtgccgcgcaacgacccgacgctgatgttcacgaacgccggcatggtgcaattcaagaacgtcttcaccggtctcgagcagcgcccctacaagacggcggcgacggcgcagaagtgcgtgcgcgccggcggcaagcacaacgacctcgacaatgtcggctataccgcgcgccaccataccttcttcgaaatgctcggcaatttctcctttggggattacttcaaggagcaggcgatcgagcatgcctggacgctgatcaccaaggagttcggcatcgacgccaagcgcctgctggtcaccgtctatcacaccgacgacgaagcgtttaatctctggaagaagatcgcgggcctgtccgacgacaagatcatccgcattccgaccagcgacaatttctgggcgatgggcgataccggcccatgcggcccctgttcggagatattctacgaccacggcgaccatatctggggcggccctccaggttcgccggaggaagacggtgaccgtttcatcgagatctggaacctcgtcttcatgcagtacgagcagatcaccaaggaggagcgcgtcgacctgccgcgtccgtcgatcgacaccggcatgggtctcgagcgtatcgcagcgctgctgcagggcaagcacgacaactacgacatcgacctgttccgcgccctgatcgccgcttccgaggaagcgaccggtgtcaaggccgacggtgagcagcgcgccagccatcgcgtcattgccgatcacctgcgctcgtccgccttcctgatcgccgacggcgttctgccatcggccgaaggccgcggctacgtgcttcgccgcatcatgcgccgcgccatgcgccatgccgaactgctcggcgcccgcgagccgctgatgtggaagctcctgccggcgctgatccagcagatgggccgcgcctatccggagctggtgcgcgcggaagccttgatcaccgagacgctgaagctggaagagaccaagttccgcacgacgctgaagcgcggcctgtcgcttctgtcggatgccacgaccacgctcggcaagggcgacatgctcgacggcgagaccgccttcaagctctacgacacctacggcttcccgctcgacctcacgcaggacgcgctgcgcgcccgcgaaatcaacgtcgatctcgccggctttaccgacgcgatggagcgccagaaggcggaagcgcggtcgcattgggccggctcgggcgacaaggcgaccgagaccatctggttcgagctgcgcgacaagcacggcgccaccgaattcctcggctatgacacagagaccgctgagggtgtcgtccaggcggtcgtcaaggacggcgccgccgtcggcgaggccgccaagggcgacaaggttcagatcgtcgtcaaccagacgccgttctatggcgaatccggcggccagatgggcgatacgggcgtcatttcgtccgacaatgccaggatcgagatcacggatacccaaaagcgcggcgagggcctgttcgtccacaccggtaccgtcgtcgatggcacggtcaagaccggcgacgcggtcgcgatgacggtcgatcacgcccgccgctcgcgcatccgcgccaaccattcggcgacccacctgctgcacgaggcgctgcgcgaggtgctcggcacccatgtcgcccagaagggctcgctggtcgcgccagagcgcctgcgcttcgacgtttcgcatcccaagccgatgacggcggaagagctgaagcaggtcgaggacatggccaacgagatcatcctgcagaacgcgccggtgacgacgcggctgatgagcgtggacgatgcgatcgccgagggcgccatggcgctgttcggcgagaagtacggcgaggaagtgcgcgtggtcgccatggggcagggcctgcatggcgccaagagcaaccggccttactcggtcgaattgtgcggcggcacgcatgtgtcggcgaccggtgacatcggcctggtgcgcattctcggcgacagcgcggtcagctccggcgttcgccgcctggaagccgttaccggtgagacggcgcgcgcctatctcgccgagcaggacgaacgcgtgaaggcgctcgccacctcgctcaaagtgcagccggccgaggtgctgacgcgcgtcgaagcgctgatggacgagcgccgcaagctcgaaaaggagttggcggacgccaagcgcaagctcgccatgggcggcggccagggcggctcggaaaaggccgtacgcgacatcggcggcgtcaagttcctcggcaaggccatctccggcgtcgatccgaaggatctgaagggtctggccgacgacggcaaggctggcctcggctccggcgtcgtgacgctgatcggcgtctccgacgatggcaaggcgagcgccgtggtcgcggtcaccgctgatctcgtcgaccgcttcagcgccgtcgacctggtccgtatcgcgtccgccgctctcggcggcaagggcggcggcggtcgtcccgacatggcgcaggccggtggccccgatggatcgaaggccgacgaggcgctcgaggccgtggcagccgcgctggctggctgatcggcccgtttttgattgaattgcgaaaggcgggtgcttcgggtgcccgcctttttcttttgcgccggcaactcagcaggatttgtcaaatcgcgttatgcttgtctgcagtcggtcaactggcatgaggtttcgacatgaacggcagcacggcatgggcactctatgaaagccgcctgaggcgggtttctgcctatatccatgatcatctcgatgaagagttggatatggacaagcttgccgggatcgcctgcatgtcgagctatcactggcaccggatctatcgcgcggttcatggagagacgctggcggcgaccgtcaagcggctgcgattgcatcgcgcggcgggcgacatcgtccgttcggatctcgggatcggggagattgccaggcgatccggctatcccaacctccagtctttcaaccgcatcttcaagtcggtctacggcatgccgccggcccgttaccggaaagagggaagccaccaggagttccaaccctcacccaacggaaggaccaaagccatgttcaacgttaccttacggaagatcgagccgatcgcgctcatcggtgtgcgccattccggcccctacatgcagatcagcaaggcgttcgaggttctcttcggcacgctccacgcgcgcgggctggcggagcctgataagcggatgatcggcgtctatttcgacgatcccgatctcgtgccggccgaagagcttcgctccatcgcctgcgtggccgtcgacagcgagcttacggtcgaggcgccgctcgaaccgttcacgctcgagggcggggaatatgccgtgctccgccacaagggcccctatgccgatatgtacaaggcctatcagtggctgttttcggaatggctgccgagctctggtcggcagttgcgcgacgggctgatgttcgaggattacctcaacaatccgcgcgacgtgccgccgaccgaactcgtgaccgagatctacatgcctctgatctgaaccctcaagcgcccggtcaggcgctcttctgcagcgcttcggtggcttcgtcgtcgatcgcgcgcgcccgcttggaggcggcgcggtcggtgacgcgaccgacgtaatcggcaaatgcctggcgcttctcgaaggtgccgaaggagagcccccagcccacatgcgacccgacatagacatcggccgccgtgaagcggttgccggcgatatagggcgaggcgctgacggccttttcgagcgtgtccatcacgtcggcatagctgccatagccggccatccggctcttgtcggcgggcgtgtgaaagccgagcgcgcggttggtggttgcggcttccagagggccggcggcgaagaacatccagcgatagtagctgccgcgttcttccgcggtcggcgcaaggcctgcttctggaaaggcttcggccagataggcgcagatggctgcgcattcggtgaccacggtcttgccgtggcggatcgccggcaccttgcccatcgggttgatggcaagataatccggcgccttcatgctgctttcgaagccgaggatctccgtggtgtacggagctccggtttcctccagcatccagcgggcgatccgtccgcgtgacatcgggttggtgtagaagatcagttcgtctgccatggtgttctcctctttccggtcataactggtgtgggccagccgggaggcaacgtctatggcatgccggtgtcagattttggcagtagtggcggcgggcggttctcagagcgccttgcgatactggatgaagccggagcgctcggcgatgcggtcgtagagctttcgcgccgtggcgtttgtctcgtgcgtcatccagtagagccggccggcgccatgctcgcgcgcaaggtcggcgacggcctcgatcaacgctgcgcctgtgccgagaccgcgcccgatgtcgtcgacatagagatcctgcaggtagcaggtccatttgggaagccaggtggagcggtgaaagatcgcgtgcacgataccgacaagcctgccgtcgctatcgaaggcgccgagcgcgtgcatcggctcttcggggtcatggaagcgaccccaggtcaggtccgtcgtttcctcagggatcgtgacttcgtagaagcgctgataacccgcccagagcggctcccaggcgccgcggtccgatggccgcagcgggcggatggtcgtggtcttcgtcatcgtcttttcccctcctgatatccctgaaacgaaaacggcggggaaaaccccgccgcatcgttcgcatattccgtatggcttatgccatggccttctgcaggttctcgtcgatcttgtcgaggaaagccgtggtcgagagccagggctgatccgggccgatcagcagcgccaggtccttggtcatgaagccggcttcgacggtgtcgacgcagaccttttccagcgtcgccgcgaacttcgccagttcggcgttgtcgtcgagcttggcgcggtgcgcgaggccacgggtccaggcgaagatcgaggcgatcgagttcgtcgaggtttcctggcccttctggtgctggcggtagtgacgcgtcaccgtgccgtgggcggcttcggcttcgacggtcttgccgtccggcgtcaaaagaaccgaggtcatcaggccgagcgagccgaagccctgggcaacggtgtcggactggacgtcgccgtcgtagttcttgcaggcccagacgtaaccgccggaccacttcaaagcggatgcgaccatgtcgtcgatcaggcggtgctcgtaggtgatgccgatttccttgaactgatcctggaattcagcctcgtagacttcctggaagatgtccttgaagcggccgtcataggccttgaggatggtgttcttggtcgacagataaaccggccacttgcgcatcaggccgtacatcatcgaggcgcgcgcgaattcgcggatcgactcgtcgaggttgtacatggccatggccacgccggcgccgggagcgtcgaacacttccttctcgatgacctggccgtcttcaccgacgaacttgatggtcagcttgcccttgcccgggaatttgaagtcggtggcgcggtactggtcgccgaaggcatgacggccgacgacgatcggcttggtccagccgggaacgagacgcggcacgttctggcagatgatcggctcgcggaagatgacgccgccgaggatgttgcggatcgtgccgttcgggctcttccacatctgcttgaggttgaattccttgacgcggtcttcgtccggcgtgatcgtcgcgcacttgatgccgacaccgtgcttcttgatggcgttggcggcgtcgatggtcacctggtcgttggtggcgtcgcggttttcgacggagaggtcgaaatagtcgatgtcgaggtcgagatacgggtggatcagcttgtccttgataagctgccagatgatgcgcgtcatttcatcgccgtcgagatcggcgacgggattggcgaccttgatctttttcatatatctgcctcgttaagcttatgagggacatgcgtcccgggtgggtgatataaaatcccgagggctatagcattgtgagcccggagtgcaaagccgcatgcagggcagatttgtgtgtttttgcggcattgccaagagatggaaaatggctagtctccgcgcgaaaccattgccttggacatttgatcatgaagacgatttcgcttgcctcagccgtcctgctcggcctcaccgccaccgtactcgccgctgacgcgacggcgccggtcaaggagatcatggaggccaccgccaagaactggtcgggcgctgacgaggactggcaggatatcttcgacgacagcaggctcgggcgcatctacagcaaggatttcgttgccaagtaccgcgcggcgatgcaaaatccggccgccgacgaggacggtgtttcgccgttcgattacgatgtcatcgtcaatggcgaagatgcctgcccgctgcaggacatgacctacacgccgaagccgggcgaaagcggcgcgaccgaagtggtggtcaccttcaagaagcagacgtgcatggacggggtcgacgacaagcaggcgctgaccacggtgcggttcgaggtgatggacgagggtggcaagcctgtcgtcgacgacgtgttcaccgaaggcgatcccggccagccggcgaactcgctgaagaacacgatggtgcagatctccaagggccagtgaacgacaccggtctgttgacgcgcggcgccaggcgtcgcggcggcgatcgggaagattgatttgctttggggcctgtggcgatatgtaagcggtgaacaccattcctgcgctccggggcccgaacagcttgttttccggttttgatttccgcgattggctgcttgccaacgatccggcgctgtctcggctgaggatggcgttgcgcgtcacattgtcggtggcgctgtcgttcggcgtgctgcttgtcattcattcgttgctgtttccgctgccgacggcgtcctacgggctcgggatcgtgctggccatcgaaggcggcgtggcggtgcgcgacaagggcggcgggcggcagctggtaacccggcttctgggctgcgccgccagtctcgtggtcgtcgtcatcgccgccgggctggaagggaaccggctgatctccgacgccgcttttcttctgatcatcttcctcgcggcttccgcgcgtgtccttggcccccgcggtcatgcgatcggcatgttcgccttcatgtcgtatttcctcggcgcttatttccagccgccgatcgccgagctgcctttcgtcgcgatcggcccggtcgtctcctcgctgatcgcgcatgcggtgcggtccgtcgtgctgcccgacgactggcggcgcgacctgttgcggtcgctcgaaagcgtgcaggggcggatcaaccagatcctgttcaagatcgcggcgctcgccgcggtgaaaagcgtttcggaggcggaccggcaggaactcaatcagctggaggagcggttgaaggacgtcgtgctgatggccgagagcttcatcccacggcctgcgagcggcgtgttcgatccgggcacggagccggcgggcgaactggcgatccgcttgttcgacgtgcatctggcagccgagggcgcgatcatgctctgctcgcaagcgctgccgcccttcgagctggtgcatgggatcatcgagggccattccgtgcgctcgcccggcgaggacgacgatagctccacggccgaggcgacacgagcgttgatcaggctcggcaatgcgcgggctgagctcgtcgcgaccatcgacgagggcaaccggaccggattcgccgatatcgccgccgtggccgaggcgccggctcaggcgtcgcggcccgatttttcgtttcgcaatccgctgatgcgctcggcgctgcagatcacggtcgcatcggcgatcgccatgacgctcggtctcggcctttcgcgcgagcgctggttctgggcggtgctcgcgtccttccttgtctttaccaacacgaattcgcgtggcgatacggcgatgaaggcgctgcagcgatcggtggggacactgttcgggatcgggatcggacttctgctcgcgacgctgcttgccggccaccagctgccggcgctggcaatcacgagtctcgccatcttcctggccttctacttcctgcagacaagctatgcgacgatgaccttcttcgtgtcgatcgcgctttgccttgtttacgggatgatcgggtcgctgacgctcgatctcctcttgctgcgcgtcgaggagacggcgctcggcgcggcggtgggcacgctggtcgccttcgtcgtctttccggcacgcacccgcggcgcgctcgacctcgtgctcgacaaatggttcgcggcgcttaccgcgctgctgaatgccgccgccgccggcgagccgcgccatgtgctgatcggcctgtcgcagacgctggatgccgcctacaaggatctggcgacggcggcgcggccgctcgggtcgtcatggtcggttgtcaccaggccgggacaggtccgtcagacgctggcgatcttcctcgccgccacctactgggcgcggatgatggcgaagaaccgggaggcatcgatcaccgacgacgatgcgcgccagttgatcgacgccagcctcgcacgcgtcacgtcttcatcggcgcggcgctcggcgtgtttctttgtcgatcgcaatatcccggtgccctccgcgcgccaccatccgcacgccagcaagggatggcggcaggggctcgagatgatcgggctgacgctcgagcggctgtatccggacgcataagccatggcgatcggcgataccggggcgcatttgcgctggtatgcgatttgtcttacaatgtcttgcaggttctatcttgcttcaggagacgacgatggcgaaagcgaccatgtccgaatccgtcacgcttcgcattcccggtgaggtgctgtcggctattcaaaccattgccgatgcgacggaccgatccagaagctacatcatcgttcgcgcgctgaggacttatctcctgaacgaaggcgcggacatttttgccgcgatgaaggggcgtgagcagatcgcatcgggcgagtacgaagacctcgacgatgtgatcgccgaaatggacaggatcatcgccgggaaggtcgcatgatccctgtccggctttctagggatgcggccaattatgtccgccaggaagccgaatacctgcgccaccacagccccaccgccgcccgcaaattctcgcaggccgtgaaggaggcgagggaattgcttcgcacctttccggaggtcggaaaccacatgcatggcctgcagatttcgggcaaccgaacgctggtggtcggcgactacctgctcgactattcctacgacggcgaagctatcgaggtcacgtccatccgccatggccgcaccgtcgcacaaactcctgatcttgatctcgatgccggccttgacgacgacgcggaataaggcgcgcaacaccgcataagccttgccgtttcagcccgtcttggctatttgcgcgcctagcaaaaggattttgacttcatggcaggcacgaacagcgagcgtcttcttctgacggaaggtcccgtcatcattctggtcgagccgcagatgggcgagaatatcgggatggtggcgcgggccatggcgaatttcggactgtccgaactgcgcctcgtcaatccgcgcgacggatggccgaacgagaaggcgcaggccgcagcgtcgaaggccgaccacgtgatcgagggcaccaaggtgtacgacacgctggaagaggcgatatcggatctcaatttcgtctatgcgacgacggcgcgcgagcgcgacggcttcaagccggtgcgttcgcccgtcgtggcggcgcggacgttgcgtgcgcggtttgcggcgggcgaggggaccggtatcctcttcgggcgcgagcgatggggcctctccaacgaagaggtggcgctggccgacgagatcgtgaccttcccggtcaaccccgccttcgcctcgctcaacatcgcgcaggcggttctgctcatgtcctacgagtggatgaaatcgggcatggaggatctcggcagcgttcccttccaggcgaccgagcagacgccatcgacgaaggaacaattgcacgggctctacgaccagttggaagaagcgctggaatcgcgcaattatttccatccgcccgcgaaaaagccgaaaatgatcgacaatctcagggcggtcctttcccgccgcgccttcacggagcaggaaatcagcgtgatgcgcggcgtgatctcctccctcgaccgtttctcgcggcaatatccgcgcggaagccgtgcgcccgcagacgtcaaggaacatcaggaagatgacagcagcgacgcatgagctgaaacccgtcctggtcttcgattcaggcattggcgggctgacggtgctgcgcgaggcgcgggtgctgatgcccgagcgcggtttcatctatgtcgccgacgatgccggcttcccctacggtggatgggaagagcaggcgctgaaggagcgggtcatcgatctgttcgcaacgttgcttcgcgagcacgaccccgaggtctgcatcatcgcctgcaacactgcatttacgctcgccggcgccgatttgcgtgctgcattccccggcatgactttcgtcggcaccgtgccggcgatcaagccggcggcggagcggacgcgctcgggcctcgtctcggtgcttgcgacacccggaaccgtcaagcgcgcctatacgcgcgatctcatccagtccttcgcgcagcagtgccatgtgcggctcgtcggctcggaaaatctggcgcgcatggcggaggcctatattcgcggcgatacgctctccgatgaagccgtcatgggcgagatcgcccagtgcttcgtcgaaaaggatggcaggaagacggatatcgtggtgcttgcctgcacgcactatccgttcatggccaacatcttcagaaggctggcgccgtggccggtggattggctggatccggcggaagccatcgcgcgccgcgcgcgcagcctcgttcccgaggtggccgatgccgtccatcccgacaatttcgacttcgccgtctttacgtcgggcaatccggatttttcgacgaaacggctgatgcagggatttggtctcaccgtcaggtgacatcgtttcgtcgcggcgatctttcgcgccgccgacgctttccttcgtgatgccgatatcgcaagctcacagatggggaatcgttcgcgggctctcgctctgaagcgaacaggggatgtctgatgtcgtttcaaagacttgtgatgctgatcttcttcctgcagccgatcgccttcggcagctggctgccgcgcattcccgatgtgcaggcgaagctcggcatggggccggccgatcttgccatcgcgctgctcgggctgccgatcggcacgctgatgaccttgcccttcgctggccgtctggtcgcgaagatcggcggacgagcgacgatcatctacggtttcgtggcctttctcgcggtcgcctcgctaccggctttcgccgacagcatgacgacgctgttcttcacgctgatgatccttggcgtcacgctgtcgacgctcgagctcggcctcaatgtcgaggccgaccgggcggagaagacgaccgggcttgtcatcatgagccgctgccatggcttctggagcctcggcatcatggtgggcagcctgctcggcgtcggtgccgcggcgttgcatctgccggcgaactggtcgatcgccctgatcgcgctgctggtgctgcctatcgcgctcttcgtcagcgtccggttgccgctcggccccgatccggcggccgagacgtcgcatgcgcgaagcgcgccgttcaagctgccgagtgccgcccttctcggcatctgcgccttcaccttcggcatcaccatgaccgagggcgcgatcgccgactggtcggcggtctatctgcgcgacgtgctgtttgcgaccggtgcgctgaccggtctcggctattcggtcttcgcctgcctggttgcaacagggcgcttcggcggcgattacatgaagagccgcttcggcgccgttgccatcgcgcgggtctgcggctgcgcgtcgctgacgggtatggtggtcgtgctcttggcgccgaacacggcggtggcgctgatcggtttcgcggcgatcggcgtcggcgtgtcggtcggcttcccgctggcggtcacggcatcggccagcctgacggaccgaccggcggccgcaagcgtcgccatcctgaccttcatcgcgctcagcggttttctcgtcggcccgccggcaatcggcttcgtcgccgaagccttcggcctgcgtgtcgggctgggcatcctgttgatcccgcttgccgtcagcctgctcttcacgcggatgctgataccgagcgcagcgggcgatgcaagcgcggtcgtgtcggacaaggcggcttgattcgaaacggcgcgattggctgtgggttttgttcggtaggccgagcattccgccacgaatctgctaaagagtggcgttgatttcagaaggggaatgggacttgcaggttggtatcgatatgggatcggcgtcgggaggcaatccggccacgctcgatatcgaggagcttctggcgacccgtctccttgttcagggcaactccggctccggaaagtcgcatttgctgcggcgcctgctcgagcaatccgcgccgtgggtgcagcaggtcatcatcgaccccgagggcgatttcgtcacgctgagcgacaagttcggccatgtggtcgtcgatggcgagcgcaccgaggcggagctcgccggcattgccaaccgcattcgccagcaccgcgtctcctgcgttctcacgctcgaaggactcgagatcgagcagcagatgcgtgccgccgccgcctttctcaacggcatgttcgatgccgatcgcgaattctggtatccggtcctcgtcgtcgtcgacgaagcgcagatgttcgcgccgtcggttgccggcgaagtctccgacgatgcgcgcaagatgtcgctcggcgcgatgaccaacctgatgtgccgcggccgcaagcgcggtctggccggcgtcatcgccacgcagcgtctggcgaagctcgccaagaacgtcgccgccgaagcctcgaatttcctcatggggcgcaccttcctcgatatcgacatggcgcgcgccgccgacctgctcggcatggaccgtcgccaggcggagatgtttcgcgatctgaagcgcggtaacttcgtcgctctcggtccggccctgtcgcgccgtccgctgccgatccagatcggcaatgtcgagacctcggcgcgttcgtcgagcccgaagctgatgccgctgccggactctcctcaggatgtcgaagacctgatcttcacgcccgatccggaagaattccagcggcctatcgtgcgccgcgccgctcccgcaccccgcccgaccaccgatatcctggccgagctttcccgctccgcgccggcggcaaccgcgccgcagccggccgaaggccgcgccagccagccggagatgtcggcggaagagcgcgaggagcgcgtgtcggccgtcttgagcgagatcctcgacgatccgggctctggtttccgcacggattcggtgctctatcaggagttcctcgtgcgccttcgaatgcgccgcgtgccgggatcgccgatgtcgctgccggagttccgccgccgcgtcgccgtatcgcgctcgggcgtcgaccccgacaccgccgaaaccgaagcctgggcgacggcgctgtcgctgtcgtcaggcgtgacggatgatctgcagggcgtcttcctgatgctcgccaaggccgccgtctgcggcgagccgtgcccgtcggatgcccgcatcgcgcgcgcctacggcacgcattcggcgcgccgcgcccggcgtctcctcggctatttcgaggagcaggggacggtggtcgtgcacaccgatttctccggcaagcggatcgtcgctttccccgacatgaactgccagacggcgcctggcgatgccaatgcgccggatgtcgacgacgtgcgctcggcggccgagtaatccacaggcattccctgatcgctatcgcctggcagggcgcgttttcacgtcatgcgagcgcgtttctacacgatagggttgcttctgtcatatcgagttcatctaccgggcggataaggcttgcatgccctttgggggcacacactttgaccttttgcccaaggagatgttggccatgtcgaatttcacccgttcacacgcgatcaaggcattcgcgacagcgctgcttgccaccgttgccgttcagccggcttatgcccaggatgccgcggcgaccaagcttctggagcgcggcgcaggcgaggacttgagcaagccgggtggcgcgcgccgcatctccggcgacatcaccgaggcgtaccgcgccgcgatcgtcgatggccgcccgaagaatgtgatcctcctgatcggcgacggcatgggcgattccgaaatcaccgtcgcgcgcaactatgccgtcggcgccggccagtatttcaagggcctcgatgcgctgccgatcaccggccagtacacgcattattcgctcgacaagaagaccggcaagccgacctacgtgaccgattcggccgcgtcgggcaccgcctgggcgagcggcgtgaagagctataacggcgcgatcggcgtcgacatccgcgaagaggcgcaggagacgctgctggagaaggccaaggccgcgggtcttgccacgggcaacgtttcgaccgccgaactgcaggacgcgacgcctgccgtgcaggtcgcccacgtcacgcagcgcaagtgctacggcccggaagcaacgaccgagaagtgcgccagcaacgcgctcgagaacggcggcaagggttcgatcaccgagcagctcatcggcacgcgcgccgacgtgacgctcggtggcggcgccaagagcttcggcgagaccgccaaggccggtgactggaagggcaagacgttgcgccagcaggccgaagagcgcggctacaagatcgtcaccaacgccgacgagcttgccgccgtcaagcaggccagtgacagcgccccggttctcggcctgttcgccgaaggcaacatgccggttcgctggcagggcccgcaggcgagccgcaacggcaatatcgacaaggagcccgtcgtctgccagccgaacgagaagcgcacggccgccacgccgacgctggcgcagatgacctcgaaggcgatcgacctcctcaagaccaatgagaagggcttcttcctgcaggtcgagggcgcctcgatcgacaagcaggaccacgcctccaatccttgcgcccagatcggcgaaaccgtcgatctcgacgaagccgttcaggaagcactgaagttcgccaaggagaagggtgacacgctcgtgatcgtcaccgccgaccatgcccactccagccagatcatcgacccgagctccaaggctccaggcttcacggaaacgctgatgaccaaggacggcgctgtgatggccgtgagctacggcaacgcggaagaggccgaggaccaggggcataccggttcgcagctgcgcatcgccggctatggtccgcgcgccgccaacgtcagcggtttgaccgaccagacggatctgttctacacgatcagcgacgcgctcggcctcaagccgcagaaggcagcaatgaagtaagtctctccggctttcttgagatcatacggttttgccggtgccatccatggattgtgattgacattccagtgacttcaccctaaagaccgcgccagcacggggcagcaatgtcccgtgtttcatttgacatgtcccgtggagtttccagttcgcgtaaccggaaaatcctgtcgggcctcctcaaaagaggccaaaggagggcgtgtttccttcgagcggtttggaaacaggccgccgtaacattctgaaaggaaatacgatgagcaagcgcgaatcgtccaagtataaaattgaccgccgtatgggcgaaaacatctggggccgtcctaagtccccggtgaaccgccgcgaatacggcccgggccagcacggccagcgccgcaagggcaagctttcggacttcggtgtgcagctgcgcgccaagcagaagctcaagggttactacggtgacctgcgcgagaagcagttccgcgcgatcttcgccgaagcttcgcgccgcaagggcgacacttctgaaaacctcatcggtctgctggaatcccgcctggatgcgatcgtctatcgcgccaagttcgttccgaccgtcttcgctgcccgtcagttcgtcaaccacggccacgtgaccgtgaacggcgttcgcgtcaacatcggttcctaccgttgcaaggccggcgatgtcatcgaagttcgtcagaagtccaagcagctggtttcggttctcgaatccatcagcctggctgaacgcgacgttcctgagtacatcgaagtcgaccacaacaagatggtcgctaccttcgctcgtgtaccggctctcagcgacgtaccgtacgctgttgtcatggaaccgcatctggtggtcgaattctactcgcgttaatcgcgacgttttcgcatacggaaaagccgcctctcggggcggcttttttgttatcttgagaggggtcgtgatgacggatttgcaggcagtcctcgacagtatccataccgagctccagccgcgtatcggcgagggcaaggtcgcagactatattcccgagctcgccaagatcgatcccgcccagttcgggctctcggtcgtgactgtcgatggcaaggtctatagcgtcggcgatgcggccgtgccgttttcgatccagagtatctccaaggtcttcatgctgacgctggcgctcggcaaggtcggcgaggggctatggaaacgggtcgggcgcgagccgtcgggcaatgccttcaactcgatcgtccagctcgagcaggaagccggcatcccccgcaatcccttcatcaatgcgggcgccatcgccgttgccgacgtggtgctcgccggccacgagccgcgcgaggcgatcggcgaagtcctgcgcttcgtgcgctatctggccgatgacgagacggtgacgatcgacgacaaggtcgccaggtcggagacgcagacgggttaccgcaatttcgcgctggccaatttcatgcgcgcctacaagaatatcgatcatccggtcgagcacgtgctcggcgtttatttccaccagtgcgcgctgtcgatgagctgcgagcagctggcccgcgctgggctgtttcttgccgctcgcggcgcaaaccccatgaccggccattcggtcgtctcgccgaagcgggcgcggcgtatcaacgcgctgatgctgacctgcggtcactatgacggctccggcgatttcgcctatcacgtcggccttcccggcaagagcggcgtcggcggcggcatcttcgcggtggcgcccggcatcgcctcgatcgcggtgtggtcgccggggctgaacagggtcggcaattcgcagctcggcgctgtggcgctggaaatgctggcggcgcgcacgggatggtcggttttcggcgattgatgctgtgttatggcgcagctttctgctagacgggatttggtttcgacctggggcctgaacggatgagacaatgaatatcgcagccaatatcgcggatgagctggaaacgcccgagatcgagggcgcgatcgcgcatgcgctgtttgccgatgcgccaagctccgtgtcgttcaacaagctgcgcaagcggctgctgcgccaggtgcgccaggccttcgacgatttcggcatgctgaagggccagcagcgctggctgatcgggctttccggcggcaaggattcctacggcctgttggccctgctgctcgatctgcaatggcgcggcctgctgccggtcgagctcgtcgcctgcaacctcgaccaggggcagccgaacttcccgaagcacatcctgccggagtatctggcgaagatcggcgtcaggcaccggatcgaatatcgcgacacctattcgatcgtgaaggagaaggttccggccggcggcacctactgctcgctctgttcgcgcctgcgccgcggcaatctctaccggatcgcccgcgaggagggctgcgacgcgctggtgctcggccaccaccgcgaggatattctcgaaaccttcttcatgaacttcttccacggcggccgcctggccgcgatgccggcgaagctcctcaacgacgagggcgacctgatggtgctgcggccgctggcctactgcgccgaggacgacatggcgaaattcgccgccgccatgcagtttccgatcatcccctgcgacctctgcggctcgcaggacgggctgcagcgcaacgccatgaaggacatgctcgccgatatcgagcgccgcatgccgggccgcaaggacacgatgctgcgcgcgctttcgcacgtgaacccgtcgcacctgctcgaccccaagcttttcgacttcgccggcctgatggcgggcgaagccgcgccggaaaagtgaacttccgcgcgcgcttaagttcttgttttgacacatgtcgttgtcgcaaaatcgcggcatagtctttcggcatgtcacaacgccaggaaggatgaaccatggtctccaagatagatgtcaccacgcttgccgatctcttgcggcgggcggcgaaggcggagatattgccgcgcttccgccggctcggcagcgacgacgtgcgcgccaagaccgaggcgaccgatcttgtgacggaagccgatctcgaagccgagcgcatgatcaaggccgaggtcgccacgctgtggccggaggcgttgttcatcggtgaggagtcggtcgcggccgatccggcgctgcttgggaaactgaaggatgcgtccttgtcgatcatcgtcgatcccgtcgatggcaccttcaatttcgcatccggcatccccgccttcggcgtcatggcctcggtggtcgcgaatggcgaatgcatcgccggcatcatctacgatccgatgggcgacgactgggtcatcgcggaaaagggcgccggcacatggctgaagcgccccgacggcgatacgcagcggcttcgcacggccgcgcccgtggcgctcgagcagatggtcggcatggcctcgaccggctttctggcgccgggcaagcgggccgaagtgctcgccaacctcgccaaggtccgtttcatctgcaactaccgctgtgccgcgcacgaacaccgggcattcgccggcggccatgtgcattacctcatgtataacaagctgatgccctgggaccatctcggcggcacgctcgcctgcgtcgaggccggcggctatgccgcgcgtttcgacggttcgacctatctgccggagcacgtcgacggcggcctgctgatcgcgccggacaaggaaagctgggagctgctgcggcgcgaggtgtttacggtgtaaaatagaagaagcccgccaaatcggcgggcttcgtgttttagaaatgccccgcgcccggatcgagctgcggatcgtcgcccgggtgggtgaagagcttgccgccctcagcccagagcgtggccacgatgctgatcaggccgaacagcgcgaagccgccgaagagcggctgcacggtgccgttgaacagctggccgaccgcgccgccgaggatggcgccgaaggtggtcgagacgaagccggtgatcgaggtcgcggtgccggcgagattgcccattggctccaggctgatcgccgtgaagttggtggcgatcaccgcgaacatcatcagcaggatcgtgaagagcgcataggccagcgtgaagcttggcgtgccgccgagcgccttcacgaagccgatcgccgagatgatggtgaagaggatcatcgcgacatgcgagatgcggcgcatgccgaacttgcgcacgaagaagccgttggcgaagttggcgaccgcgataccgcccgcggtggcggcaaaggcgatcggcagccagtcgccaagcccgtagacctcgccgaagacctgctgaacggagatgacataggcgctgatgacggcggtgaacatggtcaggccgatcatgtagccgcaagtgatcctgttggtgagcaccgtcttgaagccgtcgaccacattgccgaaggagagcgggatgcgctcttcgcgcggcagcgattccttcaggcgcagggatgcccagacgaacaggatggcgccgacgatgccgagcaggatgaagatccagtgccagttggcgtaggtgatgatcagctggccgaccgagggagcgacgatcggcacgatcatgaagacgatcatgacgtaggacatgacacgtgccatctcacggccaccgaagcagtcgcggacgacggccatggtggtgatgcggacggcagcgccgccgaggccctggatgaagcgcatgacgagcaacatctcgaagctgccggtcgccgccgcgccgaacatggccagcacatagacggcgaggccgccgagcagaatgttgcggcggccgaacgtgtcggacaggctgccgaagatgatctgcgatacgccgaagccgaggaagaagacgccgatgacgagctgcgcgtcgttggcgttcaccacgttgagcgctcggcccatggcgggcaaagcgggcaacatgctgtcgatcgccatggcgacgctggcggtcatgatggcgatggtgatgacgaattcgaggaagcccatgccgatgcggctggacccctggttttcggtgtgcggcttatggggcggcgtcatggaattgtcctgaaatatgaaactgtctcgaccggcgaatgcttcaggccgccggattatgcggctggaacagctggcctttctcggcgatcagcacgaagacgaggccgatgatcgagaccgtgaagtagccggcgaccatgggaagcgccgtgccgttgaaggcctggccgatgccggcgccgatcagcgcgccgccgacggtgctcatgaagccgaggaccgacgaggcggtgccggcgacgtggccgagcggctccatcgccagcgagttgaagttcgagccgatccagccgaactggaacatcgccagaccgaagaaaccgatgaacaggaagaacggcatgggatgcggcccgaacaccagggccagcagccagatggtgttgatggtgatgaagccgagcaaggcgccatgcgacaggcggcgcatgccgaacttgccgacaaggcgcgaattgaggaacgacgacatcgacatgaagaccgcgacgccggcgaaggcgagggggaaatagacgccgaggccgtagatgccgacatagatctgctgcgccgagttgatgaaaccgaacagcgagccgaagatgaaggtgctggcgatggtgtagcaaagcgcgacgcgattggtgagaaccagcttgaagccgccgagcaccgatttcacggtgaagggacgaacgttttccggacgcagcgtttcgggcaggcggatataggcccatgcggcgatgatggccgccatgacggcgatgaacaggaagatcaggtgccagctgccgaacagcatgatgatctggccgcttcccggcgcgatgacgggaacgatcatgaagaccatcatgatcagcgacatgacctcggccatctgccggccgccgtagatatcgcgaacgatggagatggtgatgacgcgggtggcggcggagccgaggccctggatgaagcgcaggatgagcaggccctcgaaggtcgggaccagtgcgctgccgagcgaggaacagatatagatgccgatgccggcgagcagcggcagccggcgaccgaaacgatccgacaaggggccgtagacaagctgggcgacgccgaagccgagaaggtagctcgagacgacgaactggcggttgttttcgttctcgacgttgaggctggcgccgatctgctgcagcgccggcagcatgatgtcgatcgccagcgagttgatcgccatcaggaaggccgcaagcgcgatgaactcacccttgcgcatggggatgcggcccacatgcgcggcttgtgatgaatctgtcacaatgtaattcccaaaaacaggccaaggcgctgttcagcacagcgcctcggactcaaaatacagaaatggaaaccgggctgacgtccggtgaccggtcaggtcaagcggcgccgcgaacggttacgccgttgtcctgaaagtgctgctgcaattcgccagcctggaacatttccttgacgatgtcgcagccgccgatgaattcacccttgacgtaaagctggggaatggtcggccagttggagtaatccttgatgccctggcggatttccgaatcagcgagcacgtcgacgctcttgtagtcgacgccgatgtaatcaagaatctgcacgacctggccggagaaaccacactggggaaactgcggcgagcccttcatgaaaaggacgacgtcgttggtcttgatttcgttgtcgatgaattcgttgatgccgctcatgggacctaatcctttcaacaggcgagttaaaggcccgccgtttcaatcgttcagcttagatagcatgtgacgatcggaattccagcgggtgcgaacaaaaaaagaagggccctatcggtctgacgtcctggctgttgccgatccgttacggattgaggttcggcaacggctgcgcgccttgtccggtgtcgatcaagccttgcgcgcctggctggcgaccgggaatcaaaaatgcccggcggaaccgggcatttttcaacaggccttgaccgccgtatttattccggcgccgaggtctgcagcgccagtgcgtgcagaacgccgcccatgttgcccttcagcgcgtcgtagatcatcttgtgctgctgcacgcggctcttgccgcggaaggcctcggctacgacttcggcggcgtagtgatcgccgtcgccggccagatcacggatgaccaccttggcgccggggatgccggccttgatcatgtcttcgatgtcaccgggtttcatggccatggtcgattactccttgcgcatcattccgcggcagcgagcgtgccgctgccatccatgaactcagggaaccacgattcatgggcgtggcgcaattgctgaattggcagcgacagcagatcgtcgatgacaagcgcgtcacccgcgaccgtgccgaggcggcggaacggaacgcccgcgccttccgcgttggcgcagacgaagtcggcgacatcggcagggacggtgagcacgtagcgcgcctggtcctcgccgaagagaagcccgtgggtttcgccgcggccttcgctgaggctgatcttcaggcccttgcccgaggacatcgccatttccgccagagcgagcgcaaggccgcccgaggaaaggtcgtggcaggcggttgcctggccgttgcgaatgacggaccgcacgaagttgccgttgcggcgttcggcgaagagatcgacttccggcggcgggccgtcggtgctgccgaggatgtcgcgaaggtagatcgaggagccgaggtggctgccgtcggtgccgatcatgatgaccttgtcaccatcggatgcaccgccgatgcgcgccatcttcttccagtcgccgagaaggccgacgccggcgatggtgggggtcggaaggatcgcgacgccgttggtctcgttgtagagcgatacgttgcccgagacgatcgggaaatcgagcgcgcggcaggcttcgccgatgcccttcacggcctgcaccagctggcccatgatctcgggcttttccgggttgccgaagttgaggttgtcggtggccgccagcggctcggcgccggtcgcggtgatgttgcgccagcattcggccacggcctgcttgccgccttcgaacggatcggcctcgacatagcgcggcgtcacgtccgaggagaaggcgagcgccttggtcggatgcgtgtcgacgcgcacgacgccggcatcgccacccggcagctgcagagagttgccctggatcagcgtgtcgtactgttcgtagacccagcggcggctggattcgtttggcgagccgacgagcttgagcagcgtctggccgtaatcctccggcgccgcgaccagattggcagggagcggcgcgcgcttgtcggcctcgcgccaggggcggtcatattccggtgcctgatcgccgagatccttgatcggcaggtcggcgacctgttcgccctggtgcatgacgcggaagcgcaggtcgtcggtggtcttgccgacgatcgcgaaatcgaggccccacttgacgaagatcgccttggcgacttcttccttggcgggctcgagaaccatgagcatgcgctcctggctttccgacagcatcatttcgtaggcggtcatctggtcctcgcgcaccgggacggtgtcgaggtcgagcaggatgccgaggtcgcccttggcgcccatttcgacggccgaacaggtgagacccgccgcacccatgtcctggatggcgatgacggcgccggtctgcatcagctcgaggcaggcttcgagcaggcacttttcggtgaaggggtcgccgacctgaacggtcgggcgcttctcttcgatcgattcgtcgaattcggccgatgccatggtcgcgccgccgacgccatcgcggccggtcttggcgccgagatagacgacgggaaggccgacgcccttggcttcggagaggaagataccatccgacttggcaaggccggccgcgaaggcgttgaccaggatgttgccgttatagcgcgcgtcgaactcgacttcgccgccgaccgtcggaacgccgaaggaattgccgtagccgccgacgccggagacgacgccggagacgagatgcttcgtcttcgggtgatcgggcgagccgaaacgcagcgcgttcatggcggcgatcgggcgggcacccatggtgaagacgtcgcgcagaatgccaccgacgccggttgccgcaccctgatagggctcgatgtaggacgggtggttgtggctctccatcttgaacacgacgacgtcgccgtcatcgatatcgacgacaccggcgttttcgcccggtccctggacgacgcgcgggccttttgtcggcagcgtgcggagccatttcttggaggatttgtaggagcagtgctcgttccacatggccgagaagatgccgagctcggtgaaggtcggctccctgccgatcagatccagaatccgctggtattcgtccggcttcaagccgtgggcggcgatcaattctggagtgatcgggcgggtattggaaatggtcatgagctctgcgaagtccctgccgttgcgcgatttcggtgtctttagcctaagtgggtgcggcgcgcgacagaaaaaagcccgctgttcacagagagcgggcccgcgagggcaatatcgggacggttcagaacttgtagccgacctgaagaccggcacgagtcatgccgttgttcggtccgtcgcacaggttggcgtgcgaggaatgggcgacttgcgcgatcacgctccagttcgcatcgatacggtagccggcgccgacatattcgtggaacaggaaacgacagccaagattcggcccgtcggcgctgttgttgagattgccgttgtgccagacgccgccaaatccggcttccgcgaagagcttctcgttgaagttcacggtccatgacaggccgccgaagatctgcgtcgcttcgcccgacgtgccgatcgaagtgccgacgttcacgcgggggcgggcgagggcctgtttccagtccgttgccgtatcctgattgaacgggtcgaagaagaccgtcacctcgggaaacacgccgtcttcgcgactgtcgccgccctggatcgacgctgaggcgccgaagcgcagttcgtcgaagatcttgtcatccgcatgggccgagaccggcataagcgacgtgttcgcaaggatcgccgcgaggagtagtccgcagccagtcgatgccgatgccatgctgttcattgtcatgcgccgcccttggtgccggctagatcgccgtcctcgcgccaattggtagcatgcaaatcgattcggtaaagcaggcaggtgctcacggaaccggatttcgtccggtgctgccgatcggcaacagcgtcagacctcgccgtcgtatccggcgccgccactttcaagcaggcgtcgaactgtcatcaagcccgcaaccatttcgcctctatccctgggggatgagaagctgatgcgcacgcggtgatagaccttgtcggtgcgcgccgccttgaattcgtcctcgtcgtcgatcagcacgccgtcgcggaaggcggcgttcttgaaggtgccggagagccagggatcgggcagcttgagccagatgaacggcacatgcggatgcgagatgaagtcgaatccctgtagcgtttcgcgcgccagccgttcgcgtccagcaagctcggtgacacaggcgtcgcgaatgtcgtgagcctcgccgctctccaccagacgggcgcaggcttcggcaaggatgaagggcaggccgccggtgatcatcttgtgggtgaccttgatgcgctgcgcgaaatgcggcgggcaggcgacccagccgccgcggatgccggcggctaccgatttcgacagtccgctgatgaggaaggtgcgatcgggcgcaagcgaggcgagcagcgggttctcgtcgccggtcatgccgccatagaggtcgtcctcgatcagccagacaccatgcttgcgcgcgatttcggctatcctggcacgccgttcatgcggcatggtcgcaagcgtcgggttgtgggctgtcggcatcaggaaggcgagcttcggatgctgttgcgagcagagccgctcgaaatcatcgggaatgacgccatgctcgtcggaatcaacggtgatggtccgccggccaaggatgcgggcactgcggctcacctgcgtatagctcaggttttcgaaaacgatcttgtcaccgggcgatgatatcgccgagatcacggcgatggcggctgcgtgcgcgccgagcgtggggacgatgttttcggtgtcgggcgcccagccgttgcgcgacagccagcgacgtccggcctcataccagttctgcggaaagacgcgcgaataggaggagatctcggcaagctgctgctcgccgatatcggcaagtatgcggccgatggcctttccctggccaagatcgggtgccgccgtcgtgtcgaagcgtatcttgtccgacggcgcgtcgattgtcctggtgccgccgagagcgatggtcagcggatcgggctgatttcccggcgccgtctccgcgcggtccagcacataggtgccgcgcccgacttcgcccgccaccagtccgcgctcatgcaccagcgcgtaggcgcggccgattgtaccgattgtcacgccgatatcgtaagccagattgcgctgcggcggcagcttgctgccagctggcaatgcgccgctggcgatggcggattcgatattgtccgcaaggcgcagatagacgggaccggaaccacgcgagagatcagggagccaatttgtcatgatgacaatttcctatattgtcaccatcctcctgtcaagtttatcagggcaaatgcatacaatcagagataggatcgagacatgtcggtagcccctgactgcaggagagacaatggattccatcaaccggagcaattccgcgacagggcgagatttgaccggcgcaatgtgtgggccacttttggccaagtctggagcagcattctgatctggcacaagaaacgggccagccggcgcgtgctccgggatctgacggattccgagctccacgacatcggcatcagcagggccgatgccgacaaggaggtcgcaaaatcgttcttctgggattgaggccgggaagcgtcggtggccgcttagctgcagctcttgttgccgccggcccagcgcgtaacgtcctgcgcgatgcgcggacgtgccgggccatccatcatcgggccaaaggcgtcgagcttggaagggttgccttccgcctggacgaccagcagcggccgaccttccgggctgttcctgggaacgacgaggatacgcgggcggccggagaacgagttgagttcgggagcgagcctgtaagcggtaaacgccgcgtcgcccgacttgaaccagcaagtgttggcggccaccgccacgcgttccatggtcgacagcgcgctgcgatcctgcgagggcgccggtgtcttggattggcaagacgcaaccagtgccgcgatcgcggcaacggcgaagatatgtgtcaggggcatgtgagggcgcatcgatcttgctccagtggaccggatgaatggcctcatacccgtttaaggttaagcagcgattacgtcgagcgcggaagcgaacaacgcccggccgtcggaaccgccatgggctgcctcgatcaggttttcggggtgcggcatcatgccgagcacgttgccgccctcgttcatgacggcggcgatgtcgttcatcgaaccgttcgggttggtgccctcggcataacggaagaccacctggccgttgccttcgatcttcgccagcgtttcggcgtcggcgaagtagttgccgtcgtggtgggcgaccgggcagcggatgatctggcccttggcataggcgcgggtgaaatcggtctcggcgttcgccacttcgagcttgatctcgcggcagacgaacttcagcgacgaattgcgcatcaacgcgcccggcagcaggccggattcgacgaggatctggaagccgttgcagacgcccagaaccttcacgcccttgttggccttctcgatgatcgcctgcatgaccggcatgcgcgcggcgatcgcgccgcagcgcaggtagtcgccataggagaatccacccggaatgacgatcagatcgacatctggaatgtcggtctccgtctgccagatcgtcaccggcgccttgccggagatcttggtgagagcggcgatcatgtcacgatcgcgattgaggcccggaagctgaacgacggcggatttcatgggtgtggttcaaaccttgcttgtgcttctgcgagttctcgaagttcgagacggttttcaatgcgttcgaggcgttggtcgtgacggtcgagcacgctgtagatgttatggatgtcatgatgcatggacaccatcgttccgcgcatcgcgttcatctcttccttcaatccgcgctggccgaatttcagctcagcaatgtctgcatgcactcgcttcaaaagttcatacaccagttcactgctgatttcagccatcggacaatctccacaacctttagtcgagagaaatagtataattctcgataacggtgttggcgaggagtttttcgcacatggccttgatgtcgccttcggccttggccttgtcggtgccttcgacttcgacgtcgaataccttgccttggcggacatggccgacgccatcgaatccgagcgcgccgagcgcgccttcgatggccttgccctgcggatcgagaacgccgtttttcagcgtgacggttacacgagccttgatcactttgtcttcccttgcctttttagcgaatggcttgctcagccactatgttacttgacgagcaccggaccggtgccgcgcacaggctcgttctcgttgatgatgccgaggcggcgcgccacttccgaataggcttcgagaaggccacccatgtcgcggcggaagcggtccttgtccatcttttcctgggtgtcgatgtcccagagacggcagctgtccggcgagatctcgtcggcgaggatgatgcgcatcatgtcgccctcatagaggcggccgcattcgatcttgaaatcgacgagctggatgccgacgcccaaaaacaggccggtcatgaagtcgttgacgcggatcgccagcgccatgatgtcgtcgagctcggcgggattggcccagccgaaggcggtgatatgctcctcggagaccatcgggtcctcgagcgcgtcggacttgtagtagaactcgatgatcgagcgcggcaacaccgtgccctcgtcgatgccgagacgcttggcgagcgagccggcggcgacattgcgcacgacgatctcaagcgggatcatctcgacttcgcggatcaactgctcgcgcatgttgaggcggcggatgaagtgcgtgggaatgccgatcttgttcagatggttgaatatgaactcgcagatgcggttgttcagaacgcccttgccatcgatgacttcgtgcttcttcttgttgaaggcggtggcgtcgtccttgaagaactggatcagcgtgcctggctcgggtccctcatacagaatcttggccttgccctcgtaaatacggcggcgacggttcattgcgattgttctcttgtcgttggcgctcttgggattagcgcgagtggatcgatctcgtggcgtccccataaaggaaaagcgagggtttcacaatccgcctgtcactccttccccggattccggtcttccggagcaccgatgcgagaatcgaatgtctgagaatggcattctaccccgtttcccggcttaacaaaacgaccgtaggtttatgccggggttgtgcagtgttttatttggcggcagtcgccttgctcggcttgctcggcttgcgcggcgagggcgcttgggcggcggccgcctggcgccagctggcggcccgcacgaaagaggggatctgcactgacggcatcggacgggccagcgcatagccctgcagcacgtcgcagccgaggtcgccgagaatccgggcgtgctccatggtctcgacgccttcggcggtgaccagaatgctcagggagcggccgatctcgatgatcgagcggacgagcttgcgctgttcggaggaggtcggcagcatccggatcaactcgcggtcgatcttcagcgtcttcgggcttagcctgagcaggctgacgatcgaggcgtggccggtgccgaagtcgtcgatctcgatgtcgatgccgagccggcggaactggcggagattggcgatgacagcgtcatcgcagtcatcgagcgaaatggattccagaagctcgaaggcgatggttccgggcacgatcttcagggcccgcagcttcttgcccagagctggatcgtcaagtctccgggaggagacattgacggcgatcttcggaatgacgatgccttcgcgctcccacgctttgcgatcggcgagcgcctgctcgaggatgacaccgtcgatggtcgcgacgacgttgatatcctcggctatgtcgagaaagcgatcgggcgcaagcaggccgtgttcgcggtgttgccatctcgccagcgtctcgacacccgtcacgtcgagcgtgcgggcatcgaactgcggctgataaaagggcacgaattcgcgccgctcgagaccgatgaggatatcgtcggccagccgcttgctcgcgatcacctggcgacgggcgtccttagagaagaattcgtgccggttcctgccgccgctcttggcgcgatagagcgcgatgtcggcgttgagcaggagctgcttaccatccagcatcgggccgctgtcggtggcgatgccgacgctggcgccgaagcggcactcgtgatgctcgtagcggatcgggcggctgagttcgcgcacgatgcgctcggccatgttggaaatcttcttcggcgtgacatcgatcgcgcacagcaccacgaactcgtctccgccgatgcgggccacgaaatcccccggccgaacggcttcggtcaggaccgaggcggcatgcttcagcatggcgtcgccggcgcggtggccgagcgtgtcgttgatctgcttgaaacggtcgaggtctatgtgcagaaccgcgagcgtatcgtcgccggtgctgctcgccgtcgaatattcctccagcttgcgatcgagatagcgtcggttcggaagccctgtgaggaagtcatgaagggcgagatgctcgatgctctccttggccgcctccagttcgcggttgtgggcctctgcgaggtccttggcccgttgaagctcggcgttgagcgccacttcctcggtcacgtcccaattggcgccgatcagcttgcggtggccgttgccgtcgatgaagaaggccgccttggcgcggatgacgcgctcggcgccatcgccgcggatgatcctgaattcatgctggaatcccgactggcgctcgatgttttccatcacggtcctatgcacacggtcgcggtcgtcgggatgcagcgtctcgctccaggcgtcgccgtgccaggcgcgcgtcgcgtccttgatgccgtagatccacagcaggcgcgcgtcccattcgacggtgccggtatcgagatcggactcgaacacgccgatccctgaaatgtcgagcgcgagatcgagccgccgcgacatatgcgccagacgctcttccgcctccttgcgggcggtgatgtcggtgtcggtgccgacgagacgggcaggggcgccgttttcatcccactcgacgcaggcgccgcggcattcgatccagatccagtggccgtcccggtgccgctcgcgatattcgaagacacggaagttcggatcgccggcgttctgccgatcgatcgcgtcgatgacgaaagcgcggtcatcgggatggatcagcgcgatccaggtatcgtagtcgccatccgcctcttcgtcgggcgcgatgccgcgcatggccttccaggtctgcgaataatagcgcgttccaagcttcaggttgtgatcccatacgccgagatcggaaccgaccagcgcatagttccagcggctttcgcgctcgacaagcgcgtcgttttcgcgatcggaagcatccgcggaggcgatggtgtcatcgctttttctcgaaccaaccggttgatcaggcgtcttcttcgtcaatgctcgcactcgctcgtctggcgtgtgtcaatttgcttatgttaaattaatccgggcttaataacggagaaaacttatgcgtctgtccagtctttcgggcgaacgcttccggctgaacgcttcacgccgatgctcgcggcgatattttgccaggatcgtcgcgacggccgcaaaaataccgcccggtgttttgcgccctatatgaggggcatggaggaaaagccatggctcaggattggccaatgttcatcatgcaatgcgtcgtgctcgccgcgttcgcgagcgtgttcttcgttcgcggcgagggcgactgagcttgtcggcgttggaacgcgcgcagcctagcccttgaggcggctgaggaactgcgcgaagaccatcgtgccctcgggccacgggccgtggccggagtcggcgttgatgtggccggactctcccgcatcgatcagcaatgagccccagctggcggcaatctcgtcggcgtgctcgtaggcgccgaagggatcgttgcggcttgcgacggtgatgctcgggaacggcaagggatcgcggggatagggaccgaaggtcatcagatgcttggggcggatgtcgggattggtgacatcgggcggcgccaccagaaaggcgccggcgacgggtttcttgaactgcgggatcgcatgcagaagcgacggcacgccgagcgagtgggcgaccagcaccaccgggcgggtcgacgcattgacttcctcggcaattctggctgcccagtcctcgcgcacgggcttggaccactccgcctgctcgacgcggcgcgcggtgctgagtttggcctgccagcggctctgccagtggtcggggccggaattggtgtaaccgggaatgatgaggatatcggcgtctgaagctttcatggtgccgccgatgtgagaaggcgtggcgacaaagtcaagggaaagcgggacagctccggcgatttttgttatactgcgccactgccggtcgcgttcgatgtcggcaccgccgatgctttcgccgctggcctcaatggctgaggaggagaaagccatgacggcatttcacgtcatgtccggcgcggacaatgtctattcgcgcccggtcatcaacagaattggccttgcggacgtcttcgacgccatcaggctcggcatggcggatttcagggaaaaaccatcgcattacgtgtttctgtgcctgatgtatccgatcgcgggcatatttctcgcggtcgcgacgtcgagcgccaacctgcttccgatgatattcccgctgatcgccggctttgccctgatcggccccctggcggcgatcggtctctatgaaatcagccggcgacgggaggccggaatggacagttcctggcggcacgccatggacgtgacgcggtcgccggccttcccgtcgatcgtcacgggcgggcttctcctgtttgcgttcttcgtcgtctggctcgtggccgcgcagacgctctacatgaacgtgttgagcgacgtgtttcctcggtcgatctccaccttcttctccgagatcttcggcacgccgcagggcatgcagctgatcgtctggggcaacctgatcggcttcggattcgcgctgatcgtgctggcgacgaccgtcgtcacattcccgatcctgctcgatcgcgatatcggcctcgtcgccgccatggaaacatcgttgcgggcgacgcttgccaatcccgttccggtcctgtgctggggcctgatcgttgcggtctcgctcgccgtcgcgaccatcccgctcttcgtcgggctggcgctggtgatgccgatcctcggtcattcgacctggcacctctaccgcaagctggtggcgccgccgatcgtgtgactgccaccttattgcgacctgggctgcgcaggaacacaatgcctccctccaagtttgactgatgcaggcttcgagggaggcaatcatgaccgacacccagcatatcttcatgcgcttttcggcgaagacgtcggaatgggcgggcaagcccgccacattcgtgcttgctttggtgctcgtcatcctttgggccgcgacaggatcgttcttcgactattcccagacatggcaactggtcatcaacaccggcacgacgatcatcaccttcctcatggtgttcgtgctgcagaacgcgcagacgcgcgacacgcgcgccattcaggccaagctcgacgaactgatcctgacaagccatgcggagaaccggttcatcggcatcgagaacctcgacgaggacgacctcaaacatctcgatcggctggtggcgaaagctgcgaagggcgggcaggcggagaagcaggcggcggccgacgccgcgccgaaatccaccaagaccgccaccgccgtgcgcaagaagatcgatgcggcggcgcgttcgcgcaaggacaaacgaagcggcgccccgaaaggcgccgcagaagaattgaccgtgccgatcagccgttggcgaagacgcggctgaaaatcgtgtcgacgtgcttggtgtgatagccgagatcgaacttctcgcggatttcctcttccgtgagcgccgcgcgcacttccgcgtcgccaagcagttcctcgaggaaatcggcgcccctttcccagaccttcatggcgttgcgctgcaccagacggtagctgtcctcgcgcgagacgccggcctgggtcagcgccagaagcacgcgctggctcatgaccagtcccttgaactggttcatgttgcgcagcatgttttccgggtagatcaccagcttctcgacgacgccggcgagacggttcagcgcgaaatccagcgtgatcgtcgtatcggggccgatggcgcgctcgacgctcgaatggctgatgtcgcgctcgtgccagagggcgacattttccatggccggaacaaccgacatgcgcacgaggcgggcgagacccgtcaggttttcggtgagcaccgggttgcgcttgtgcggcatggcggacgagcccttctggccgggcgagaagaactcctcggcttcgagcacttcggtgcgctgcatgtggcgaatttcgatggcgacgttttcgatcgacgaggcgatgacgccgagcgtcgcgaagaacatcgcgtggcggtcgcgcgggatgacctgggtcgagatcggctcggcggcgaggccgagctgttcgcagacatattcctcgacgctcgggtcgatgttggcgaaggtgccgacggcaccggagatcgcaccggtcgcgacttcggcgcgggcggcgaccagacggtcgcggttgcgcttcatttcagcgtagaagcgcgcgaaggtcaggcccatcgtggtcggctcggcgtggatgccgtggctgcggccgatgcggaccgtgtccttgtgttcgaaggcgcgggtcttcagcgccgcgagcacgcggtccatgtcggcgagcagaaggtcggcggcgcgcaccagctggatgttgaaggtggtgtccagcacgtcggaagatgtcatgccctggtggacaaagcggctgtcgggaccgatgaattcggcgagatgcgtcaggaaggcgatgacgtcgtgcttggtgacggcctcgatctcgtcgatgcgggcgacgtcgaattgggcgaccgaacccttttcccagatggtgcgcgcggattcctgcggaatgacgccgagattggcgagcgcggtgcaggcatgagcctcgatctcgaaccagatgcggaacttggtttcgggcgaccagatggcgaccatttcaggtcgggagtagcgcgggatcatggcttcctgctttcgttctagggaatgttggcgtttttcagaaatgttggcgcccctgtagcaaagacgggcggcaatctcaacgcatgcgtttcgcaagggcgaaactcgtcgccagcaggcagacgaggccgagggggaagaacagccgcaaaccgaggaccatgaactggtagacggagctcgcgccggtgaagaggaactgcacaaaccagatcaccgagccgggcgaggcatgccagcgcgagtagaagacgcggtagtccatcgcgaagagaaatgccgtcatcaggatcgtgcaggccgaaagtgcgacgaagaaggcggcgaaccgcgtttcgatgcggcgccggtacgcgaagaagcgtcccagcatgagcgcgaacggccaggcaagcaggccgcccgcgaaatagaggatggcgaggtcgtcgacgtggcttgtccgcaggccgttgcggacgtaaagcgtgctcatcgccgaggccagcatctggagagcccagagaggcgcgccggcgagcacggcggagtagggcgggtaagccgcctgcagccgttctcccatcagcgacacgtcggtcccggcattatttggattggccttcagcggccgcgcggagcgccgatatggccgacctgtaggcctcgacggagccgcccttgaagatggcagagccggcgacgagcacgttgccgcccgccttgccgatgacgggagcggtctcgaccgtgacgccgccatcgacctggagatcgatcggtcggtcaccgatcagtgacctggcggcggcgatcttgtcggccatggcgggaatgaacttctggccgccgaaaccgggattgaccgacatgatgaggatcatgtcgatatcatccagcacgttttcgaagaccgagagcggcgttgccgggttgagggtgacgccgaccttcttgccgagattacgcaccgtctgcagcgagcggtgcaggtgcgggccggcctcggcgtgaacggtgatgcggtcgcagccggccttggcgaaggcctcgagatagtcgtcgacgggcgcgatcatcaggtggcagtcgaaggtcgcgtctgtataggagcgcagcgacttgatgacgtcgggaccgaaggaaatattgggaacgaagtgaccatccatgacgtcgaggtggatccagtcggcgccggccgctgtcacgtcgcgcacctcctggccgagcttggcgaagtcggcggccaaaacggatggcgcgatgcggatgggctgggtcattgtctctctccgttgaagtcgcccgacatcaggcaggcgttattgcgccggcgcgttgaagggcacgaatgccccggcgcgccattgcatcagctggtaagggttttgcgacagctcgcggccggcgtcgaaggcgatctggccaagtacggtgtcgaagggcgtgccggcgagatgctgggcgacgggtcgctcatcggcggccgcggcctgcaccgccttgatcgcgatctcgacggcggcataggacggcaggacatagccctcgggctcgataccggctgcacgcagcgccacgcccgcgggcgacgcgtcggcgcgggcggtataatcgggcagcgtcacggcacggacgccgtccgcaagcggcagaggctggtcggccgcgcgcatcgcgtcaccgcccatcaggtcgagcgcgatcttgtcggcctttgcgtcgcgggcgatgatggagacgtcgctgcggtcgccgccgatgaagaccttggtggcgcccgctctcttgagccggcgaacgagcgcgatctgctgttcctggccggggcggtaggtatcggtgaaaacgggcttcaggccgttctgctccagcgcgttgcgcaccgcttcggtgagttcccggccgtggatcgttccgtcctcgacaagcgcgatggggctcgatgcccaatcgcgcaggatgacctcgatgatcttcgccgcctcggcgccatcggcgggcgcgagccgaaacagcggccagccgttcttcagcgcatcttccatgagaatgcgggagcgcacggagacggtgatagccgggatattggcgtccttcagcttggggagcgcgccgtcgagcgtctggctgcagagaaagccgacggcgacctgaaccttggccgatatcagcgcgtcggcgaccgtgccgccgctgccatcctcacaggtttcattgacggtgacgatggtgtcgccatcctcgcggatcttcgccccggcgccggccacgatctgggcaccgagcgcggcgaaattgcccgtctgcggtgcaacgacgccgatcgtcacgccggctgcatgggattctcccgctgcgacaagcagcaacggaagaagacctaagcaacgcgagatagtcatgaaggatgcgccccaagcgattattcctgctcttttatccgtccgaaccggatcgtcaaagaaaaacgcacggatcggtcgcttttcggcagcggtttgtagaaaagataacctatcgccgtcataatgcgccgcaaatgcgtgtgttcgtggagtaaaattttgttgagcaagcaaccgatcgatcccggcctttacagggacgcgatgagccgcttcggcggtcacgtccagttggtgacgacggcagtcggcgatctgcggcgcggggtgacgatcacggcggcctgttcggtgtcggacaatccggcgacggtgctcgtgtgcctgaacaacagcaatccgaagaacgagatcttcttccgcagcggcatcttcgcgctcaatacgctgggcgcgcatcaccagacactcgccgacgcgttttccggacgcaccaagatggaggacggcgagcgtttctcgacgggccggttcgacaggctggtcacaggcgcgcccgtgctgatggacgcgctcgcctccttcgattgccgggtgacggagatcaaggagatgaccacgcatcacatcatcttcggcgaggtgatggccgtgcggttcgacgaggcgaagccggcgctgttctacatgaaccgcgattactacaccctctagaaacgggctttctcatggacgcggccgaaatcgaagagatgtttcaggggctcggcccggtcaccatcaagcgcatgttcggcggcaaggggatctatcatctcggccggatcgtcgcgctggagtttcgcggcgacatgcttttgaaggccgacgacgtcagttcacccgccttcgcggaggccggcgccagccagtggacctatgagggaaagagcggcaagccggtgaagatgccgtactggtcgatccccgacgacgcctatgacgatccagacctgatggcgggctgggtgcggcttgcttacgaggcggccatcagatcggagtgatcggccgcgtcttccaagttcaattctagaattgctcgctgccgagacggccgatggcggcctcggcgaaggcggagagcggccgcggcaactcgctgcgtgtgaaccagccgaaatcagacagcttgtcaggctcggtcaatgccggctcgcccgagtagtcttcggcgatataaagaagtgagatccagtgctggcggtcggcgtcgctgatgacctcggtcgggccgagaaggctgacgcggccgatttcgaggccgctttcttcctcggcctcgcgcttcgcggcctgctcggcgggctccatatgatcgaccttgccgcccacgatgctccagtggccggcttcgggcgccttgacgcgcttgtagagcaggatctttctgtcgcgcaggataaccaatcccacgccgagacccggaaaatcaataccggggctgcccatcgcgtcagatcttggcgttcgccgtgatcagcatgaaggcgggaatgtcgtcgccgaaaccgaccggtgtcgggccgtcgtcgtggtcgcgatagcggcggcggtcgcgattgtcgtcgttagccgggtaagggcggttgccgcgcgcgttgttgttctgtctgttgttctctgacttgcgctcttgcttcacgctttcgacccttgctggtgcggcttgtaccggtgcggctgctgtttcgatcgtctcgacgccattatcctcggcggcgatatcagatttatgacccgaacgatttctgccacggccacggtccttgtcccgctcacggccgcccttgcggcgcgagcgatcgtcgtcacggctcggctcggccggcggcaacgtcgagagatcgccattgtgccatacgatcttctcaccgatcagcttttcgatcgcgtcggtgaatttctggtcgcggctggtgacgatggtgaaagcagcgcctgcgcggcctgcgcggccggtacggccgatgcggtgtacataatcctcggcgtgaataggtacatcgaagttgaagacgtggctgacatcggggatgtcgagaccacgggccgcgacgtcggaagccaccagaagctggagctggccgtcgcggaaattctgcagcatggtcgtgcgcgaacgctggtccatgtcgccatgcagcgcgccgacggagaagccgtgacgttccagcgaacggaacagatcggcgacgtccttcttgcggttgcagaagatgatggcgttcttcagctcttcctgggcacgaatgaggtcgcgcagcgtcgagcgcttctcgtagtccttgccatgggcggcgacgaagcgctgcgtgatggtcttggatgcggaggcgggcttggcgacttcgacacgttccggattctgaaggaagcggtcggccagcttctggatctccggcggcatggtggccgagaagaacagcgtctggcgggtgaacgggatcatcttggcgatgcgttcgatatcgggaatgaagcccatgtcgagcatgcggtcggcttcgtcgatgacgaaaatctcgacgccgctcatcagcagcttgccgcgctcgaaatggtcgagcaggcggccgggggtgcagatgaggacatcggcgccacgctcgagcttgcgatcctgatcctcgaacgaaacgccgccgatcaaaagcgcgacgttgaggcggtggttcttgccgtatttctcgaaattctcggcgacctgggccgcgagttcgcgggtcggctcgaggatcagcgtgcgcggcatgcgggcgcgggcgcgacccttctccagcagcgacagcatcggcagaacgaaggaagcggtcttgccggtgcccgtctgtgcgatgccgcaaatatcgcggcgctgaagcgcaaacggaatcgcgccagcctggataggtgttggcaccgtgtagcccgcgtccgtgacagcggaaagcactttttggctcaagccaagatcagcaaatgtcgtcaaagggaaaactgtttccgttccggttcggccggactcaggcttgagtcggcgtgattgcatgccgcaatgcagcgccacataggctgaaacggttgagaagtcaaggaagcggcgcggtctcagggttgttgaggtaaaaccacggttagcgagatcgttcagtttatataaccggcgagtttcgtgccggcgctgatgaagtagatcgggtcgacggcgcgtccattctggcgcacctcgtagtgcaggtgggtgccggtggagcggcccgtgctgccggccagcccgaccgcgtcctcgcggccgacgatgtcgccgaccttgaccaggaccccggccatgtggccgtagcgggtgatgatgccattgccgtggtcgatctcgaccatgttgccatagccgccgctccatcccgccgtaatcaccttgccgggggccgtcgggcggatcttctcgttgggcgtgaagcggaaatcgatcccggaatgcagcgccagccggcccatgaagggatcgcggcggttgccgaaggggctggtgacttccttgccgatcgcgggatgctggaatggcagcgatacggcggtttcgcgcacggcttcgagccgggtgagggcggtgtccagttgcgccagcgaattgtcgaattcattgccgatcccggggccgatctctggctcgacataggggccgccgacggcgctgttgtcatccggcttgacaccggccgtctcggaggggacgcggatctggaagcgggtcaggacgttggagatcgcggccgaggcatcgctggcgtcggtcgtcagctggctgacgcgatcgcgctggcgctgctcgatccccttgagggatagcgtgaccttggagaagacgcggtcggcacgatcgccgctggtttcgcgcggcgggacgtaggcgagcgtcgaattgtccggcgtcacgtcggccggtgtcgcgtcgccggcgagctggcgttcgatcggttgcatcgcggccggcagttcggcgcgcttgcctttggcgtcggccgcatcggcggatgccggcgtttcggtcttggcgtcgaggccggaattttccgcccggtcgagcagctggccgagcttgccgcggcgcgagaccagcgcctgctgctgctccatcagcttgtcgaccttgtcttcgacgacctgctggtcgagcagctggcgcgaggtgacgcgatcgacctgggcacgcaaggcggcgatgcgatcctcgtagtcgtgctgcatgcgcgcctggcgcgccatcgtggcgccgatgagatcgtcacggagcacgaggtaggaggtggcgagcaggtagccgatcgcgaaaacacccacgaagcagaacgcgattgccgccatccacggcttgacggtcaggtgacggacccggtcgccgctggcaaggatcaggatatgttcctgtttttgtttgccgaatatgcggttctgctgtgtgtgcgtcacggagaatctcccaactgacggacctgcctcaattggatcgattacacactgttaaggttaataaagccttagatttggccttgttcaacacatgggtgaattttcggaatttactcttttcgcggtcaggaggggagattcctgaccgcctccagcaccgcttcggcgtgcccggcgaccttgaccttctgccagatggcggcgatctcgccattggggcggatcaggaaggtcgtgcgctccacgcccatataggtgcggccgtacatgctcttttgcttccagacgccataggcctccagcgtggtcttgtcctcgtcggcggcgagcgtcacgccaagcttgtgcttcttgatgaaccgatcatggcaggtggccgaatccggcgacattccgacaatggcggcgcccgatttctcgaacgcgtcggcgagcgccgtgaaggcgatcgattcggtggtgcatccgctcgtgtcgtccttcggataaaagaacagaaccaatgccttgccgcgaaaatccgtcagtttcacgcgtccgccgccgtcgcgcgggaggtcgaaatcgggcgccatggagccgatggtgagttccgccatggggaaacctttcttttgccgggtttgtggataagaggtgatttgccagatatatattggacaaatcagcgtccagccagtctggtccaatcacagaacaggggtacaggcgaggcgcatgtcggcgatccgcggcgagaaggtcagattccgcaagaaagatatcgtcgcgctgcacgatcttccctccgcacggaccgaggatccgctgatcgtgcattgcccgccgatgcgctcgggcatgcgtcggacggccggtctcgcgggcggcctgatcggcttgtttatcttcatcgtcgccgccatcatcttcaccgtcgaaagcggcgtcttcgatgagcccttgtcgcggcaggcgcagtcggcgttgaattcggcgatcgggccgcgttaccgggccgaggtcggctccacggtcatccgcttcacatccaacatgcggctggcgctcgaagcgcgcgacgtcagcgtgatcgacgaaaagagcggtcagcatatgtcgacgacgggcgccatgcgcatggcgctcgatcccctgcaattgttccggggacggatcgccatcgcgcaggtggaggcgcaggacatcgctctcgacaccgcgctgctgccttcgggcaaacccttgaagctggacggcctcaggatcgaccagattccggccgcgatggaaacggtgttcgagcagctggatgttctcgacggcttcgtcgatcgcggcgggacgaagtcgatcaagctcgagggcctcgacatcaagctcgccgacacggccaacgggccgctgtccatcgtcgtcaacagcctggtgttctcacgaaacccgcagaacgcgctgcagctcgatggcgaggtcgcgatcaacggtcgtttgacgacgctgcacctggcgaccgaaaaggccaacgggcgaacgtcgcggctgacgggcgagctcgatggcgccgatctggcgccgttcacgctgaagcgcaacgcgatcggcgagatccgccaaggtgtcgacgcactggcgggtacggcggtttcagccgtgcgcggcgacgaggcgaccacgccgtcgcttgccgtcgcggtcaatctgcaggcgggcaagttctacatggacggcgacgagcaggagctgacgggcgggcaggtcaaccttgcctatgacttcagcaagcaatcgctggagatcgcacgctcgcggctgcagttcgggccaacgatcgtgcccttcaacggcgcgctgatcgacctcgacaagatcgacaccaccgccgcgaagggtttcggcgtcgatctcctgatcagcggcggcacggccgcgccggtgacctcgggcgaacagccgcttgccttcgatgttcaggcgacggggcgctatttcgtcgacgcgcgcgagctgcagttcgccaatatgaccgtgtcgagcccgggcggatcgctctacggttcgctgcgggtccgtttcggagacaagtcgcccgagatcagcttctccggccagtcgcaacagttgcagaccaccgcggtgaagcagctctggccgttctggatggcgaccaaggggcgcgagtgggtcgagcgcaacctttacggcggcgtggtgtccaatgcctcgatcgatgtcttcattcccttcgggcggctggaggaggccgtcggcaaggggctgaagctggatgaaaaccagatcaggatcgccttcgacatcgccaatacgcgcatgaacgtgaccggcgacattccgccaatccgcgataccaacgcgcatttctcgcttgccggtccgaaggcgacgatctcgatcaagagcggcaagtcgttcttcccgtccgggcgcaccgtcgacgtcggcgagggtacgttcatcctgccgtccacctacgacaagccgctgatggccgagctcaacctgccgatatcgggcgcggccgacgcgatcggcgagctgctgaccttcaagcccatccaggtgctgcagcgggcgggcttcgtgccagaggatctgaagggcaacgtcaccgcttcggtgcaggcgcgcatcggtctcatcgcctcgcaaaacccgccgccggtcgaatggaaggcggtgctgcaattgcaggacctggacgtcgccaaggccatatcgggacgcaagatcaccaatctcgacggcacgctgacggccgacccgaaacaggtggttctcgacggcaagggctacatcgacggcgtggcggcggcgatcaagctggtcgagccgaccgaaaagtcctccgacatccagccgcagcaaagcgtgacggcaacgctcaacaacgatcagcgcgagaagatcctgcctggcctgtccgatatcatcgacggtccgatcagcgtccagctcgaccgcatcgacaaggatcgccagtccgtatcgctcgatctcggcaaggcgaggctcgatctgccgtggatcggatggtcgaagggaagcggcatcggggcgacggccgatttcgagatttccgggcccgacgacaatctgcagatcaagaatttcgtcctgaaaggcgacggatttggagccagcggcgcgctgtcgatgagcaagggcaatctgcagaaggccgatttcgacagcgtgaaactgtcgtcgctcgacaatttcgcgatctcgcttcgccgcgccaagggcggcatggaggtctcggtctccggcgccagcgccgacgtgcgtccggttctggcgcggatcaaatcgggaagcggagacaagggcgacggggcgtcgaagagcgacagcagcgtttcgctgaaagccagccttggaagcgtcgtcggcttcaacgacgagaagctgcgcaacgtgcaggccacctacatggctgatggcagccgcatccgctcgctcaacctgtccggcctcaccgacagcggcgaagccgtggtcgcgcagacgcaaggcggcggcgccatcaccgttaccagcggcgatgccggcgccgtctcgcggttcgccgatctctatcagcacatgcgcggcggcctgctcaacctttccatccggctcggcgccggcgacgactgggacggctcgatcgacgtgcggcgcttctccatcgtcaacgagcagcgcctgaattcgatcgtctcgacacctgtcggccaggaacagcgcagcctgaacgcggccgtgaagcgcaacatcgacacatccgcgcaacgattccagcgcggcttcgcccgcattctgtcgagaaacggcgtcgtcggcatcgaaaacggcgtggtgcgcggcgatcaggtcggcgcggtgttccagggcacgctgcgcgacgttcgcggcaatatggacatgaccggaaccttcatgcccgcctacggcctgaaccggctgttcgccgaactgccgatcatcggcatcatcctcggcaacggcaccgaccgcggcctgatcggcatcaccttcaagctgacgggcaagctcgatgccccgaacctgacgatcaacccactgtcgatcatcgcacccggcgttttcaggaatattttcgagtttcagtgaggcgatgatgggtgaggatcgctaacctgccgaatttacggtgtttccttctccctcgacgccatcctcgggctcgtcccgaggatctgagcacgtgccccggagtgcgacggtgatggtgcttgtggtgacggtccagcaattggcttttgcgtaggccaatcgttggaaacgcccgccatgtgtccactcgcgtcgagcaagtggcgccgtgctcagatcctcggggagtgtaaagcccggagacatccgtgacagtcgttcggagacatgcctgacactcacgtcgggtttgcgaggtcgatttttgcgaccttggttgcgccgaagaagacgccatagaggccgtcgcggtcgagggggcggatggcgaggcattcgcccttgaaggcgccgggcacgcgccatgcctggcccttgaagctgatgtagcccttggtggtgctgatgcgccggacgatctcgccgctgtcgtagacgggctccggcaggcgcttgggaaacgatcttggcgaggggctgtagcgactggccggaaccgccatgccgatcgcctcgtgcgggcggtggtgattgtagatctcgcgccagagatcgaatgccttctgcgcctggggctggccggagagcgtcgcgaagttcagtacctcggccttgaggctgcggtggaagcgctcgttcttgccgcgtccctgcgggtgatagggccttgcatggatgagatcgatgccgagcttgagcaaccagacgcgcagccgcgtccactggttgggaacgccggtgccccacgggttgccgttgtcggtatagatggccatgggcaggccgtagcggcgcaaaataggctccatgcggccgcgaacggtcggcatctgctggtcgaggcaggcctcgatggcgatggcgaagcgggaatggtcgtcgatgatggtgagcggatggcaccatgcacccgaggtcagcctgatctgtcccttgaagtccatctgccaaagcaggttgggcgcctcgcgctcgaagcggcctggcgccaggtggtccttggtgtgcgggccgatcctgccgtggcgggcaaggatcgcatgcacggtcgaggcgcagggcggcgcgatgccgagatcgagcagccgccttgcgatcttgcgggcgccccatgccgggtgttcgtcgcgcaccgaaagcaccgagcgctcgagatcagtggtgcgccgcgggcttgcatgcggccgccgcgaccggtcctcgaccgtttcgccggcggcgaaccgcttcagccagacatagcccgtctggcggctgatgccgaagcgctcgcaaagcgccgaaacattcgctccctcacgtccagccaaccggcagaattccaaacgctcgtccacaaccgacctcgcccgccaagccatcaaaacctcccggattgcaatccgaaaagtgtcaggcatgtctccgaacatctgtcaggtatgtatcaaggctgtacaacaaggccgaggatgacggttgagatggtggtttccgtctcgaaagcgttgaatctgcgccattttcggctcctcggcgtcatcctcgcgacgcggcaaagcacaaaaaaggccggcgatcgtgccggccttttggtgaagtcctgaacaacccgcgcttacgcggccgggcggatcaggatgtgtttcttcttgccgagcgacagcttgatcacgccgtcggcggtcacttcacctccgccgatgagcttgcgctcgtcgctgatggcctggtcgttgatgcggaccgcgccgccctggacatggcggcgggcttcgccgttggaggcggcgaggccggcgcggacgatcagggcgagcaggccgatgccggcgtcgagttcggccgcgggcacgtcgatcgagggcaggttgtcggcgagcgcgccttcctcgaaggtcttgcgggccgtttcggccgcctgttcggcgttttcacggccgtgcaggatcgtggtgacctcggtcgccaggatcttcttgacctcgttgagctcggagccggcaagggccgaaaggcgggcgatctcgtccatcggaagcgtggtgaagagcttcaggaagcgcggcacgtcggcgtcttcggtgttgcgccagtattgccagaagtcatagaccggcagcaggtcggcgttgagccacaccgcgcccgaagcggacttgcccatcttggcgcccgacgaggtggtgagcagcggcgaggtcagcgcgtagagttgctcggtccccatgcggtgaccaaggtcgataccgttgatgatgttgccccactggtcggagccgcccatctgcagccggcaatcgtagcgcttggcgagctcgacgaagtcgtaggcctgcaggatcatgtagttgaattcgaggaaggacagcgagtgctcgcggtcgaggcgcgtcttgacgctgtcgaaggagagcatgcggttgaccgagaaatgacggccgacatcgcgcaggaattcgaggtagttcagcgagcgcagccactcggcgttgttgatcatcagcgccggattgcccgacttgtcgtagtcgaggtagttggcaaagcagctcttgatcgaggcgatgttctcctcgatcgtatcgaccgtcatcagcttgcgggcctcgtccttgaaggaggggtcgcccaccatgccggtgccgccgcccatcagcgagatcggacggtggccggtggcttggaaccagtgcagcatcatgatctgggtgaggtggccgacatgcaggctcgatgcggtcgggtcatagccgatataggcggtcacggtttccttggcgagcagggcgtcgaggccggattcatcggagatctgatgaatgaagccacgctctttcagcgtgcggaggaaatcggatttgaactcggtcatgaccttttgctttcggatcaggattttcggattggctattgttgaagcaacgcggcgcgtttagcactgttttctcgcacagtcaccatttggttgattggctcctttatttgtagatcatcgagggacaatggggaaaatcctgacagcgatcggcctgatgagcggcacctcgatggacggggtcgatgcggcgctgcttgagaccgacggcgaaaatatcatccgtcgcggcccgagcctctacgtgccctatgacgacgatctgcgtggccgctggaagcaggcgctgcagacggccaaggccgtggtcgagcgcggcgaccggccgggcgacctcgcggacgccgagagggtgctgacgctttgccatgccgccgtggtcaagtccttgctttcgcgtcacggcctcaagcctgacgatatcgacctcatcggctttcacgggcagacggtgctgcaccggccggatgccggcgtcaccgtgcagataggcgacggaccgctgctcgcgtcggagaccggcatcgacgtcgtctacgacatgcgggccaacgacatggtgcatggcgggcagggcgcgccgctgatcccggtctatcatgcggccctctccgccaacctgccggacggtttcgccgcgcccgtggtgttcgtcaatatcggcggcatttcgaacctcacctatgtaggtgccgacggcgcgctttcggctttcgacagcgggccggggaatatgctgatcgaccagtgggtcgaggcgcataccggccgggcctacgaccgcaacggcgagacggccagccgcggggcggtggtgccggatcttacgcgccgctatctgtcgagcccgttcttttccggcaatatcaggcgctcgctcgaccgcggcgatttcctgccgcctgaaaaaggcgaggtgtcgctggaggacggcgcgaggacgctggcgcatgtcaccgccgcctcgatcgtcacgctcgccgatcacctgccgcacccgcccaggacatatgtcgtctgtggcggcgggcggctcaatcccgtgatcatgcgcgaattcgccgatctcgccacggcaaagggcgcgcgggtcgtctcggcggagatggcaggcttcgacggcggcgccatggaggcggaggcctgggcctatctggcggtgcgctcgctcaacggactgccgctgacatatccagggacgacaggcgtttgtgcgcccgagaccggcggcgtgatcgcgaggaagccatgaccgacaccattatcctgaagacgccccggctcgtcttgtccatgtgggggcaatacgacgtccatctgctgcaattgctgcattcgacgatcgagaccacccgctacctctcgggtgccgcaccctggagcgctgccaaggtgcaagagcgcttcatgagctttttcgccgagcaggcccgcgatggcgtgacaaaatacaaggtcaccagcctcgacgacggtcgcttcatcggccgcgccggcttttcccgttatggcggagatcgcggcgcgttcgagctcggctactcgcttcggcaggaggagtggggcaagggttacgcgacggaactggggaagggcctggcggactggtttttcgacaaggggctggctgaccagttcatcgcattcacgcatcccgacaatgtcgcgtcgcaacgtgttctgacgaaaatcggcatgcggggccgcatgccgctgaccatagacaacatgtcctgcccgaccttcgagctgaccgccgagatgcgccaagcctagcggacgcgcttagcttctgtcgggcttacgcaggaggtccagcgccttgtcgacatcaccgcgtccgcgttccgacatcgcttcgaacgtctggcgcgcttcgaagtcccgcaccatccgcgccgtcatgtcgctcagcagatcctccacggttctaccgctctcggccgcgatgtccgcgactttcctctcgacatccttggaaacctgaaaactcagcatcgtcatgaatttcgctcttcgagaaagacatcgggcgtgacgacgcgcaaatcgggaaaccgcaattcccgctggcgaaagtctcgctggttataggtgacgattgtagcgctgtttgccgcaacggccaattcgaaaacatggttgtcggcttcgtcgggaagattgggccgccagaggtagaatacttcctgccattggctgcgggaaacgaaagcacggagcagcagctggcgttcctccagactcaaacgagccgccctgaagagcggctcgcgttcgataacatcgagatattccagaaacagcgtggcgccgattacgggcgtcaattcccccgtcaggcacagctcaataacgcggctggctgggccgttgccgatacaagcgctgacgagcacgttggtatcgacaacgatccgcatcgtcagcggatgcgcttggcggcgggctccgggaccagttcgccgttgaggcggcggtcgaggtagtcctcgcattcgcccatcagcgtttccacctggccgttgaagaagtggttggcgcccggcaccgtgcggtgggtgatgaggatgcccttctgggtcttcagcttctcgaccaggccgttgacgtccttctccggtgccaccttgtcggcgtcgccgttgatgatcaggcctgatgacgggcagggcgcgaggaaggagaagtcgtaggtgttcggctgcggcgcgatcgatatgaagccttcgatctccggacggcgcatcaggagctgcatgccgatccacgagccgaaggaatagccggcgacccaacaggtcttcgaatcaggatgcaggctctgcacccagtcgagcgcggaggccgcgtccgagagttcgccggcgccatggtcgaattcaccctggctgcggccgataccccggaagttgaagcgcaacgtcgtgaacccgcgcttctggaacatgtagaagagctggtagacgatctggttgttcatcgtgccgccgaactgtgggtgcgggtgcaaaatgagggcaatcggcgcgctcttttccttggagggctggtagcggccttcaaggcggcctgcggggccgttgaaaatgacttcgggcatcggtactccggcttttatttctcgcgttcgccctgcgcagacttgacggacgttgtcagcttttctaaaacgcagtttagaacaattcgaaacttgcatggcaatccacgcagtgttggatgtgtcataggacaagcccggctgacttttcaaggaaaatgcaccggtccgccacgcaagaaacaagcgcaggacgaaaagatcatggcgccggcccggctctatctcgattggaacgcgacggcaccgctgcatcccgcagcgcgcgacgcggtcctgcgggcgcttgatatgttcggcaatccgagttccgtccatggcgagggccgcgcggtacgcgccgcgatcgaaggtgcccgccggcaggtagcggccctcgccggcgccgatcccgcccatgtcatttttaccagcggcgccaccgaggccgccaacatggtgctgacgcccgatttccgcatgggccgcacgccgatggcgatcgggcatctctatcactcggcgatcgagcatccggcgatccgcgagggtggacggttcggcaagtaccgcacgaccgagattgcggtgaccgctaacggcgtcgtcgatctcgatcagctgcaaagccttctggccggccacgacaaatcgaccgggctgccgatggtcgcggtcatgctcgtcaacaacgagacgggcgtggtgcagccggtgggcgaggtggccaaggtcgttcaggcacatggcggcctgctcgtggtcgatgccgtgcaggcggctggccggatcgcgcttgatatcaatgcgttgggcgccgatttcgtcatcgtctcctcgcacaagatcggtggtcctaaaggcgccggcgcgctggtgtcgcgcggcgaagtgctgatgccgagggcgctgatccacggtggcggccaggaaaagggtcaccggtcggggaccgagaattcgcttgccgtcatcggcttcggcgcggcggccgaggtcgctgtccgagagttcgacgagcgcaatgcccgcatctccagcctgcggcagcagctggaagacggaatgcgcgcggcagcgcacgatgtcgtcatttatggcgcggatcaacagcgggtctccaacaccaccttcttcaccctgccggggctgaaggcggagaccgggcagatcgcattcgatctcgaaggcgtggcgctgtctgccggtgctgcctgctcgtccggcaaggtcggcgagagccatgttctggtggcgatgggtcgtgatccaaagctcggcgcgctccggatgtcgctcggttttttcacgacggacgaggatatcgccagggccgtcgcgacattcacgaagatagccgcgcggcgcaagccggcgggagaggcggcgtgattgcctgataaggcgccacgaccgcctgataaatttgcgaaaacgcaaatttccacttgccattcgggctgaaaagtcccctttggccacttacataaggggcaaccaaaattgcccgaacgacaagctgccggaccttttctccggcgagattggagaacgatatgcccgccgtccaggaaacggtcgatcgcgtccgcgagattgacgtcgatcagtacaaatacggtttcgagacgatcatcgagatggacaaggcacccaagggcctgtccgaggatatcatccgtttcatctccgccaagaagcaggagccggaatggatgctcgaatggcgtctggaagcctacaagcgctggctgacgctggaagagccgaactgggctcgcgtcgattatccgaagatcgatttcaacgacatccactactacgcggcgccgaagtcgacgccgggcccgaagtcgctcgacgaggtcgatcctgaaattctcaaggtctacgagaagctcggcattccgctgaaggaacaggaaattctggctggcgtcgaacggccgaagatcgccgtcgatgcggttttcgacagcgtttccgtcgtgacgacgttcaaggaagagctgaagaaggccggcgttatcttcatgtcgatctcggaagccattcgcgagcatccggaactcgtgcgcaagtatctcggctcggtcgttccgacctccgacaactactatgcgacgctgaactcggccgtcttcaccgatggttccttcgtgttcattccgaagggcgttcgctgcccgatggagctgtccacctacttccgcatcaacgagaagaacaccggccagttcgagcgcacgctgatcatcgccgaggagggcgcctacgtctcctatctcgagggctgcaccgcgccgcagcgcgacgaaaaccagttgcatgcggccgtggtcgagctcgttgctctcgacgacgccgagatcaagtattcgacggtccagaactggtatccgggcgatgcccagggcaagggcggcatctacaacttcgtgaccaagcgcggcgattgccgtggcgcgcgttcgaagatctcgtggacgcaggtcgaaaccggttcggcgatcacctggaagtacccgtcctgcatcctgcgcggcgatgattccaggggcgagttctactcgatcgcggtgtcgaacggccatcagcagatcgattcgggcaccaagatgatccatcttggcaagaacacgtcgagccgcatcgtgtcgaagggtattgctgccggcgtctcgcagaacacctatcgcggccaggtctcggcccaccgcaaggcatcgaacgcccgcaacttcacgcagtgcgattcccttctgatcggcgacaaatgcggcgctcacacggttccctacatcgaggcgaagaactcgaccgcgcagttcgaacacgaggcgaccacctcgaagatctccgaggaccagaagttctactgcctgcagcgcggcattcccgaagaagaggcgatcgccctgatcgtcaacggcttcgtcaaggaagtcctgcaggaactgccgatggaattcgccgtcgaagcgcagaagctgatcagcatctcgcttgagggtagcgtcggttaacctgaggcaggtgtcgtcctcgggctttgcccgaggatccgagaagcggtcgtttgaaggacggcagatatgaacgagaaggtcgaacatctcatcctcgaacatttgcgcgcggtacgggcggatatcagttcgatgaaagaggaaatggccggcatgcgcggcgaaatgttcgcaatgcgccagcacatgggcgggcttatgagcgcccaacttgttcaagacacggaaatcgcgggcctcaaggtccgcatagagcgaatggaaaagcggcttgagctgagcgaataggctcgcggaccgtcgactgagacctgaaggataaagagaatgcttgaaatcaagaacctgcacgcccgcatcgccgaagacggcaccgagatcatcaaggggctgaacctcaccgtgaaggcgggcgaagtggctgcgatcatggggccgaacggctccggcaagtcgacgctgtcctacatcctgtccggtcgtgacgattacgaggtcaccgagggcgacattctctacaacggcgagagcattctcgaactcgatccggcggagcgcgcctccaagggcatcttcctcgccttccagtatccggtcgagattcccggcgtcgccaccatgcagttcctgaaggtcgcgatgaacgagcagcgcaaggcgcgcggcgaggaagagctgaagacgcctgatttcatgcgcctcgtcaaggatgcggccgccaagctgcagatcaacaccgagatgctgaagcgtcccctgaacgtcggcttctccggcggtgagaagaagcgcgccgagatcctgcagatggcgctgctggagcctcagctttgcatcctcgacgaaaccgacagcggcctcgacatcgacgcgctgaagatcgtcgccgacggtgtcaacgcgctgcgctcgcccgaccgcgccaccatcgtcatcacccactaccagcgcctgcttgactacatcgtgccggataccgttcacgttctctacaagggccagatcatcaagagcggcgacaagacgctggcgcatgatctggaagccaacggttatgccgacatcatcggcgcggcggcctgatctaggcggaaaggaactggtcgcatgaacatgcagacgacgacccgcctgaccgccgctgaagcggcgctgatcgaggcgttcaacaacgagatcggcgagctgccgggcgatggcgccgtgatcgccattcgcgaccggctgctcgacgacctgaagacttcggggcttccaacgcgccgcgtcgaggcctggcactacaccgacctgaagacgctgctgcgcgccgtgcccgtacaggcaggcgacgccggctccgacgcccgcgatccgctggtcgagggttcggccgtgctgtccgtcatccagggacgtcctgatcacaaggcgcgcgccggcgatctcgcgatctcgtgctatgccgaccagctgtcggatggttcggccgccgatcgcctcggcgcgctcgacaaggacgacgcggtcggccggatcaacggcagcttcgtgcgcgacggctacgtcatcgacgtgcccaccgaggccgtgcttgaagagccgctggagatccagttcgtgcatgctggcggccagacgcatatgcgccttccggtcagcatcggcgccgccgtccaggcgaccgtgatcgaacgtcacctgtcggtgacggcggacgcggcgctggtttcgcatgtcagcgacgtcacggtcggcgagggcagcgaagtgacctggatcatcctgcagcagcagggcggcgacgatacgcatctcggccagatccgcgtcgagcttgccgcgaacgccaagctgaagctgttcgtcatcaatgccggcggccagctggtgcgccaggaactgcatatcaaggtggcgggcgagggtgctgacctgacgctgcgcgggatcaacctgctcggcgccgagacgcataccgacgtgaccatggtgctcggccacaacgtgccgcataccggttccaccgagatcatccgcaacgtcgtcttcgaccgcgccaggggcgtgttccagggcatgatccgggtggcaccggacgcgcagaagaccgacgcgaagatggcgtgcaacacgctgctgatgtccgacgacgccgagttctcggtgaagccggagctcgagatcttcgccgacgacgtgcaatgcggccatggcgccacggttgccgatatcgaccacaaccatctctattatctgatggcgcgtggtatcccggaaaacaaggcgcgcgccatgctcgtcaacgccttcgttgccgagatcgtcgaggaactggaagacgaggccctggtcgaagcgctggaaggcgtgatctcggcctggctcgaaaagcacgcctgatcggacgagatgatggacaagatagtgcccgcaaccgcctatgacgtcgaagccattcgcaaggattttccgatccttgcgaaggaagtgtacggcaagccgctggtctatctcgacaacggcgcctcggcccagaagccgcaggtggtgatcgacgcgatcagccacgcctattccagcgaatacgccaatgtccatcgcggcctgcacttcctgtccaacgccgccaccgaagcctatgaagccgcgcgcgaaaaggtgcgccgcttcctgaacgcgccgtcggtcgacgacatcgtcttcaccaagtcctcgaccgaggcgatcaacacggtcgcctatggctggggcatgccgaatatcggcgagggcgacgagatcgtcatctcgatcatggagcaccactccaacatcgtgccgtggcatttcatccgcgagcggcagggcgccaagctggtctgggtccccgtcgacgacgagggtgccttccacatcgaggacttcgaaaagagcctcaccgagcgcaccaagctggtcgccatcacgcatatgtcgaatgcgctgggcacggtcgttccggtcaaggagatctgccggatcgcgcatgaacgcggcattcctgtcctcatcgatggctcgcagggcgccgtccacatgcctgtcgatgtgcaggatatcgattgcgactggtacgtgatgaccggccacaagctctatggtccctcggggatcggcgtgctctacggcaagaaggatcggctgaaggcgatgcggccgtttcagggcggcggcgagatgatcttcgaggtgaccgaggatgccgtcacctacaacgacccgccgcaccgcttcgaggccggcacgccgccgatcgtgcaggcgatcgggctcggttatgcgctcgactacatggacaagatcggccgcgaggcgatcgcacttcacgaggctgatctgggggcctatgcggccgagcggctgcgcgacatcaattcgctgcgcgtcatcggcaacgcgcccggcaagggcggtattttctccttcgagatcgaggggctgcatgcccacgacgtctcgaccgtgatcgaccgtcgcggcgtcgctgttcgggccggcacgcattgcgccatgccgctcttgaaacgtttcggcgtcacctccacatgccgtgcatccttcggcatgtacaatacccgtgccgaggtagatgccttggccgacgcgctcgagtatgcgcgcaagttctttggctagagctgttccatcttttttcgaatggaagaacagctctggtttgttttgtatacgcaattccggacggaaaaccgcttcgcacttttcctggaattgctttaaggagtggtccgcatgagtttggacgatagcgaacagaagatcgacgtgcgcgaaggcatcgtgcattccagcattccggccgacgaactggcgcgcctcagcgacgacgtcatcatggcgctgaagacggtctacgaccctgaaattcccgctgacatcttcgaactcgggctgatctacaagatcgacatcgaggacgaccggatggtcaagatcatgatgacgctgacagcccccggctgccctgttgccggcgagatgcccggctgggtcgaaaacgccgtcggttccgtcgaaggcgtgtcgggcgtcgaagtggcgatgaccttcgatccgccgtggacgccggatcggatgtcggaagaagcgcaggtgtcggtcggctggtattgatgctcaggccgccgatctgtcgccgggaatgacgggcgcaatgccgatgccgagcgccttcatcactttcatgatggtagcaaattccggattgccctggccgctcagcgccttgtagagcgctgcacggctcattccgatctcgcgtgccagttcgctcatgttgcgggctttggccacgacgccgaggcttttggcgataaaggccgcgtcctgggtttcgaaggcggcggcgatgaactcctcgatcgcttcttcgctgtcgagaaattcggcggcgtcaaagggcagggtctctgtcgtcatcgtgcgtccttccattcccttgcgaggcgcttcgcctcgatgatatcgcgggtttgcgtcgacttgtcgccgccgctaagcagcacgatcagcgtcgagcggtccatcgtgacatagatccggtagcccggtccgtagtcgatgcgcagttcgcttacgccatcgccgaccgccttgatgtcaccgagatgcccggtctcgatgcgcagcagccgcgaagcgatccgggcaacggcgcggcgatctctctgccgtgaaagccatttggcgaaagtcgccgtttgaaccaccgttagcatgaagaatgcatcctgtggagtacacaaatcgatgaaaaagcatttgaaggcaatgatctcggcattcgatattgaagcatcgatcatcgccgcttaaattggaaagaacaagcgccggaccttgaccccggttgcggaaggagaatgggcccatgggctttgcagtcatgagcatgaccgacaccgccgccgcgcgcgtgaaggcgatcgtcgagaattccgggccggaggcgaaggggattcgcgtcggtatcaagaagggtggctgcgcggggatggagtataccatcgacctcgtcaccgaacccaatgccaaggacgacctgatcgagcgcgatggcgcgcgcgtgtggatcgagccgtcggcggttctctatctgcttggcaccgagatgggcttcgagcagacgacgctgcgctccggcttcaccttcaccaatccgaaccagacgtcggcttgcggctgcggcgaatcggtcgaactgaagcccgccgatctggcggcgctcgcggcgcgcggcgatgccgtggtgcctgcgcggtaaagaccgcggcgtcgaccgcaaccgtgcctccattatggcccggtattttctctcgggtattttgtcatgagacatttcgtcttgagcaattcgcaaggggccgccggtttcggcggcttttttcgttgcggcgcgcgccagagcgtttaagacccgccagatgtttctgctgctcctcaagggcgctctcctgggtgtcatcatcaccgcgccgctcgggccgatcggcatgctgtgcatcaaccggacgctggagcgcggcttcctcgccggcttttcctgcggtttcggcacggcgatcggggatgccagctatgcgctggtggccgtcaccggcatcgcggttttcgccgaagccatgtcgatggcgaccttgccgctggcgatcggcggcggattgctgcttctgtttatcggttggcgcgggctgacccatgacccggctcaagcggccgagatcggcgccggcggcctgcttgccaccacggtcgcgaccttcctgctcaccatatccaacccggcgacgatcctctccttcggggcgctgttcgccggcttcggcctgctcgacgagacgaggcgcttcagttcggtcgcgatcgtcggtggcgtctttgcgggctcgctggcctggtggttctgcctcagcggcgcggtcagcctggcgcgtgatcggttgtcggagaatttcaccacgaaggtgatgcgggcgacgagttggctgctgatcgtctttggtgtcgtggcgcttggctcggcggcgtatacgttgcttgggtgaggggtttgcgggttagaggtggctggcgttgtgccggtggccccctcatccccggtgcaactttgttgcacctgaaaccttcgggcaccttctccccgttggggcgaaggggaggttggcgcgagcggcttgccacgaatctcttctccccc

SEQ ID NO: 8 - DNA, 174089 bp, Rhizobium matallidurans
  source 1..174089: mol_type = genomic DNA
cgcgaccagcaaagcggcattttctcggtccagggaaggatggcacgttcatgaccgaaggggagaaaaattgagtgtgtttgggctctttgaccttgctcgcgccgttaaggtctggccgggcgttgtccggtgtcaatcagaacccggtcgccagctagcggaggccgcggaacgagattattgctcaccgcgcgatcgcggatcagccaaactcctatatggtgaaacgagagggcgtaagcagccagtgggcagagatgctggccacctgaaaatcattgctgccgcgcttgtcgcgattgtgaacaatggcgaggaggcgaaggaaaggggcgacaggctcgacagtctcggttcactagagagctcgatcgctgcccatccactgcgttgggcttggcccctctcggttcgaagcaggcctgcctcgcgacccctgacgcaaatgccaccgggactgggccggcgcgggcgttgcgcctcgccgcatttgcgatacttcagggacgcagtcctgatcttgtggaaaagcagggattccgggcgctttcacacttcgatggaatgacaaggctcgatcaaagtggaagggttccttttcttagaaagggaccaacaaatgaccacgaccaatgaaatcgccgacaagattgccgcagcgcatggattgaccaaggttcagggcaagtcaatcgtcgaatctgtctttgccgctatcaccgaggcggcatcgtcgaatgccgaaacatcaattcccggatttggaaagttcaaggtcaaggatacgcctgagcgtgaagcccgcaatccctcaaccggtgcgaccatcaaggtcgcggccgcccggaagttagcctttcaaccggccaaggccctcaaggacgctctcaacaagtaggcacggaccgtagccgcaaacgatccagacggcgggtggaaaggatctaatcgatcccgtagggcgctttggcggaaggcgtctccacctcgctgcctcggtgctttcttgtccttccattggcggtcagaagcatgtccaactcgctccaggaacggctgaagcggctaacaagacgctccgcttgcgcctctgacactccgtacgcgcgagcgacgtcggatgtcgaactgacaaagtcgtcggaattgttcgtcattgcagtgtacgccttgttcagacaggtcgggtgcatgctttactaaggtttgcaaatcatccggcgctgcggcttgttacttcgtaattcagatgtagaacggctttatccgcccgaggttccatcaatatggactgcgtctcaacacggcaccctcactccgcgcattgcaaggcaacgggtcggacagtcgaggattgatcacggttcgactggctttttacccatctcgcgccccggcaaccacgtccgacgccttgcgttgcgcgatctcgaaaaccatttcgctcgtcgctcgaaccttcaccgtggatcgaaaacaccattccacttttccgaaaccctgacccttcggcttgagagagagattttgtcgtccggggtgggggcgttgcgcgcttcaggtcatcgacgaggttgtgaaactcgtttgcggtacgtcgcttgctcgccgagggtcagcatgccgaagtaccggtcgcttgtgaattgtaagcgcccaatcagatcaggtcgctatcccgcttctgcgactcggtctagtcgcgctggtgtaggggcaaggccgacgtgaaaactcgaacctggcaacgcgccttgatccaagtggtgccccggccggcggatacagcgccgccaagaggtggccgagggaatccaggtcgccgcattctggagcgtgcccctttgttaatgccgttgtggtttttaaaggcgctgtgaatttttcacgtcttcgcgacgcgaaaccagttgccgcccttgccgccaagaacatgtccgccatgtctacagtgattatcggagatcgctttttggcctcactgctcgaccccttcctttcacgattcgatctggtcgctcatctgcttgtgctcctggtcgcttatctactggccctcccaatcgcttgggacagggaaagaaacgaacgaagcgctggccttcgaacatttccgcttgtggcgatcgccgcctgcggcttcatccaggccgccgaaactgttacaaacggcaatcccgaggccaccgcgcggatcgtcgagggtttgatcaacggcgtcggcttcattggcggcggtgcaattcttgttggcagggcaagtattcgcggaacagcaaccgccgcgagtctttgggcgaccggggccatcggcgctgccgtgggtcttggcgcttacgacatcgcgatcgtactttccgcgatgaccttcttcacgctccggttcatgacgaacttcaagacggaagtaaatgaagcaatctcggaaactgaagcaagtaaacgcccgcccgacgtcacgccttgatttgtcgctcgtcctaacgtcgcggacacgcaaggtagtccgagccggtcgttttgtctggtgctacctggctcgccataccagatggcggcatcacctgggttccgcgaacgattgaagatccccggtatcgtgcaggtcgatatgggctaccacggcggcgtgccgcgatccacgcatcgtccgcgatcaaaaattcgccatcggagattttccaagactggtcagagccgaggtgaggctgcgagaacgtcctatcgtggaatacggattgatccgcgcggcattagcggcgagtggcgcggtaagccggcccagctcatcccgctcggatcgacgacctccaaaccagttcagcagtcagtcggaccgaatgctgaccgctatcattgccattctcgccgatcgacagccaagcaacagccctcgcggcgatctcggcaactggttgcgcgaatgtcgttaggtcgtaagacagccacgacgcctgctcgatgtcgtcgaaacccgcgatacacatctgatctggaatagagatgccaaactgatgacgcgcggcatccatgaagccgcaagcaagaagatcggtcgcgcagaagacggcatccggccggcggggccgggtgagaaatcgttgcgccagaacacgacccgcttcgtaaccggtccagccatggcgttcgaccgaaacctcgaggccgagcctcgtggccgccgcgacgaagccgcgctcacgccccatcaggcttggtgtcccggcatcggagttggcaaaggcaagtgacttgcagcccgcccttgcaaacgcggtgacgatccgctccccagcttcaaaatcgtcgagatttatctttagcggccccggctcgtcatcatcgcgattgatcagaacaagtctctgcccattcttcaggcatagtctgacgatcgacgcgtcaggtagtcctgataatatgatcgacgcatcggcgcgatagcggatcgcctgtgacagagcacgatccacactgccatccgaacggtcggtgttaatcagcatcgcgacctttcccgcgttttggagcttgcctgtgagctcgcgcaggagtgccgatcgatatggcgtggcaacgtccgacacgattaggcagacaattccgctctggttgcgcatcagtccgcgagcaagctcattgacgtgataccccagtgcctcggccgcgtcggtgaccttctttcttgtctgcgcggagacgctcgcgcctggcgtgaacgtccgagacacggcggaccttgagacgcccgcgcgtcgcgctacttccagcgcgctgatgaagtccttcggcgccatactcccctccaatgctgcacgcgcttgcaaaatcgctcgcgatcgcaaaatccctcttcattgtcagaaattcattgacagtcttttccgccataggcaagctttgcacacgcttgcaaaaggcggcgacgtggaggcgtcgttcacacggaggaaatcatgaattcgataaagctcgccacggccgcgctagcggcaactgccgcgttgtttgccctgcccgtccatgccgctggaaatctcaacgtcatatgctccgccgaccagcaggtctgcgacttgatgaagggtctgttcgaaaagcagacggatatttcggtgaacatggtgcgcctttcggctggcgagacctatgcgaagatccgcgcggaagcgcgcaatcccaagaccgacctttggtgggccgggacgggcgacccccatctgcaggcggctagcgaggggctgacactcgaatacaagtcgccgctattcgaccaattgcaggactgggcaaagaaacaggccgaaagtgcgaatttccgcactgtcggtgtctacgccggtgctctgggctggggatacaatactgagatcttgcagaagaaagggttgaaggagccgaaatgctgggctgatctgctcgatccctcgtacaagggcgaaatccagatcgccaatccgaactcctccggaacgtcctataacacgcttgcgacgcttgttcagatcatgggcgaggacaaggccttcgactatcttgcgaagctcaacgccaacatctcccagtacaccaaatctggctccgcgcctgtgaaggccgcggctcgcggcgagtccaccatcggagttgtcttcatgcatgacgcggtcgctcagaccgtcgagggcttcccgatcaaggcgatcgcgccttgcgaggggacgggctacgaaatcggctcgatgtcaatcgtcaagggcgccaagaacctggaaaatgccaagaagtggtatgattgggcgctgagcgcggatgctcaatcgcacatgaaggacgcgaagtccttccagctgccttcgaacaagtccgccgaggtgccgaaggaggcgcctaggttcgaagacatcaagctgatcgactacgatttcaagaagtacggcgatccagacgtccgcaaggctcttctgtcccgctgggacaaggaaatcggcgccaaggccaactgatcgaatgacgggcaggggccttaaggctcctgcctttccgaccgtcacgaaacgccgcggacaaccgatatgatctctagtaatcgccgtctcgatatcgccattctcatgggtggcgtggccttcctgcttttgccctggtatcgcatcgaaagcggtttctttggcttccaatggctttccggccacttttcggacgcggcaagcgcaccggcgataatcgagattgcacgcttcggacgctggtggctcggcctggtcgccttgctctttattgctggttgtgtagcgcgcttcgttgccagtgcccgaagccgcggccttctactggcagtctgcggcggcgccggactggcgcttctcacacttcagggcctggcgatcaccttttccggctggtcgtgggcggtcagcgaagcagtgtttggcgccttgccggacgggcagccatccatgggggcaggtgccgtcgtcgtaggcattgttttcgtgctgttcttttcgttcggtcttgccgatcgcggcgtcatgaagggcgacgcgtttgtggtcagcgcaatctcgatgctggtggttctggtcgcggttttcgtcttctatccggtcggaagcatgttcattgccgctttccaatccgtcgatggttcgtttgatcccagcggcttcttcaacactattcaagattcgtcggtttggagccttgactgcgtcgtcgggggcgagcgctgtggcgtggcctggcgcacgctgtggctcgcgatcatgacggctagcggagcgacgttgcttggtctttgcttcgcgctcgtcgcaacacgcacacggttccctttcaagcggggactgcggctgttgaccatcctgccgatcatcacgccgccttttgtcgttggtctggcgctgacattgctgttcgggcgcgcgggtgtggtaacgcagttcgcagcatcagctctcggtatcgagccgggccgttggctctacggtctgaccggtatctggatcgcgcaggtcctgtcattcacgccaatctcgttccttgtcctgattggcgtcgtcgaaggtgtcagcccttcgatggaagaagcgtcgcagacgctcagagccgatcgttggcgcaccttctggcgggtttccttgccgttgatgaagcccggtctagccaatgcctttctgatcagcttcatcgaaagcatggcggacttcggcaatccaatggttctcggtgggagccacggtgtcctatccacggagatcttcttcgccgtcgttggatcgcaaaacgatcccgcccgcgccgccgtactcgcgatgatccttttggctttcaccatgacggccttcctcgcccagcgactttggctccagggaaaaagctatgcaacggtcactggtaagggcgattctggagcgcacgccgccttgccgcggggcctctccatcgccgttcattcaatcgtcgttccttgggcgcttttcaccgtcgtggtctatgcgatgatcctcttcggcggcttcgtgcgaacctggggactggataacagcctgaccttccagcactacatcagcgctttttccatcggctggcgcgaggacggcggcatagcctggacgggtgttgcctggaactcgttctggacgaccatggaaatcgcgctgatctccgcgccattgacggccgctgtcggccttctgacggcttatttgatcgtccgcctgaaattcgtcggtcgtggcgtctttgaatttgcgcttatgctgagctttgccattccggggaccgtgatcggcatcagctatatcatggcgttcaacctgccgccgctggagatgacgggcactgcgcttatcctcgtcgcgtgcttcgtcttccgtaacatgccagtcggtgtgcgcggcggcgtggcggccatgagccagctcgacaagagcctcgacgaggcatccctgaccttgcgtgcaaacagcttcagaaccgtcagaaaggtgatcttgccgcttctgcgcccggcgatcaccgcggccctcgtctattccttcgtgcgggcgattacctcgatcagcgccgtgatcttcctggtcagcgccgaatacaacatgtcgacggcctatatcgtcggcctcgtcgaaaacggcgaatatggcgttgcgatcgcctactcgtccgcccttatcgtcgtgatggtcactgtgatcggtggtttccagttgctggtcggcgaacgccgacttcgccgtgagaaccgtgtggcgctcgctgccccgacagccaatccctccctgccgctcaatcaggagaaaaccgcatgagcaagactgtgcccggctccgtcacgttcgaacgagtgagaaagacatttggcgccttcacggccattcccgacctgtcgctcaccatcgaaccgggaacgcttgtcacgcttctcggtccgtcgggatgcggcaagacaacgacgctgcgcatgcttgccggtctcgagcacccctcgtctggacgtattctaatcggcggcaaggacgtcacgatgctgccggcaaacgagcgcgatgtttcgatggtgtttcaaagctacgcgctctttccgcatatgacatcgctcgacaacgtcgcctacggtctggaatcatcaggcatcaagcgcaaggaagcgcgcgaacgcgccaaggaggcgatgaagctcgtcgggctcgacggcatgggcgagcggctgccggccgaattgtcaggtggccagcagcagcgcgttgccgtggcgcgcgccctggtcctggagccgcaggtactgctgctcgacgagccactctccaatctcgacgcacgcttgcgtcgaagggtgcgcaccgaaattcgtgatctgcaacagcgactgggcttcaccgcggtttacgtcacgcatgaccaggacgaggctcttgccgtgtcggaccagatcatcgtgatgaaggatggcgagatcgcgcaacaaggcgcgccacgcgacctttacgatgcgcccgcctccgccttcatcgccgatttcatgggtgaggccaatgtgctggcctgtcaggtcgaaagtgtcgagaacggcatcgcactgatcgacatcgaagggctgaaacaccgcgtcgcggccaggaacgcattggctggcagggccgaactcgccatccggcccaatgcaattcagttgcaccgcacgcccacgaagggtgccttcaccggcaggatcacgcatgccgcctatcttggcgatcatgtcgaatacgaagtcgcgaccagcagggggaacttgttcgtcatcgaccggacggcggattcacccttcgatacgacgaccgaagtcgccatcagtctgaaggatcgcgggatcgcgctgattaccgcaccaagcaaataagaaatcgcaagagggtttgacatgacatcgcattcttcattgggccttgatgctcgcagggcctttgcggaagctatcgcaaggaaggctggcgccctggcattcgggtacttcgaaaaaagagaaagcctggtcatcgaaaccaagcgggatccgcaggacgtggtgtcgatcgctgacagggacgtcgaaaacctcattcgagacgccgttcacgaaacctatcccggtgacggcttcctaggggaggaatatggacttgaagccggcacgtccggcctgacctgggtcgtcgatccaatcgatggaacgagccctttcgtcaatggcatgccgaactggtgcatctcggtcgcgcttctccaggataacatgccggtcgtcggcgttatcttcgcaccatgccacggcgaactatactccgcggctgctggatccggagccacgttggacggacaatcgctgtcgcttgatccttcacgtaacatccgcaattccgtgaccggcatcggcgccaacaaccatgtcacgccggcattcgtcgccgcgatggtggagaagctcttgtccgccggcggcaacttcattcgaaatggatctggcgcgctaatgcttgcctatgtcgctgccggccgtctcgtgggctattacgaaccttacatgcatgcctgggactgcctggccggttattgcctcgtgaaggaggccggcggctggtaccacccattcccgaccgacggagaccgattgaccaagggggcgcctgttcttgcggcagcacccggtgccgtcgaggatcttcgcgctatcgccggaatttgacaacgcacgattgccgatatctggacagatcgccgcgcggcgttatttgtgacaggaaaccaatttgaagccggctactggctttgacagatgtgcggcgtggctgacggggaggtcggccgcgccacgcaggcgcaatgtgcgcgaattgacccaaagggaggaaatatgtttcgtcatccaatcgcgatcggctttgccgcggcccttctttcaagcacgattgccggcagtgcgtttgccgcaacggagttgcagtggtggcatgccatgtcaggcgccaacaacgaggtcgtcgaccagctcgccaaggaattcaacgagagccaggccgattacaagatcgttccggtgttcaagggcacctatcccgaggcactgaacgccggcatcgcagccttccgcgccaagaaatcaccggccatccttcaggtcttcgacgcgggcagcggcgtgatgatgggcgccgaaggggccatcatgccggtcgccgaagtcctcgagaagggcgggtacaaattcagcaaggacgaatatctgccgggtatcgcggcctactattccaagccggacggcacgatgctgtcgttcccctataactcttcctcgccgattctctattacaacaaggacctgttcaagaaggccggacttgatccagaggccgcgccaaagacgtggcccgaggtcatcgaggccgccaagaaaatcaaggcaagcggcgctgcctgcggtctgacgtcgacttggctcacctggattcagacagagaacttcgccgcatggaacaatctctcttacggcagcaacgaaaacggcttggcgggtacggacgtcaaactcgcgttcaacacgcctgacttcgtcaagcactttcaggatatcgccgatctcgccaaggacggtacgtttcgctatggcggtcgcacgtctgaagccaagcaactcttcacgtcgggcgagtgcgctatcctgacggaatcgtccggcggcctgggcgatatcgtcaaaagcggcatgaactacggaattgggcaattgccttacgaaccgggggagggccgcccgcaaaacaccattcccggcggcgcaagcctttgggtcttcgctggcaagagcgacgccgagtacaagggtatcgccgagttcttccatttcctgtcgcagaccaagatccaggcgcgccttcatcaggtgtcgggctacatgcctgtgaccatggctgcctatgaggagacgaagaagtcaggcttctacgagaagaacccgggtcgcgagaccccgatcctgcagatgatgggcaaggtgccgacggagaactccaagggtgttcgtctcgtcaacctgccgcaggttcgcgacatcatgaacgaggagttcgaagcgatgctcgcgggcaagcaggatgccaaggccgctctcgataaggctgtcgagcgaggcaacgcggccatccagcaggcgatcgcccagtaagcttgatctattgatcatccgtgctcacgggcgcggatgatcacctcgcttcgctcaagggggtctccgcgtgcaaaatgtcgtcttcccgaataaagtccttccctattttctgttggcgccgcagatcgttctgacggtcgtgtttttcttctggccggccagtcaggcgctttatcaatccatgcagcgggaagacccgttcgggctaaaaagtggatttgtcggcctggcgaactttcgcaggatcctgagcgatccaagctacattcattcgcttcaggtgacagtcgtgttcagtgtggcgaccgcggggctggcgatgatcgtggcattgacgcttgcaaccgccgtcgatcgtataaggcggggacagacattctatcgcactctgttgatctggccttacgccgtggctcccgcggtcgcgggaatgttgtggctcttcatgttcaatccggcgatgggaagcttcgcctatatgctgcggcgggctggatttgcctgggatccgctcttgaacggcgggcaggccatggtcttggtcattgtcgcggccgcatggaagcagattagctacaacttcctgtttttcgtcgccggccttcaggcgatcccgaaatcattgatcgaagcggcatccatcgatggcgcgcgcgggagccgtcggttctggacgatcgtgtttccattgctggcgccgaccacgttctttctgctcgtcgtcaacacggtctacgccttcttcgacacgttcgggatcattcatgccgtgactggtggaggacctgccaaggcgaccgagacattggtctacaaggtctacaatgacggtttcgtcaatttggatctcggctcatccgctgcccaatccgtcgtcttgatgatcatcgtgattgcgctgaccgccgtgcagtttcgcttcgtcgaacgccgcgtccactacgcttgaggtttgagatgatcgaccggcgccccattgcaagtatcacaggccatctgatcctcgtgctcgggatcatcattgtagccttcccgatctactacacgttcgtcgcatcgacgatgacgtcggcgcagatactgcgcccaccaatcaccatgctgccgcaaggccatttcgcggagaattacggcgacgccctggtcggtggggtcgagagggtcgtcggagtcagcctcgagcggatgatgttcaacacgattgtcgtcgcggccctgatcgccatcggcaagattatcatttccttcctgtcggctttcgcgatcgtgttcttccgctttccgctgcggatggtgttcttctggatgattttcgtgacgctgatgttgcccgtggaggtccgcatcctgccgacatacaaggtcatcgtcgatctgggcatgatcgacacctatgcggggctgacccttccattgatggcatcggcgactgcgacgttcctgtttcggcagttcttcctcacgatacccggcgaattggtggaggccgcccgtatcgacaatgcagggccgttccgtttcatgcgcgatatcctgcttccgctttcacgcaccaacctggcggcgcttttcgtcattctcttcatttacggctggacgcagtatctctggccgctgcttgtgaccaacgacgcgagcatgtcgacgatcatcatcggactgcgcaaaatggtcgatttcgccgacgcggcgacgccttggaacctcgtcatggtcaccgcaattcttgcaatcattcccccgatcctcgttgtcgtcttgatgcagcgctggttcgtgaagggcctcgtggagacagagaagtaatggcaagcatcacgatcagggacgttcgcaagacatatgcaggtggcttcgaggcgataaagggaatctcgctcgacatcgccgacggtgagatggtggtcctcgtcggaccgtccggatgtgggaaatccacgctcctgcggatgatcgcgggattggaagcgatctcctccggagaaatcgcgatcgacgggcgcgttgtcaacgctttggaaccatccgagcgggatatcgcgatggtttttcaaaactacgcgctttatccgcacatgaccgtcaggcagaacatgtcctatggtctgaaaaaccgaggaatggctgcggccgagatcgaacgacggattgctgccgcggcgtcttcgctggagattggttccctgctcgagcgcaagccacgccagctgtcgggcggccagaggcagcgcgtcgcgatgggcagggcaatcgtgcgcgagccgaaggcatttctgttcgacgagccgttgtccaatctcgatgcgaagctgcgtgtgcagatgcgggtggagatccgcaagctgcagcgcacgctgtcgacgacaagcgtctacgtgacccatgatcagatggaggccatgacgctcgccgatcgtctggtcgtgctgaacggcgggaagattgagcaggtcggcacgccgatcgaactttacgagcggccagccacgaccttcgtggcggcgttcataggttcgccagcgatgaatttgattagcgccgaagcgctcgccgttgatgcccccggggtatcgctcgcgcctaacgtgtcgacgatcggaattcgccctgaggacttgaacgtcgcggacactctatcgagttccatgttgggtctggctgtagacattggcgccatcgaactcgtcggcgcggaaagctatgtccacgccacgaccatcgggggcgtggagatcattttccgaacggcgggtcgttcaatgatgacaataggcagccgagtgatccttcaagctggaacaagcgctgtgcatttcttcgatcgtcatgggcttcgcgtcgcgacacctgtcggattgtcatgacctgaaaccatcgcgtcggggtgtttggcatcaacggcacgatccatacgcgaagctttatcgcgcaccaggaggtcgcggctagcgcccccggtgaacagcctgcatgggaaacatggcgagaaggatgatggagactaaatctggacgaatcacgccgaaggtatgctcatgcaattggttcagcggatacttgtgaccacaggtgggcccggtttttcccaagagatggccgacgaggaatgagggaccgcgcggtccgcggccgcggagcacgggaagaggcgggtgtgcgtggagccgttagccttcaatccatggaccgccacacttatctgaatagtcgctaacggcgatgtcgcgcccgtcatcttcgacgtgtatcaggtcgaagtcagcgcggtgcgggagcgtatcaaggaactggaccagaggacctttaaccggggcccccctcaaggcagcgaggcgcgtcgaaggggttgaaccaaaaccgctcctggttgctcttcgaccatgctggtcaagacggtcggccacattaaaagcccccggacgcggcaaatcggagtggaccacgcaaatgcgttgtgtcaatccgcccaatcgaacttgccatgcattggggagtagtttctcacaaaatatgctgcttcctcctccagattggagatcagctctttatattcgtcaatttgtgatcgtggcgcgtgacgtgctgtcaaggcattgagatgaatgacagcaagactgtagctttcgaaaagatcggagaagccaggctgtgtaccccgcacttctcgtatctcgggaattctcattgcaagtagtgctcgaccatgcaccacgtgattaatacggtcccgaagcatatcctctcacctgtctctcagctaatcacaagcccatgttagtcgaaaatgtcatgtcagtcgatgatttggtcgggccgtgcgtcactatctcgctaaggcggccatcacgacacgccccgccatctcatcccaggtaaaatgaagccatggtagtcgagggaggcggccggaagcagctgtgcttcacggcggagagcttccacggtcgcggctcaccgtcaaagccgccacgcgaggtctaatgcacggaggtgatcctctcgatggcgtggcggatgaatgcgagaggctatcgccattccggcgcgccgagccgccaccatgagccagccttcaccaatgaacaaaccagaattgagccgtgaatctgataatctggggctcatcatgtgtcagtctcgtttttgaagctttgctctggttacccctgcggcatgtccttcggcgtgaaggtggctcatcccgattattccgcgttaggtaccctggcgcttgcccttcggtttaaagtcaacgagcaaagatttcagttccaactcgcgcacgcgtcgcgcggcttcgtccggctcgacccaagcaagtcgacgttgtcccttctccttgaactcgtcttgctgaaccgtaacctctatctggaaaaggtcaacgattgttggaacgacatcaccgtcgtcgaggaatttcaggtaagtgtagcgtccgaccgcggctttacggacggtaccccgaaccccggcttcctcccaagcctcgatcgcggcggcctcgtggggctttttcttcttcattggccagcccttgggcacaacccaacggcccgtatcccgcgacgagatgatcagaacctcgatcttcgatgtcacgccgacgtaacggaaacagacggcgccatattgctgccggaacgcgcccgtgaaaagcttttccggttcgtcggcgagttgcgccaatagcgatcggcgcttccttgggctatcagtgctctgtttcttacctggcatatggatcatccgtgcaacgccacacgctagcggccccggaagatgatatatagggcagacgctccgtctacgcgacgtgggggacgcaatccacaggattgaaatcaatcatggtcgcgagacgtgtggtggatcatgctacttactctttggaatcgaagaggccaggtgcgactgggcgctcaccttgtcgcgatgaagtcatgtcgaggcgccgccggcggaccgcgtccagcgccggcgaagtggtgacgccggccgcggcggtcgataattgcctcacggaccgtgcactcaccgggtgcgccctagcgatgcgcctggtcacccattggcctgaagcgatcgcccggcggtgcccaattttctcgcgtaagaacattgcgaagtatccggtggggcaaaagcgcccgtctaagcgtccgcggttattgtcgaaatagtcgcaattatccgcctctcaacgtccaatcagctggccattaacccacccaagccgggccgcgctaggcttcgtcagaatgttcgtgcggctatcggggtgggtggtcgtggaaagcgcaacccggcgttgctattatgtcacgctgctttcgttatcgtcgtgggtgggtggaatgccgctaaatcttctctacttgcgaaacctgaagcccacgaactcctcgtggcgcgtaagtctgggttcgcaatgaaaatttcagctcttgttctcaccgctcttatttcctccccgtcctcgctccttgcggcggacctggtggctcccgttgagcaaccggctgttgcgcggtcggtatccggtttttacattggttcgctctcgtccgtgaacttcctggatgatactagttttggtgtcggcggcacgactgttgaaactgattatgatgtcggcttctatagcgccatccgcgctggctatgactttggagcatacggttttgtttcgccgcgcgtggaattggaactgggctacggcacggcttcggtcgacgagcatagtatcgctggcgtaggtctcggcggcatcaactcttttggcgatgcccgttcgatccaaggttacgtgaatggataccttgatattccgctggccgcagacggagctttaagcgccatcaccccgtatgttggcggcggtgccggcttcatgaacctcgaccttcgcaagcagggagtagcgggtgttgcaacgttgatggacgacagtgacacagcattcgcctatcacctggatgcgggtgtcgggatcaatctgcaggctatcgggctattttccgatgtctctcttttcgataacacgaccctcgacattggatacaggttcacggccgcggataattttgatttcacttcgcaagcgggtacctcatcgagcacggatttccgcagcaacgctgtgacgttcggctttcgcaagagtttctgatgacgtgggcgcagcgctgggacccacgctgcgccaccgaaatgtccgtcattatgtggtgctggctcggctcatggtgcgtcatttccccagcgggccacctgataaaaccaacactggcacgcgcaagcagccggggcagttgccgcgagtcgttggttgaagagagacgtcggcgtgacgccattgccgatcggcaacgcatgctccgaccgcattctgaaagccgcgtgccgttcggcaactcggctccacgcgcgatgtcgcgctcttggcaagcaagtgttgtatcaagagacacgactgctcggccggcgttggaagcgtccaaacccggctgatcgcctacatcgaaattctgacaatctgcccgtgatgcgtggtaatgcggcaagcctgaggataatcggtcgagcgttgcccttcacaatgccctgtccatcgttacgtgccatggcttgacagggttggccgcgcgttcctgaaaatcggttgtgacaaagcttttctccccatggttgatcggtgggtcggcggacctatctccactccatcccgcatgaggaggaaccgttgtggttgtcgaaagaaaactgatctcgaaaattacctggcgcatgatgccgtttctcggcctactttacctgatcgcctacatcgatcgtcaaaacgtgagcttcgccaagctggaaatggttgatgcgctaggcatgagcgaatacgcatacggcctaggcgcatcactgtttttcattggctatttcatcttcgaggttcctagcaaccttctcttggatcggttcggcgcgagcaagtggtttgccaggattttgatttcgtggggtctcgtcaccatcgcgttggcctacacgcagaacgccaccatgttttacatactacgcttccttctcggggcatgcgaggccggcttctttccgggcgtgctgtaccttctgaccctttggtacccgtcagcatatcgagggagaatggtagggttgttcatgatcttttcagccgtggcaaacgcggtaggcgcaccattgggcggcgcgctgcttgatctggacggcctttatggccacgcgggctggcagtgggttttcctcgcgaccggcatccccgccgtcatcgccgggttcgtcaccctgttctacctctctgataggccagagcaggcaaagttcctcagtcttcaggaaaaaggctggctgaaggatcgattggcttcggaaaattcgggcatggaagcgaacgccggcaacggttttaaagccctaatcaacccacgcgttttgttgatgtcggcttgctatatcgggtttccgctcgcggcctacggtctaagctattggctgcccacgatcgtcaagggcttcggcgtgagcaacacggccaacggctttctcaacatcatcccgtgggttcttgtcgggatcgcgctctacgtgatccccgcgcaggcggataaggctcccgccaaaacgccgtatatcgtcattcccgcggcgattggagcaatctgcttggtcctctccgccattatctccaaccatatcatgcaattcaccttcttgagcatcgctgctgcgggaatattcgctggccagcctgtcttttggagccttccatcacgctttctcaagggcgctggcgccgccgcgggtcttgcggcaatcaactcggtgggcaaccttggaggtttcgtcgcgcaaaacgtagtgccgtggatcaaggattcgacaggcagcactatcgcgcccatgttcttcctcgcggcgtgcctggcgctcgcggctcttctggttctcgtcattggtcgcatgataccccgggttccaaatacggacacggctcgcgggaatatgggagtttcggattgcgttcgatagtcgtgcccgagaacactcgtggtaccatcaatacgccccgggcgctcgtccgtccaccggcgtcaaggcggtcatcggccgccgcttctcaccgagtcaggctggacacctatcgatgacacaagaatggttgttccctcggcctgaccttgatgggggcattgttgggcttgctgagcttccacccgcgccggaaatcgggggggcgtcattcggcgggggctatttcagacgtagccttgatgctcgccgaatggaacattttcactgaggttccccttgccaattcgctcgctttcgcctgacaaatgactgtctgactgcttggcctctcgagctcggtcttcaggtgaaggatgagacagatggcctgaaggtaattcctcatccccgaggttttgttggcgaccttcgttgttcttgtgctccaagctgggagtgatcgcggattgtctctcagctacccatgctacatccggttccgcgagcgagatactgcgatcgacccgtgtcgggtttgacggtgcggtggacgatactgaggaaagccgctcaaccaatttggattttccttgctcaagatcctaggtagtgaatgcgccgcgaaccgcaagcccacaagtataccaacgtaggatcgccaattcgcctcgggggcggccgggcctgtttcggtgtgcctacgatctcaacattcacaatgaaaagcgcgccagaaggaagtctgggtaggcgctagaccgctcagcaatcctcgcgagttcgtcctcgctctggccagccaggatacccgttcccactaggactgagcctagacctgcgatgttcgctccaaggatgtcgtgctcaatgctgtctccgatacagacaacgcggttctgctcatctattgcagctactttgagggcatactcgtagatttcgggaaatggctttccaacccagcgcacgctcccgcccagttcctcgtagagttttgcaatgctcccggctccgggcgcgatccggccctcatgtagcttgtggatgtctggattggtgcagaagcatgggatgccgtttaccgcggctgggagcagcatcttccgatactcatccattgagatccgctcggcctcgctgcccgaaataataacgatatcagcgccgcgcgcggcaccggtggacgcaagcccgagacgatccgctaggtcggtgtctcctccgctggaaaccgtgaaacaccgtgcggatttcgcgacacctgatccctcttttgagaggaggtcaaacgcgacatcgccggaggtcacgaagcgttcgaagctttccgccgcgaagccaagtctgaccagtctctcgctgttgtaatctccgctccgcccggagttcgaaagaacgatcgcgcgctttccttgcgaggcaagccacgacaatgctttgacagccccttcataaggcccgatgtcgtcgcgcaggacgccaaactgatcaatcagaaatacgtcgtacgtccgcgtcaatgccgcaaggtcggtttttgtcgggttaaacatgctggtccctgttggctagaacaagggtagcgatccccacagcggcctcaaccgatttcgctggtagtggctcgagcccgatcgcccgggctctcattgccgtccaggccgggttttgtgcgccgccgcccaccgtgcgtagggttcttagggcgggggaaccaagttcacgcaagcgatcgtaacccaggcgctctatctcggtcattccctccaggagaccttggaaaaacgccgcgtcgtccgcgggtcgcggctcaaggcgcggcagatagtgcggatcattgatcggaaagcgctcacccggcctaaggagtgggtaatatcccaaacctagcggctgattagggtcaatcgcggtcgtcagggccgtcagccggtcgtcacctatcaacgcacggagcacgtttccaccactgttcgatgcgccgcccaccagccagaaattgcccacccggtgtgaatagaccccgaactctggcgcattgatcggttgatcggacgctaactttaatacgatcgtcgaaccaagagcggtgaccgcatccccgacggctgaagcgcccgtggcaaggaaggatgcacatccatcggtggtgcccgcgtggtaccatgccgaagcggggacacccagttgactgagatatcctgatacttgggcaattcgcgcgccggcgcggtaaaccctgggcaagctagcgatgtccatgcccgccgcttcgatccacgccggccatttctggctttcgagatcaaaacctgatttgagcgcgttgttttcatcactgggccgtcctgggcatcccagcttcataaggatccagtccgcctggtgcacgatggcgtcaacctcgcggtcatgggacaggtaaatagcgcgcgccaagcctgagttcgcgccgacggccgtcgcgccgtcgggcgcatgtcgcgatatacgggccacgacgtccgcatcggggcacggctcgttgtacatcagcgctgatccggtggcttcgcccgaagcgtttagcgacaagaccgttccagacgtcccgtcgacggcgacgccctcgaccccatgaaggtcgattgtcgcggtgagttgttccatcgcttctttcactcgccgccaccaagccgcagggtcacgcagttcgtcattggatctgaacggcgatgcggcaaacgctactggagtgccgtcaatgtcgatggcggccgcgcgagcgcccgatgttccgatatcaattccaatggcgacagctgatccagcattcttggtcacgctgtttgcctcgccgattcacgatcgagcgcctgtcgatattgctcggcctcccagttcatcagctcgtattcatcgctttcggacaggtagaccacattgctttcactggggatgcggccaaccacctcggccaagcagcgtgccatcacttcaccgccagcggtcaatgagctcgacaatagaacgcctttgtctgggacaatcaacatcttcggtacgtcccgaccctcgttgtgcaaggcagcttggaaatctgccgcgctttggccgtcctgcagcacgccgatctcggttccgaggaagatcacatggtcgggatacagggatccccccaaggcgattgcccggttgacctcggacaatgcgaccgcatgactgtcgtggtctcgcgcaggatggaatccggatccttcggcaatagcgtcgagtgtcgcgagatcggggctgatcgtctcgcgtgtgccttgagccagtgctttcgtaacgcgttcaatcctgtccgcaacttcctcgagggtgtcaccacatacgatgatcccgtgattgaacagaatcaagacatccggtcgagacgcagccgccttttcgatttccctcgccaacggggttccggggcgtcggtaggggatggtcacccatgtgaggtccgcaacggtccgcatccgatgcgccaactcaatgtcgcggtcctcaagaactgcgagtgcgatggcattgacacagtgatagtgcgcaacgacggggttttcgagcgctgcgtggaagcttgtctcgatggaaggcctgagcccgctcgagtttagctcgcttactatgaaatccgttgatttttccgcgcgcgggtctccgtcgcgcagtgcagagacgagccggtccacaaccactggaaccatgatgtcctcggcctcggctttggcgagccaagtgccagaagccttcacccacatgacaccatcatcttttatcgacgtgtttccaccagcgccttgggtcttcaggatgtcgcttccgatctcgctggaaagccggaggaaccccttgaacacgttcgtttcccttaggtctggtcgatccatgaatgcctcctcctgacgattgtcgcccagtgatgagcgaactctggcgcaaccatataaatgtgatcgaatatcgtcaacggtgaagattttacatctttgtatgttgcgattgctgatggtgtgtgattatagttcgtcatcgacgttagggagaaacgtcaatggaggcatatagttgaacgattccgatcgccatcgcctgatcacggagatgcttcaagagaggccgttcgcatccgtgcgcgacctgcaggagcggctcggtgtttctccggcaacgatacgacgtgacatcgacaagctcgatgaaatcggcgtcgcccgaaaagtatacggtggtatctccgcgaacgagtcggctgcttctggtcgcctgtcggcacggccatacgatgagaatcgcgacatcgcggttgatgccaagcgcgctattgccgagaaagctgcgagcctcgtgcgggacggagactcgatcatcgttcacgcgggttcaacatgctaccagttgggactgcagttggcccggcgcaatgtccgcctctatacgaattccatgccgcttgctgcctatctaggtgagcatggcacttgcagccttctcctggctggcggcgttctatatagagagccgggtatcattcacgatgcgtcggctggcgcgccggacttcttcgcctcccgcttcttcctcggcacgcagggtattagcggcgaagggctcttagagtcgcatccccttttgaccaaggcgatcggtgaactgagcagttgcgcggacgagatcgtcttgctggcggatagccggaagctttccattcagccgcgcaaccttgtactgccgctttcgcgtattgggacgatcgtcaccgatgacggcttgtcggatgccggcgcgaaaatgctcgaagacgcggggatcaccatcatgatcgcggcggtcggggggcagggatgacgtctggaagcgccgtggctgtcttcgatttaggcaagacgaactcgaagctgttcgtgttcggcgcggatggatcggtcctcgcggaattaaggacaaagccagcctggatcgagcgcgacggaattcgtgtgctcgacgatgaagcgctttttggatggatgacaagctcactcctgaatgctgtcgaggatcacgcggtcgggcacgtcatgttctcaggacatggttgtaccttcgcgctcgtccaagatgaccatctgacgcatccgatcctcgactatgagcaagagccaccagagatgcttaggcagcgcatcgatatgttggctccagttttcagtgagacctactcgcccaaactccctctcgggttcaactacggccggcacattctctggttggaggcggccaagccggaaagcctggggagggccgacgcgatcctggcatatccgcaatactggtcctggaaattttccggcggcaaggtgtcggaagtctcctacatcggttgccactctcatctctgggcacctctgaacgaggactttagtagcttggtagatcgtcagggctggcgagaaaagatgccggcgtttgtacgcgcgggtgctgctatcggaaattggcgaagcccgctccaaggtggtaaccgcgccgaagtccaagtccataatggcgttcacgacagcaattcggcgctttactattatcgctcggttgggttcgacgacttcacgctcgtgtcaaccggtacatgggtcgtcatcttcaatgcggcttgcccgttggatgccctcgatgagcatcgtgacatgctggccaatgttaccgtcgatggaaaagctgcccctacaatccgtttcatgggcggaagagagtacgagcttgcgagcggcggttggaataagcccgttagtgttgatgcactgtcgcaagtgattgcaaagggcgtcttcggtctgccgtcttttgccccaggtggtccgatgcaggggttcaacggccgcttcgtagggccgcttgtcgagggtgaggagcgggcagctgccgcacttctctacgtcaccttgatgacagacttgtgcctcgatctgataaggtcggaaaattcgatcgtcattgacggcggcctggtgaaaacaggtttgtttgccgagcttctcgctgagctccgaccctcgcaggacgtctactcaagcgcgaccgctgagggaagcgcattcggggccgccgcgctcgtcttcgaaaccgtcgggcaatttccattcagaaatgaaacgacacgggcagaaccaatgcccctcttcgggcttgaggcctatcgcaaagcttggcgatcattgatcgagatcgaagaggcagaggtggtccggccacgcaaggagtttcacgcatgacaactggagggaacacggatcgcgctcctgtgcttgagatgcgcgacatcagcaagactttcgggagcaccaaggctctgaccaaggtgtcgctcacggtctacccgggagaagttcatgctctgatgggggaaaatggcgctgggaagtcaacgcttatgaaggtcctgtccggcgcttatacggctgatccaggtggcgctgttctcgtggatggcaagccgatcgtggcaggagatccgattaaggccaaggcaaacggtatctcggtaatctatcaggaattgtcgctcgcccctaacctcaccgttgcccagaacatgtttctcggaaccgaaccttctcgctatggtgtcgtggacaaagctgaggcccgcagtcgtgttgagccaatcctcaagcagctcggcatctcattcgggccgtcgcaacttgtcgccgctctctctttgggtgagcgccaaatggtcgagatcgcacgtgctttgacgaccaacgcgaagatcatcgtgatggatgaaccgacgacctcactgacgtcgagggaaaccgaacgcttgtttgaggtaatcgccggcctgaaggcgcgggggattgctatcatctatatcagccatcgcatggaagagatctacgcgctagctgaccgggtgagcgtgctgcgcgatagcgcgtatgtcggcacgcttgatcgcaatgatttgtccgccgaaaagctcgtggcaatgatggtgggtcgcgatctgtcgtccttctacaaaaaggaacaccgtgcacctctacaggcggccaagactgtcttggccgtcaaggacataggcgatggtcgccgcgtgcatggctgctccttcgatgcaaaggctggcgaggtcttgggtatcgctggccttgtcggctcaggtcgaaccgagctcgcgcggcttatttttggagcggacagcaagacatctggaacagtgaccctcgacgggcgagagctaaccatcggtggaccacgtgacgccatggatgccgggattgcttacctgaccgaggatcgaaaggggcttgggctcttcctcgatttgacgattaacgagaacatcaacatcggcgttatcggcaaggatgcgggtcgcggaggcatactgaacttcgctgctgcaaaggagcgtgccacccgggctatcaagtcactctccattcgtacgctgagcgcaagcattaacgtcggagcgttatcgggtggcaaccagcagaaggctcttatcgcgcgtcttctcgagaccaaacccagggtcatcatctttgatgagccgacgcgtggcgtcgacgtaggtgccaagtcggaaatctaccggattatcgacgaactcgcgcaaagcgggatcgccatcgtggtgatttcgagcgacctgcccgagatcatcggcattgccgaccgtgtgcttgtcatgcgcgaaggcctaatcgctggcgaggtacatgcatcgcccgatcacccgattagccaagaggccgttatggccttctccacgggatcggcatccaaggtagcctgaggcctgaaaccatagacaacgggattacatcatgacctccacatcgaccgatcacacaaacgccagcaaggcaaaattcaggtcgacattgaccgcgctggggatgctgccggtgctggtcattctggcactcggctttcatctcttgagcggccgtttcctcagcgtgaacaacctttcgattgtcacccagcaggcctcgatcaacacggtgcttgccgcgggcatgacattcgtcatcttgaccggcggtatcgacttgtcggtcggctcgatcctggcggcctccgcgatggtcggtgtcatcgtttcgctttatcccgaagtcgggatgctgggtatcccggcggcgatcggcgtggggctggcatgtggcgtggtcaacggtgtcatcatctcgttcctcaagctgccaccatttatcgtgacgctcggctcgttgacggcgatgcgtggcatagcccgattactcggcaacgacacgacggtcttcaacgccgacctcccgtttgatttcatcggcaacggctctcttttcgggatcccatggctcgcgatcatcgcgctcgccaccattgtaatctcctggttcattctgaagcggaccgtactaggcacttggatctacgcagtgggcggcaacgtcgaagccgcacggttgacgggcatcaaggtgccactcgtcctactcttcgtctactcgatgtctgggcttctctcgggcgtcggtggagtgatgtccgcggcccgtctttatgcggcaaatggtctgcagctcggtcaggcttacgaactggacgcgatcgcagcggttatccttgggggtaccagcttcgtcggtggtgtcggctcgatatggggcacgctgatcggggctctgattatcgcggttctgtccaacggtctcatcctcgtcggggtctccgacatctggcaatacatcatcaagggacttgtcatcatcgtcgccgtggcgctcgaccgctatcggctgaaagggcttagccgcacatgaggtgtggctcaagaaaccgggattaccggagcaatggcgcggggagcgccaaaatggaggaaagtatgcgtctgttttctaaactgctcgtcggtaccgcgctcgcggctgccgttgcaatgcccgcctctgccaaggaacttcagaagatcggcatctcggtcggtcttctcggcaacccgttcttcgtcgccacgatcaagggcatcgaagaccgcgccaaggaaatcaacccgaatgtccaggtaacttccgtctcagcggactacgacctcaataagcaggtctcgcagatggatagcttcgtcgcggctggcgtcgacatcatcatgctaaacgccgtcgacgccaaggcgatcgcgccagctgtaaagaaggcgcaggcagcaggtgtgatcgtcgcggcattcgacgtttcggcgcccggcgctgacgtcaccgtaatgacgaacaacatcaaggcaggcgaggaagcctgcaagtacatcgtcgaccagctcaagggcaaaggcgacgtcgtcatcatcaacggcccagcatcgtcttcgatcatcgaccgcgtccagggttgcaagaacgtcctgacgcagagcccagacatcaagatcctttcagacgaccagaacgcgcagggttcgcgcgacggtggcctggccgtcatgcagggccttctgacccggtttgacaagatcgacgctgtcttcgcgatcaacgatccgacagcgatcggtgcagaacttgcggccaagcagctgaaccggaacgagttcttcttcactgccgttgacggcgcgccggatatcgaaaaggcgcttgccagcggaaactcgatgatcaaggcatcggcttcccaggacccttacactatggcgggcgactcgctgaagatggcagtcgacttgttcaacgggaagaagccagcagaggctaccgtcctcctcgatcctcagctgatcacggcggacaacatcaaggactacaagggctggaccgcggctcgttaagatctcctcacggtgccccgccggaacgtccggctttcggcggggctcattctacaatgaaatcaggaaattgatgtcatgtccaaaatcggtgtccactcgtttgtctggagtgcggggtcttcaaaagacgagatcgagaggaccctcgcgcggtcccaagagcttggtttcaaactggtggaattttcctacctagacccacagcaggtcgatgttaagtggcttgcgtcccgcattcgggaacttggcctcgatgtcgcggtaagcatggggctgcccgcagatggtgatatttccagcgacgatccgtcgattgttgccaacggtgaagcgattctcgatcgcgccgtggcgctcgtccgcgatcttggcggcaccaagctggcaggcatattgagctcggctcacgggaaacaagaacgctcgctgtctcgaaagggatggaaccagagcgttggtacgctttctaaagtggctgatcgtgcaaaggccgcgggcgtgaccctgaaccttgagatcgtcaatcggttcgagagcaacatgctcaataccgcggcgcagggcttggaatacattcgcgacaccggcgcatcaaacgtcttcctgcacctggatacgtttcatatgagtatcgaggaggcagatgttggcctcgcaatccgaaacgccgcggaaaagatcggttacgttcatatcggggaaagtcatcgcggctatctgggaaccggtaacatcgattttgcctcgatattcgacgctctcgttgcgattggttggaacgactttgtcacgttcgaatcgttttcgacgaccatcgtcgacaaagacctgtcgctgaagaccgcgatctggagaaatctatgggatgacaacgtcgccctggcaaaacatgcgctcgcgtttatcgaactgggactggagacggcgcggctcaaggctgacttggtaagggcagcacatttgccgattgcgtaagagcaatttgggagtgctcttcttaagcttaaggtcgacgcatctcttcaaggaggtgaagagagcgtgaaatgctacacgattcctttatgaccacatggacttccggaaaccacaatgaaaggtcgccaagggaaccctttcgagaatcagaaggcctgtccgcgccggtgagcagttttgtcgagaccatcgttgggaagatgccgaacagccttccaaaccccattattcatgctgaccagcaacaaggtcggggagcccattgcaaccgataattatgctccatgtcgctttgcgtcgagcatcaattggccgcccttggggcttcgcgctcgacaatttgggcgggtggtcccaattagtgccgtgcgagcttcacggcgttttggtaaatttcagtcagccgcgtccgctcggtcgcggtcaggagaagggcgcaggcaaatttccgcgcgaggtggggattggacgcccggcatctcgtaccggcaggtatcgggcgtaccttgatcctttcaccgaggccaatgtgatactggcttaaggtcaatcccgccttgaccagcaacgcccgaatatcgggtcgatcttccgccgcgatcacgcgcgtgaatgcctctatcaggacgggtttaggaataggaagttcgatctcgtcaacgaggtcgttaccgatgctattgtcgcggacgaaccgcacgaattccgacaccgcgtcattggccgcgtccaaggcgatggcatggcggctttccggcggcgtttgtgagaggaatggtccttcgtaaagcattttgaactcctggtttttctccaaacgccggagtttcggattggttcaccacgttcgcggcaatcgtttcgcttgaccctggttgcaagcgatcaccggtgaccctcatgcttgagcgtggaaacgatgacaaaccagagcggtcttcctcgccggtccgacgtaaatgccaacgcatcctttcgtcaaaaaataccgggcgagttaggccatggaacggtgggttgggtcgggtggaccgtcgccacaccttcgagaggggagacctgaaatggatacgcgcggaactcaccgcgacaatccgtattgttccttgacggcaaaaggagcaacgcgatgcagcttatccgatacacacgtcagcaacgctgcggatggaagggtgaccgtggaattcaggggagaaggccgagaagtggtttcagtgacgatggcaggcggcgacgggggccttgacggcgaccacgcggttcttcgcgcgagggagatgattgtccagctaacggcattcgatgacgttggtcagacgcaaggcgtggtgccaccaagtggccggatgacgccggggaaccattcggacgcggagcccatccccagcgcgacgccaggctcccttatgcgcgcggactgaacgtctgaaggagtcatcacaagatggcgaaaacttccgcgcggcttggcggaaatccaaaatcggaagagggcaatccggagcaatcgaggtttgaagggagtattggcgcggacgatttgctccgcttgaggcggctttcctatgtcgcctcgctcatggacatggccgtgggtatcccattgacgcgcctgcgcataggcgcggtcgccgtgcgcggcttagtcccctttgtaggtgacgccgctggcacgctcgtgaaactttacctggtcgacgaggctcgtcgtccgatcattcatggctcgaacgtcctttatcgagccgtgatccatcaagacgcgcggcccggcaatgctttcgtcaaccccagtcaagatgaagtttcgccacctcgcgagtttgtactgacaagcacatgatatccaacgggcgtgggaatgacatgaatggcggatgaacaaaaaccggggaatgacgtttacctatcgcaaaggaaatcgtcatgtttcaatccgtatccgtcgagttcttaagttcacgcgcgtccctcacggatcaatcgtcaaggctatcttccgccctagcctacgcgtcggaattggcggacgctcacatcacggttacagatgactgtgggataatcgtacttgaaggttatgcccccacgggtgcccttgctcgaatctcggagatcgcatccgccatcgtgggcttaagggtatgcaatctcattcggcccacctaaccgtggctcttcgccttcgaagtggcgatgaaacaggctatttaagtggtcacctgaatctaaagccgggcagcaggcctcgaagagttctcccgcaaaaccgaaagctttgttgacccgacccggcatgcatcttttcgacagctccagcgttttccaatcaacggtggtcgatcggagtgaggaaatgagccgacgaggtgttgtgacaaaagcaatttttctggccgccatcggtatttcccttatgatgggcaaaaagaccaaaccaggcatgcaagcgcttccggtcgttgctgatctccatgggcgcgacgccaaggtgccagaggcaattccgatcaacggaataaaagatgtcttgtggcgcgtttttcatcagatcacggaggatagggtgacgctgatcgcagccggcgtcacattctacctcctgctcggtctttttcccgcgatctcggcgcttgtagcgctttatggactagttgccgatccctcgaccatggcggatcatctacgtcagctggcgggcgttctgccgcctggagcctttgatcttatcgcggagcggatcggcactttaacggctagccgcaattcgactcttggagttacctttactattggcttggcggttgcgctgtggagcactcacagtgccacgttggcgattttcgacgcaatgaacgtcgcctatgatgaagaggaaaagcgagggctcattcggttgaacctcattggcctcgcgttcacgatctgcgcgatggcctcggcgacactcatggttggactcgtcgcgatcattcccatacttctctcctatgtctggctcgaccggtttgaggaacagatggcattgattgtccgctggccgatcctgttcatgattgtcgcggtcgccacaaccgccatctatcgtttcggccctagtcgccaaccggcccgacttcggtggatcagttggggctccgttctggtgacggtatgctggttcgcgatgtcgcttggcttctcattttatctgacgcatttcgcgaactatgacgcaacctatgggactttgggggcgcttatcggtttcctggtttggacctggctgtccatagtcattctgatcatcgggggcgagctcaacgcggagcttgaacaccagacggccagggacacgaccacggggccaccgttgccgatgggagagcgcggtgcctacgtcgcggacacattgggtgaagcgattggcggaaagagcgcctgaggggattgctctagacaatcaggcgaggcctttagtctagccgtcctcggagcgctcaatgatctcgtggcgtcccttagcccccccggttcgcatcggcgtaagcggttaaatgctgattccctgtctgaaaaacttaatctcaacgggcatcccagggataactggccgacaaagggttcaggaggcgcatcgcttcatgacgcgcaccgagctttcgttcggcccggctcgggcgagatgcgagaacccaacgccttaattcgctggattcacgttgcgtgatccatatgttcactctatgttccaaaagttaacgtagggtggcacatgggattcgacgtcgcattgaaccgagaccggaaacgattggccgaggcgaaggttcgcgacatgccaaccgatcatcctcttcgacagagatatatcgactggattcacgagctagatcgcatcttggaatctgatcaaccagaatatcgcccgaaacccctcaccgaggaagacaccgtcaggtccagacgcctcgcggggggcgcttccgttgacgggtttcgctcggatggcgctagcagcggtcggacgccgatagcgccggatcgatcgtgcgagccatcacctatccgtccttttattcgaaaatcaggccatgccggatctggtgctaacctggagcgtgatcggcttttcagggaaaaccagatgctgcaacatttgctcgcccgatacgtgtagccctgtcgccgatgaaccctccgtggtcggaccgcgccaggcgcttagcgccgggctaggcgccatgagcgaccggtaggtggaggtctggcaagtagtgcccgccattgtcggcgtcttcgcccaatcccggtttccccgctcgcaacgacccgcgctagtgatcaccgccgtctcgctcgcgagcgctgatcgatttgcactacctgtccatgataacgagcaattcgtcaagttggtcaaactgctcgggcaacgcgaccgcgctgccctcaagtgcttcgtcaagcgcttcgggcgatggatagatttcctggaaggttagaagcgtcttcccgccgttgtccccgaagctcacggtcgtgaccgcgccagcttctccttcgtcattggtccaaacaatgcgctcatttggtgatacctccagatatttgccatgaaaggccaccgtttccgactgatcggcgctaaattcgagccgatagccaccgccggtgcggacgtccatgtgacaagatgcgagccgcacgcctgtcgccgacctagggacccaccaacgctggaagatattggcctggctccacgctctaaacaccttattcggcggcgcgttgaaggttcgtttcgcgacaagctcgcggtctcccctacgttcgaccggagtctgtatctggatgtcacccgcattttcatcttgcttcatctagacctcctcggcttaagggaccattcctcttatcgcccatcccataagacgttcggccgcgccggcgtccgacagcgcttcgaaaaaaagttcttgatcggcggccgtcgcgttacaccgtccaattgtttcccgccgccggtccgagataggtggagccgatctctcgtctcatcatctttcgttcagccgacggcggtctcacatcccgaacgagagcaacgcaatcggcgcgcattcgacgaagtccgtaagcgcgagagaagtttagggcctgagctcgaccgcctgaaggatcaccagacgggaagctaaacccactttttggacgccaagatttcactatcgcgcgcgtcgcgacatcctcctccgaccgacggcgcgcaaaccgcttcatctcactatgtgccgacgagaaagttgggtcgaccgtttttatcgatccggtattactgagcttccgccccagccaggactggatctgaccgaagccaccgatcgatgttggctctcatcagaccgcgggaacaaaatcctgctcgtccgggttcctcgaacaacgcggcatacggtgaaagcacgctaaatgtcgcctggcaggatcgatcaaggagaacagagatggtgacgcgtgaacggaacttccacggacttaaacctgagtccgatcttgaatcgcccaaccacgcaagcttggaaacgaaggtggcaaacgccctttcaaaagatgggtcccttgatccttccgacatcgtggttgtcgacatgaacggcgagatcacgttgcggggcgctgtgtcgagtttggccgaagcgcagcgggccactgaagttgccagatccatcgtgggggttggttccgtcatcaacgccttggagatcgtcgtgggcaacgggtaacccgcgcgcttgacgtgctttccaatcgaggcttccaatacacgcggccgatccttcgacgatgggccgcgttcccatacgctctcaaacaaatccagccgccgagcttagtcgtgccgtcattcgcgcttttcgcttgccgaggtcagcaatcgtcgcgaacaactcacgcgacttttgtcgtgggaacaatcaggcggctccactgtttcatggtcaatgtagtttggaggatggagaatgatcaagattaccaagtacgcttttgctgcggcgattatcgcggcggatttaatggttgccgttttgccggccgccggccagggtttggaactgcgtgtcgggcctggcggcgtcgatgtacgcgatcgtgatcgatatcctgaccggtaccgcgacggctatgacagagggcgcgggtgcagccccgacgaggctttggatgccgcgcgtgacgaagggtttcgacgcgctcgaatcgctagcgcgaattcccgcaggattataatcgaaggtatgacgcgccgcggccctgaccgtatcgtgttcgccaacgcccgaggctgccctgaaatttgactttcgagtgtttgttggagggaagcgccgcgcggtgcttcccgaccagatgaagccgcgggggcggcccactgacggcaaaggaacgcttgcctccaaagctggcgatccgacggcttagccgcaccctcccagtcgcgatagttggaacttatgtggccaacaggttagccaacctcacgtcgacggataaaaagtttcacggttaccgggttagccgatatagacgtcctttcgtaagcgcgaatttctgcacaccttctgaagagcggtgctctgatgcatgaagtgtccaccaaaaaacagtgggcacctaatcatggacgatactcctaaactgcaagtgcggcttgttggtcgcgacggccgccgtcgatatgacccggcttctcgggatcaactaatcgcagcgtgcttagagcctggcgtttcggtctctcgactggcgcgggaacacgacgtgaatgccaatcttgttcacaagtggataaagaaggccaaagcggagcggccgttgcctttggttccggcgtttgtcccggtccagattgcaacggaattgaactcagatggcggcggtttaccgagcaagagtgtgcgattgggcaggccgtgtcctgcgtcgaaggtgagtgcactcttgcccaatgggatcagccttaccgttgagtgcgacgatgagagtggcctgatcgcaatcataggagcgttgagccatgttcagactgggcgctgatctgaaggtctacctccatcgggaacatgtcgctctcattgtagacgacctggccctaaaacagtcgtcaacgcgcatggaaaatcgcgcttacgtcctttcggcattacggagcagttcatagaaacctgatgttagctcttggatgtgtgcttgctgaccaaaagggttgataattcgacagctcaagcgacattcacgaacaatgaaaaattgccggattgtttaagcctgggaggtgcttagcagaccccttagacgggttgcgtaaggcgctttgtttcgcgtatttccgcaactggaaatattgcacggtggtaagcgcgcggcccgggtttaacgcgcgggccatcgaaccgcgataagggtgtggcacttgcacacccagcgatgccgcgtgcttcacttccgagccccgagggcggccgttcaattggtcgcttcacggcattcgcgcctcaaagcggctctaggatgacgcggggtgctcggatgtagatgtgccagtaatgtccgataactggcttttggcgatggaaatcaagtgatcggtatcaagcgagtggccctcttttacaaggcggaccaatagagtggcaatctgaaggaccaactttcgatcacgctcaaccccaagctcccggcagataaccttcagcgcgcggttgatcattgatacgtcagacaactcttccatcattccttttgcttccatcgcatgccgcctactagcgtgagcgtccggcgaagctgtttccgcacggtcgagcgagcggagctataggctgcgttttatttcgccggtcatgacgcgctcgatcatttcgggatcgcattgctcatcaaggaggaactgtcggatcccgccatcccaagtcctgatatcggcgaggagacttcgaaggtcatcaattccactttccgtcagacccttcgtgccatcttcactgccatcgcgcacataaaccaattcgccctcggcgatattgtccgagttggcagtcacctcctcgatgagttcgaggttctcgccaatcatgctggcgacttctgttagcgtatagataaaccttgatcgtgccattacgcggcctggcatccgtctcgcgccggcatccagttccagggtagcagttgcgcaattcgatctttggagtgatactggattcgggccaggacgtccttcagatagatttccggatcgtaaccatggagtttggcagtctcaatgatggtgaggatattggcgatgcgctcaccgcccttgtctgacccggcaaatagccagttctttcttccgattccgagcggtctcatggcgcgctcggctatattgttgtcgatctcaacacggccatcgtcgatgtaaacgctcaacgcagcccaccgcgagagagcatatcgcatcgcttcagctagcttctgcttctgtggcagcgtcgaaagtgtagcctcgatccagaccttcagctcgtccagaatgggccttgcgtgctgttggcgcaaggtacgccgctcatcagccgacattccgcggatgcggttctcgatatcgtagagtgctccaatgcgcgacaacgcttcctcggcaattggagatggcttcagcttgatcacatcatggaatttacggcgcacatgggccatacaggcggcttcaatgatctgattgccgtaaagctttttgtacccaccgtagccgtcggcatgcatgacgccgctgaaggtggcaaggtggtcagccggatgcacgcccttgcggtctgggctgtagtaataggcgacggcacctggagtggcggattgatacccactgccgtcaaagacgtagacccagaccctgccggtttttgtcttgccccgcccggggtctaggacatcgacgggggtatcatccgtgtgtattcgatcgagcgcggctatatgggccctgatagccgagacgagaggagctagcagactggatacgcgaccgacccagtcagccattacggatcgggagatgtctatccccaaacggtcgtacatctcggacaggcggtagaggggaatgtgatcgtcgaatttagcgaccatgatatgggcgagcaggcccggcccgggtttgccgcgctcgattggcagggtcggcatctcgccagctactgtcgtatcgcaatccctgcagatcatgcgcttttcgacatggcggacgatcttaaccgacgctggcacgtgctccaacacctgaaccaccctgtcggccgccttcaggaacgaggtgccaccacaggtcgggcaattgcacggagcggcatagaccagttcttcggttggaagaccatcgggcaatggtttacgcttcggcttctcggatgcgtcgtccaactccggcagaggagctttcccggagcgcatttcagcctcggcacgagaggcctcgatctcctccagcatcagctcgaattgttcgatcttccggtcgatcttctcagaggaagcgccatgctgccgatggcggagcagttccagttgcgcgcgcagaagtccgattatggagtcgcgcttgctgacctcggcttcctggttctcaagtttcgccgcctgttccgcgacgagtgcgcgcaaagcagtgagctcgtcctgattgtccggcggcgctgtttccatacccgcaaatctagctgatttggccctggcgcgctagcaatataccccggatctatctgcaaaatatagcttttatcccgttcgaccgggcgcggaagtccacgccgggcgtcgccaatcaatcccctcgacgagcatggaaagctgcgcctgcgtcaggtgcgccacgccatctttggccgtcggccagggaaagtacccgcgctccaaaatcttgtagaacaggcagaacccctgaccatcccaccagagaagcttgatccgatcagcgcgcttaccgcggaagccgaagatcgcgccagaacccggcgcctctttcacgaccgtctcaaccagcgccgacaggccatcaatgccacgccgcatatccgtcaccccacaggccagaaagacccgcacattcccagaaggtccgatcccgccgcctccagacaggccaccatcgagccaagcagcttcagttcaacgtcgatcggaaccttcaggcaccgaccgtttcgcagcaggatctcaacaaccgccgacttcggttgcgtggtcgacggctggcttacaccgacctcatcggtaatctccaccgggaggaacatcgccggtcgatcaagatagctgaatgatcgccgccacaagcggatctggccgggatgaacgtcatgccggcgagccacatcaccaatgcgagcaccgggttcatcggcttccgccaatatcctcagtttggcctcgtccgaccaccgccgtctgcgctcggtaccggacatgatctccatgcgagccatgaaacctctttgttctggtattaatgtcagcactaatgctggttctaagtccagaacatcgcctgatttgctcgatcagcaaaaattgctcaccggacgtgtgtggacgctccctcgaatgcaagcaaaatcttcactcagtcttgaacagtggtcgggtgctgacgtgtgtccggcctctcgttgcgacctcaaacgtcgcgggcccatatgggagttcgcagatcaggtccaacacgctcacgcgcactcaaggtgccgtccggtagaactggttttcctaatcccgtctcttgaccgtttgtccatatccttcgttcgacctgcctacactcgcaatgacggtgagatgtcctctccgccagaggtgatcttatgctagccttttctcctcgtagcgacctccgtttgtcataagcgcccaagcaatccgccccatccgattggcgagtgcaacggtgatcagcattggcggctttttgccaatcatgcgcgacaaccaagacccttcgatcgctccgcgccttgatgcccagcgaacgaccgctgctgccccaattatcaacagtcgtcgaaggtcacgctgccccattttggaggttttacccagccgggcttttccaccagatgagtgctggcgcggtgtcaaacccatccacgcagagaaatctcgacctcgcgtaaaagtctctgcaggcggagctaaagcttcgagcgctgttgcaatgacaggtccaatacccggaatgctcatcagccgcttggcaacatcatcccgtcgtgccctccggccaatctcctgatcaagttcccggactttatccatgagtgcgcgcaacgttgcaatcaatgccaagcaaggcgcgcgcgcggcctccgtcaggcttgagcaatccccttcaacttgactgatcagaataccgacatgcgcggggccttgcggaacggtaatgccaaactctgccatcagaccacgcagcgcattgataacttgcgtcttttgcctcacgagaaggtcacgcaccttaaataccgtcgctgaagcctgcttctcctgacttttgactgccacaaaacgcatcgttggccgcatcgccgcctcacagatggcttctgcatcggccgcgtcattcttctgtcgcttcacaaagggcttcacgtagatcggcgcgatcaatttgacctggtgcccgagctttgcaatctcgcgcccccaatggtggcttccggcacatgcttccattgcaactatgcagggatcaatcttcgataagaagtcgagcaatttcttactcgaaatctttcgccggaagaggaccgagccatcaacactggcaccgtgaacttggatgatgctcttggccaaatccaggccgactatactaaccttctccatggacgctctctcctgtgatggtcccaacacgaccattctggcacgaaggtgctgttgagtgggagcgtccaccccatcgctcacctactagccactcatggctggatagcctcggttctcgagcagggaatcgcgaggcgcgacaagttcgcattcaacaaccgtgatgtccatgcggtgggattgaaagcgaatgtaatgatatcgccgatgctcggcatgggagacggtcaaaccacggcgtggcgtgtctgggagatgaagaatggagagagaaacttgccgcgaagctcgaatgtccaggatgttaccatgatacggaggcgactccgagctcgcccccaatccctacagtccgcgtacctgcgaatgcctgagagaagccggtgattgtagaatggttttcgcgccaacccccagtcctagataacggaaacgcgttccgctttcgattttccggtctttcgatcctgaccgtcttcgtattcgaccttctcgccttggccgagtgagcctccgcgaacaagcgcggaaacatggacaaaaacgtccgcgccgccattgtctggcgtgatgaagccgaagcccttctcatcgttgaagaacttaaccgtgcctgttggcatcatattaccctatagtttcacccagttgaaccgtagcgcgagatgcagccacatcgatacatcatgcgcacctgaaatcaacccgcgctcaagatgaggaagagccgccgacaccttccgtgaacctgagggtccatcgaggaggtcggttgccggtccacgggtcgctcgaccaagtcctggatgtcgtttggatcaatccgcatggcgacatgcgtgggcgcgttcagcgaatcattgtcaacaagttgtaaaccacatggggtgtatactgtcccagactaagtactgtcgcgaatggttatatagttctcaaggattgatacgatggctgacgaaaccaacattgctcccgcggccgagattgcatccgtagatgcacccgccaaggccaaggaaaagaagacccgcgcgccccgcaaaccaaagtccgcaccggaagcggtctctggctcgtcggtgagcgccccagtcaaaaagacccgcgcgccccgcaagagcagtgctcccgcgagcgagacggttgttgccgcgccggcggtcaagacgccggcttccgcgaaaaaggcaaccccagtcgcgaagaaccagccgaccaagcgcgcgccgcgcggaacggcggccgcgacctccaacaccgatggcttttcggaactgctgaagctggaggaagaaaaccaaaagctgcgtaagtccctgtcggacaaactgcgcgccgagaacgccgatcttcgtaaaaagctcggtatgtcctgatagcaggcaccccgggttcaacaatcagttcacccacatctaaagaccgggcttgcattgcaagtccggtcgttggattagtacaatgaccccgacgataacgagtcggggagtattatccatgcgatcgccatggcaggtattgaaaggctttgcctcgcgcggcaaggcggacggatcccccgggcatcccgacaaagccgaggacaatggtgctcaggcacctgagaaggcacagccccgtgagagtaagcctcggacgaatctgaccgacccgagaagcgccgataccaacacggtttcgatccgtgtcaatatcgcggcggaagaaccacaagcgccattggaggagcggcacgcgacggacgagggcccccgcatccggcctttgcaaaccgaagtctcgtccaagcacgaagaagagccgatgcctcgccctgtcgaggtcaaggcatcgtcgacgccaatcgcgccgaacccttcgcgcgccgccggccacttggacaacaaggcgcccgagaagcggacagcccaatcaggaaaaaaacccaacaaggtcgcttcggtttcccatgacgccagccgttccgatgaagtcgccgttgttgatcaagccatcgcgctcgatacggaaataaacgcgcttcgggagcgattggcggaaaagctgcatgcacagaacactcatatgcgcctacttctcgaacgatacgatcgctgacttgtcaatggcctctgcctctgggttgatccgaggaaatacacgctcaagcggcggggccgatcgcgtggtccggctgtactctatttgaagctttccatgcggaacctcgcgcgtttccacgtcggttaaagctggcggggctcgccgttcgccgatagcgccttatcggcacgtgtcgacggtcgggaggcaacgtcgctttcacccgacgccatcgagtacggttcggccaagcattgcgtccgctacttggcccctctcctcgaacgaaaatggatgagggggtttagtcggatggaacctagccaatcagccatccacgacagatcatcgagatcgcgacggcggcggcggcaaccacgtagccacgacaccggcctgtccgcttgccctttcgatgatgctccgctcttgttccctgatgatcgagcaaagactcctccaccctgtgcggttgagtttcgggaggccccgttccaggtgtgggaaaaagggagccccgcgcgatggcggggcaatggcgctgatctagagtgcgactttaacgcggcaggatgacgtaggttccatggtcctggaaaataaagccggagtgtgccacgaaaaaaacctgcgtaaccccgagtcgggaccgtctgaagtgaaacactcccgtccgcgcgaaccatgattaccgccacgccatgtcttcaaatgttgtggcctggcatccaagtcatagccgatcatgccctcaaatgatcgaagccagccatgagcttcatgctcacggcgggcatttgctgggccggcgttcatgtcaacgccacgtaaacgaaaagccgatccagcggcaaccacgctacagaggcgtaagtcagttgggcttacccctttcgggcagggccccgttccgttcagcagatgttcgtgtcctgtctgtcacaccctccaagactgagcgctatctgtagaccagggaggaggggacgcgcttctccgctgctcaccgcaagagaataaccagatccctgaggaccggaacccaggcgtttggtcttcatggaagagtagaacggagggccaaccagcgttgagggacctcgtgccctccacttgccaaggtacactggagaccagctcgtcggataaaaacctgccgccgcgaaatatgttccaggccgcctggtgagcggtaaacgccgccgcaagcctggaccattctagacagtcgccattgaacatggagcgcggattgacctggcgtcagccgagcttggtcagctcgtgagggtcggctcccatgccgttgcctatttccattcgctgtcgcgaaacggctggcttcggcgcgtattcgcgtgtccggtccgccatgatttcgcggcgggacactcccgcggccccatcgcgaggtggaaccaaaaagacaactgcctcgcaagcgaaggccgatgacggtcgtgagatcgcagaacgcctaccacgaagcccgccccccgcgaatctcgtcgtccaccaggtgtttggctgtaccggcatttcttcacaccagggggattggtccgcttcaatgagccgtgacctccgggagggagagttccaggaccagcgacgcgaatgccatttcctcaacgtcacgcagcctatcctgtatgttttcagggccagcaatcatggacgcgatggtgatcgccttttcgcgatcgccgtaatcagtgacatacccctccagcagaattctcctgccgatcatgctgaccgagataaacccgctgtcaccgcccagctcagcggacatcgcggtctttaccgtggtcagctgctcgtgggcaaggaattccggttcaaacgacatgactttcctcctttgtgatgggatggaaatacccgaaaccctgttttgttcagctcctgggaccaaggtcctagatgcttgcctggatggcatcgcgagagcgcgcccttgcggtgtgacctgacggcagacagcgctcattggtgccaggagattagcgcgattgatcattggcagcgtcatcctccgcggcgcggatagggggcccgatcgtgcctcgcgcggcgtctcgtcgtcacacagggcctagacaaacgcgaatggcggcgattgaaccaacactgcctcggccatgtcttggattgcgttactagggatcgtctaccttgcgtccatcgccaacatggctggagtgaattcttgcaagttatcatgcggcctggccgctccctctaaaaccaatggtacacatccgggggcctgaccaaacgaaaggcggcgtcatggttcgcccgtatggacctaagtcccagccgtggaacagaagagcttccggcgcgcttacgaggtatcaacccgtggctcttcaaaagaagagcttgaaggagtgtcgccatgaaattcggttcagatagcttcagtcacgaagactgctgttcacagggtcatagctcggcgtcaacaatcgcgaccattcaggccgcgctcgcggcggaccccatgttcgacgggagcgcgatcacgatcaacatgatcggtcccgtagcggttctggagggcttcatctctaacgctcaacatcgcgacaaggctatatcgatcgccgccatgatcgtgggtttcgagaacgtgcacgaccggatgttgaaccgcgttcccgcgcgataaaacgacggtttaggccgcgtcggaccaaggtccggcggaccccggactgaggtcccaggcgtggaacgcgggctcctgatgagggtttggcgctcccagcggaatggtccgctggcaaggaggaaagttcatgaacatcagagcagcagcaatcgcggccgccgtgctaatcacctcgagcgcggcattggcgcaatcggccatgccgtcggaaaaggtcattacttttgttcaaaaggcgccggctcccaaggaacgtgtggtcgtcaaggaaaagatcgtcgtgggccaggcccttcccgaaacggtcgtcgtgaccccgatccccgatgaaactggctacgcctacgcaatcgtcaacgacgagcgcgttatcgtcgagccttccacccgcaaggtcatccaaatcatccagtagcggcttcaagtcgtgacggtataggcggcgccggccgtccatcactcaacgcgggccgcgtcgcgaaattttgacgcgggccgccttcgtttcagtatttggaggatatcatgaagcacttgcatctcacaaccgtcatcgccacgctctcgctaagcgtcgcgccgctcgcggtcgccccggcgacggcccagaccgccacgaaaacacagtctgacgctcaaaccgcggcgcagtctggatcaagttcaacgggcgctggctcggcgccccaatccgatcaatcggcgtctggttccaatgcacccgtcaccgactgctcgcctggcgcgtccggatgtccgcgctcgaaggcggcaactccgcccgcgagcggcgaggagggtgatgcgcaagagagcgccagccagcagacgggtgagggaagcgggtccggaaaactacccgccgacatgaagaagaagcctgagccgcaggatgcctccggtggcacgacaacggagcagaagtccgagtcgagcggtggcgatacgaccgcggggtcgaggaacggtgcagcccagggctccgacacttccggcacgagcgtccagaacaacccctcgaagcaatccgccgatgagaattcgtcgactaacaagaactcttccgagacgaaggtcaacaacaacacgacgaccagcaactcggcgaccaacaccaaggccaacgtcaatgtaacggtcgaacagcgaactgagatccgacaggtcatccaggaagtccacgtcgccccggttaaggaagtcgacttctcggtgtccgttggcaccgcgattcccaagagggttcaccttgaacggttgccgccgcggatcgtgaagatcgtaccggcgtacgaaggttaccgcttcttcctccttgcggatgatcggatcgtgatcgtcgatccagacgcgctgacgatcgtctacatcatcgaggcctagcacgcggacccggcggcgtcatgcgccgccgggggcgctggaggaacgtccatgatccatcaagaagagaagtgctcgggaactggtttcccgctcgtcgttattctcatggccatcgccgctatatgcggagttctgataatgacgccggaacatccgtcgcccgctcccgtgttcgtgcctgtttccagcagttctccgtgaggctcctggccctcgggggctcacacccaactttcgcgaaccaagcgctccccgcgttcgagcaccaagggaaattggaaagcgacgggccgtgctgttggtcccttgagaccctccgcaccgataaggctatgttaaaggtgtcgcatgggatgacgggtcgctcgtgttatcgttgccgggaaacaggatgtccctcgcggaggagaccgaaacatccaccttaccgttaaagttggcggttgacggctcgaacctggcaatggcatccgcgacatctgggccgtcaaacagctgctcgatgcgatgctcaacgatgatggtctcgctgctttcgctcgtatcgggcgcgtgatggacggaggcgtgcgtaaaggttgcgtctgaattaaagaaacttgatcgacttgcctgatcgaggtcccccgggcgttgcgctcgctaattgtcgtccacggggacatacggatcatgccgcggtcctttcgtctcgcgtggacgtatgtatgggtgaaacgagcgtgatgacccccatgccagcctcttccgccgctcggatgaacgcggccctggcatgctcagtggtgctttctccgcttatcgcatcaaggcattccttcacggcgatcacatattcctcaccgtcatgttcgtcccagtgggtgagcagtgcgttcgcggcgtcgggcaaagtccttatcctgatcgttcgttggtggacgaccaggattaaagttaaaaacgtccgtgatctgtagcattccatgacacttctccccggcaagtgctgatacgcacgtccgaagcaagaagcgtaccagtcaatctttcaaaagcgccaccgctcgaccaggtgcgaaacccaccgggcatcgatgcgatggcttctactaagatcgcgtgctatccattttccacgcgaggggagttctcgtgagacgaaaactcgtgacggtggcggtcgcggctctcgcgcccgtggtggcgatgtcgagtttaatcccgatcttccatatcgcggccgtcatgcggaactggcgcgacggcaagacgagggcgcgaacaaggatggcaccgacgacgaactgcacgccgttggcgcgacattggacggcctcctggacggattcgaagcctggcgcctccaagctgaacggatcaaggaggaacgctccctcctcatgcacgagctggcccaccgtgtgaagaatggcttcgcgctcgtccaggcaatcgcgcaccagtcctttagaaagtccgatcccgggagctacacgacctttgctcaaagattgaccgctcttgccgaaacccatgatctcatcctttccggggaggagaaatcgacgaccgtggaggccgtcctaggggcgtcgtagcgcgcgcatgcaacgggcgagggccgtatcaatcttaattggcccgacaccgtgcttccagctgacttgtcacttcccctccagggccgtatgagggaccagccccttgagataacgtcgatgaggcgggcgtgatcctccaccgggatatcccaagagtatccgttggctcccacgccgacgttgtctactcaaacgtcgacccgcccaaatgtcgttgctgccacctcgcggatccgctggacctgcgcgtgatcgctcacgtccgcctcgacggctatggcatcaacctgtctggctggagacgcgaccgacattggaacgaaggttggatctgcacgcctccgaacgctctccgtctagtctcgaccacaccgggccactggcttccgctaggtgggatacacgtttctcccaatatgtgtccgattgatgctcactctcgcgttatccttgcttggccaggaacggaaccgatgcttgtgccggttgccaccaaggcgccacctgattcagtccgccgtgtcgtggcgcatcatccggttctgtccgggaaaatgctgacgcggcggggcgccgccggataatctcggtcacctgatcgatcggtgcgggcctgccgaaaagataaccttgaccaatatcgcagcctagctcccgaagtctttggagttgcgtctgcttttcgatgccttccgccgtaatcttgacgctcaggccagttcccagcgaaatgatcgcacggacgagcttctcttgcttctcgttggtttcgaacgtcgccacgaaactcttgtcgatcttgattttatcgaactggtagttggacagctgcgaaagactcgagaacccggtaccaaagtcgtccagggcgattttgatcccggcggctgtcaggccgctgaggacctcgcgcgccgtttccgtatcctggatcagcgcgctctccgtcacttcaagttcgacgcgatggggagaaaggccgacctctctcatgacatccaacaaacgcaggccgagtagccggtcactcaattgcacgggcgaaatgttgaatgaaagtgtgatgtgcgacggccatgatagggcatcgcgacatgccgtctcgaacaggtagtcggtgatcgggataatgaggccggcgtcctcggcaacgggtatgaagtcactgggagaaacgaacgcgcccgattccgtctcccatctggcgagcgcttcgaagccgacgatctcctgcgtcttcaagtcaacgagcggctggtaatgggggcgaatccgtccatcgttaagcgctttctttagcgcggcctccatctgtacacgcgcaaccaagtcctgctgcatggatgatgcgaacgtcctcacgttgtttcggccggctttcttggcggcatacatggcgcagtccgcatattgcagggcggtcttgaattcatcgctgtcctcgggatagagcgcgagcccaacgctggcgcccatgtccactgtcgctccgttggtaacgatgggcttgctgacgatctcgacgatatgtcgcgcgacggccacgagatcctgatctccctgaatcttgatgacaacagcgaattcgtcccctcccactcgatagacgtcattacccgggaagatggcggataaccgttcagcaacaatctttaatgcctcatcgccatgggcatgtccaagaagatcattgatcttcttgaagccatcaagatcgatactgaataccgcgtattgatctatgacggcaccaggcgcgggacgcgcggaaagagcgccgaacatccgtcgatttggtagattggtcagcgggtcgtggcaggcaatccagtcgacgttcttctccgccgcgatccgccgctcgatctcacgcgccaggtccttcattctaatcagggagtaaacaaggccaagcgcgccggctatgctaatggccgtgaagacttcatcgagatcgtattgctcatgagattgaaagaaatggtcaagcgcttcatgaccgttgaaacgcagggccaacccgaaaacaacaagaaatagcccagaccaaatcagaagctcaaattgggcgcggttatactttatcaagagaatggactccaccggcggtgcgcggcttcatgccaagatgataggcctcatcgcctcctgagagaggagtaacagttggatgttatcaggcgattaaggtgaatgttagcaagatcctgtttttcttgctttatttcgcctgaacgttgcgatttacgaggaattggcaagatggttgtgtcggccgccctccgtggcgcgagagggcgcgacccgaacagcatccgggtaattcctgttatcgagatgccgacattgaacgcgagtccaccatgaggcaacttccgaggtaagcgtggcatgacccgtgaaaggcgatcagatccaaggatcgatccagcgaccgatgacttcccaaacgcaaatattcgtaatgacttggagtgtggtaaggtaggagcagtcgcagcgatttgaacgcatgcgcaagctccgtgcaagattgggctcgcagaagtctggcgggttgcaacgctccaagaggcgtcggccatgatcatgaggatctgatgaattgtgatgttgaagcgatgatggattggcagcaacgcgggatcaatgcgagagtactaggcgtttccgagtgtgaaaatcctgtgcttccccaccttgaaaacgcctgctcgcggaaggaagtagaaggctggaggctgagagcggaggcttggtttttcggctggcggattgaggacgcgtcgcgggtgtagctcgcggcatggaaaacccctcagtgagctcaagccgcgagccctttcgaggtcggtcccagcatcgacacgaagccgccccaaaggcgcgcccattgggccgcggctttcattgatgttacctctcgtggtgcgggtggacggtagaacgcgagcgtgcccttagtgcgccgtggcgagtgagcggccttgcgggcggtcatctatattctttggtatggtgggttgctgacactcaaccagatacgaaggatacatcgatgaccaacgacataattgacctacgagagcttgtggagaagatcccggacgcggatattccgcgacatgatcggttttgccgctgagcgacccgtcgccacacacaccatctcatgggacacgatggtttcaaactgttggcatcgactaagacggatgtttgggcctataaacgacgggaatattgatcagacgtcgagccaagtgtttcataaatggattcaactattttcggttgcctggaaaatggcggagcgtgcggagcagcacttagagccatcaactggcggaacacgggtttgggcacacccgagaagtggcctttaagtctgcgtacggcggtgcggttgatcttgaattcggagttcccgatgatgatccactgggggccagagctgattacgttctacaacgacgcctacgctcccagccttggcaacaagcaccctggcaaccttggcaggcccgccaaggagtggtggtcggagatgtgggacgcgctagggccgattttccagcaggtactgggtggtaagcccttttacgtcgagaacgccgcgtatcagcctgatcgttacggcggacgccagacggcatatttcactcactgccacagtcccatgtggggcgacaccggagaaatcgaaggcattttccttgtcgtgaaggaaacgacgggccaggtcatcgcggaagctgctttgaaaaaggcgaatgacgagcttcggctccaagtggagaaggggctggacgaccaggaccgcatctggagcctgagcatcgatctgcttggggtcgcggacgcggagggtgtatggttgagcgtcaatcccgcatggacaaaaacacttggttgggaaccctcggaccttctcggacgcacttccgagtggttggagcaccccgaagatcgcctaagaacaagctcggaaataaaccgcctggcgagcgggacgtcggttctctcctttaccaatcggcttctaaagcgtgacggaacgtactgtcccttgtcatggaatgctgtcccctccaagggtctactttattgcgtggcccgagacttgacgtctgaagtcgagcaacggtctctccaggaaacgctgaacagagagctggaaacgacccaggaaaagctatctgaacaactcgccgcggacgaagtccggcgcgtcctgcaacaggagatgtcgcaccgcctcaagaacgccatgagcgttgtccaggctatcgtcagccagagtgctcgatcggccggatccacggacgaggtcgtgactgctatccggtcacggatacaagccctggccaacgcccaggatatcctcgtccacggtccagacacgggagccgacatcggtgttgtcctgcggggagccctgcaaccccatgcggagctcaatcacagccggatttcgttggagggaccgttggcgcccatctcaccccagcagggactgggccttgctcttctcgtgcacgaattggctacgaacgccgccaagtatggaagcctatcggtacccacgggccaggttcgtttacgttgggcagtggagcagggccgccttcatctggtttggcaagaagttggcggaccgaaggtggccgcgcccgagcgcgacgggttcggatcacgtcttctcacgcgcattgttccgagctatttcagtggcaaagggcgagttcaataccctcaaaccggactcatattcgagcttcaaggcgaattgatttgaagccacttgcctccactgcctcgagacgatcgtgttcggatgccttgcttgcgcccggccaaaaccaagcgctatgtcacctactcgatgaggaaacgaaggcagcgcggtgtacaaggagaccggcaatctccatgctttccagatcatgctcggtcacacacgaatgcaccgcccagatcgagtgctaatgaccatcgacaaaggccgatcgcctcccgcgctgcgcaagtggtcacgcgcgttaaagcccgctgacatctctcgatcgcaaccgccaaggtttagatcgactgggacgtgatgaccgtctgggaaggtgctggaaacgacgttggccctaggttgagatcgggcgtgcacaacgacctcgagcccagcacggaccaagctacgcgcggcggcaaggcccaggccatctgtcgagcgcgtgataaatatcctcccaggacactgctcccacgcgctatctgcttggattgacgacctcggagactggcttgtccgtactctcgcctggctttgccaaaatgatatagccacccgcgatcacgatccccgccgcgaagattatcgctacgaatccgtacatgcggtggcgagccttgttgcctgtggacatgcggtgagtcactccttatcacaatgcgaaaaggaacgcgtaaacagcgtcttgggttcccgagctctaaaactaaattaaccaaggatggctagtggttcttctccgcgcggctcgcctgtccgtgtcataaagcgagatcgaaactcgactatgtcgttcggaccttggagcaatctcgtgaggctcgatcgaacagcgcgagcttgccgccacacgatcgtaaggaacccaagggaccaatgataaaggttccggccaaaaacccttggcccggtttgaacaaactccccaaaagcttgtcgaggagggcattctcacgcttagcatttcggatgcgatagcggtgaccttcgacgatattggcgaccgcatagaggacgagcgctcccaggaagcggagcgcacggccatggctatactttcctccacggcggagcatgttatcgtgactgacctggcggggttcgtgtcacacgcgaatgccgccgccctggcattatgccgacgtgatcctgtcggttcgaagtttgcgccgtgttcgagctcgagttcaaggctgccaccggattgatgcagagcgacgatttcatttcgctcgcgctctccggtcattccgtccaaggcgtcgaagcattcaccttgaacgagagtaactcgcagccgctcctggtcagcgccgctccgtttcgggttgccggaaatgaaaccaagggcgcggtctcgacgctggtcgatctttcccgtcacaaggaagccgaacggcagcagttcctcctcatgcgggagctaggccaccgtgtgaagaatagacttgcgctggtcgtttcgatctccaaccgcaccgcgtcgacagaggacacggtcgaaggcttcaggcgtgcgcccgccggtcatatccaggctctcgcggcgtcacacaatgtgcttgcggaccgctcttggacattcatccggccgagcgacttgatggtcgccgagttgaagccctttgttgaacactttcgaacgcggttcgagataaagggggggcctcgatatcctcccgcgggggggtgttccgttggggctgattatccacgagctcaccacgaacgccgcgaaatatggcgccctgtcggatgacactggaacggtgaccgttgaactcggctcggagcagggctctggatcgcgcgtcatcaattggattgagcgggggcctcgggtgacggagccgacacgaaacggttttggcggcacggtgattgggagaagctcgaactattccgttcacggtggggcagagaccatgttaaatgagagcgggccgacatgccgccgatgcttggagtagcgaatgacagcgcgtactgttgacgcagcgctgacggacgcgatagcgctccatggaccgccgagaccttcctattgccgcgctagccagctttgcaccagcttcggtggtattgacttgagcggatggccacaagaggcgtccgcaccagaaccgcacgtcgataggcgcagtacaatgactttgccgacaaactccttgcgcggatcgaaaggagctgccttcaagatagcggcacgaaaatctctttcgaacgcttgccgagcgggagcaggtgaccctttcacggtaacgacgggcccgcgcaccacggcgccacggtcatcgatcacaaagtagcctataccgtcaaccttcgccgctctcgtatcctcgctcaccaacaagtcgagctcggccgcgacgagtgagaaaggcgcgacctgagtgatggactgggcgcgcgcatccacgcccgttaacaataaagccgcggcgcaagtcgtcgccgcttggatgaacgtccgggctatttgccgcctattcgatcgttgaaacatttccggtccattttttcccgccagcgagttttagcggacacaaacagccccgcaatgaatgatcgttgtcgtggcatcgagcccctccgatttcatcggttgtcgtggcattttggcaaccgaacaaggcggtccttgaaattcccgccaccgtcgacatccaagctggcgacaaagcaaccgcgaacgaggatcgcactttgttggaaccatccagtcctcaataaatgatcctggatcacgcataagccgggtctccgcttcgtcgttcacaacctctaccgctgagcaactttcagatatttttcaaaccatctcgcgcgccaaacgttgtcgtgggcatcgacgtatcgattgcattcataccaaaggcccggatcgcatcagtaagaaagatcgcgcatgtccagactgaccgagatgtccagcgataaccgggatgcgttcgacacgagttccgttgcagccattgacgcgacgcgacaacttgttatcgaaatccacgctgccttcacgttagcgcagctccaggtgacttcgatcgtcatgggatcggtcaaggctgggtcggtgggccacgctcaagcggtggcgggtatccacgacttatcctccgccatggccaagctaagccacgaggcgctcgaagcggtgagagtgttccgcgaacacgccgcgacagcacggaaaacacgtgtcactggcagcgaatcttgaacaccgtttcgcctaatcctggcaaggcaatggatggcgctcatcgccattttctagaatccgggacttaaaagagcgagccagtttaccaaggaccaccatggcggggaacttccttcgaccgcaatgacaacaggtcggcgacgcagacactgcgctcggatcgtgcgtcgatgggtggcttccatcgggttgtaagccggcgactacggcacgcactcactgagcgcttgcggccactgcaaaaaatccaaggagattggccaaactcgggccgcaaacgccaacacacgggctcatcgccgcagaaagcggcacggatcgagaccctgggccgaggcgcggagcagacgcgcattggtactaagcccggcaagaccgaggtgggcggataagcactcgatcaagagggttttaacgaaatccgcccatggagcaatcgcgggattgaactaaatggctctacctcgccgaaggacagcttgagcaaagaggcccatttagagaggtatccttactaatgccgcccggccgttcgtcgttgtgttgttgtgttttggaagcaagcgcgcttgctttggtctttcacaccttcatcgcactgatcgagcaggatcgctaccgggctgccgcatccgtggcctttagcaatgttgtgctgatcacgcggtggtaatcgcgcaccttgagggattgaggccatgggcttcgctcacgtcgcggtcgtggctgtgcccgcctgttgtgcgcggatcgcctgcgctgccgctgccgcgccgccttccttgtcgtcaccgcctacctgtacggtcggttgggcgaaagcgatgtcatttgccaggaacgcctcgcgaagcttggcgtaggccttgcgacggatgaaagtctgcatgccgggcaccgtggtcatggcaaagctcaggactattccatagtccgcgaactcctcgacacccttcatcttcagtggctcgataaagagcgggccaagctctgggtcttccttcagctccgctccgatctttttggtcagctttcgggccttttcgatatcggtgttgaagccgacagtaattctgaacttgtcgatcacccagtcacgactcatgttctcgacggcaccgaggtcgccgaatggcaccgtgaagaccgggccgcgatgatgacgtaggcgaaccgaacgcaggctgaagccctcgacagtgcctttgtaatccttggcttggatatactccccgacgcggaaggcgtcatccagcatgtagaacacgccgctaatcacgtccttgacgagggtctgcgagccgaagcctatagcgacgccgaagatgcccgcgcccgcgatcaacggtccgatctgaacgccgagttgtgccagaacgatcagaaaggccatgacgccgaccatgacagccagcgcgttgcgaaggattggaagcagggtgcgaaatcgggcgcggcgggccgcatcggccggcgcgagcgaggtcgcatccgtcgcgccatgcagtgtccggtcgatccaacctttcgccagttgccagagcagatcggcgcagacgaggatcaagacacttttcagacccccgtagaacagtgagacgatcaccggatcgcgccgacccaatgtatccggattgagacgccagaccagcgccagccagccgacggcaagacagatcacgacggcacgagcgccgcggataatcaagacacctcgaaagctcctcggatcgccggtgaaagaggccaccgcgcggccaaccgcgttgaggacggccggtaaggcaagcaaatagatgccgatccagaaaaccccccgcatgttgacacaccagatcacccatagcaccacaaggaaacccgcgatagcaaccttccaggaccgaggtcgccgcgaagtggcccaaagggcctcgatcgccaacatcaggccgataagggagaaacagtaattgattgcctccgtaacgagcggcggaaccccgaggggttccccaattgcttcagtggcggccgcgaagcagacaagtccgatgacggccgacaatcttgcccgcaagggcggtgcgaccttggcgatggacatgaacactcgagccaagcggaacaagatgaaggcggacaggtaggctagcaagacgatgcgagcgagaggtggccaatccaccgcgaagaaaataatcgccatcgcgccagcgaaaatgacaatcggagccaggtcactaggaatggtttcaccacgtgccactagcttacggtaaagaccctcggcaatgaggccaacggcaaccaggccggcaaagagcacgaacaccggagcatggccgcccctgcttgttgcatcctgtcgtgttctggccgcggcagcgacaacctccgttggaatctccgctaaggcggcaaggatcccgctaatacgggcacgcgccgcggcgtcccaacttttgagattcgaggcaccggccgccgaagtcggagccgccgttggtaaacccgatgcctttcgctgctggtctggcgagccccaccttggatcgtggtggccctgatggctgccaccgccgcgagcctaaaggtgagcgggctggcgtgagtacttcacacggaagcgtcgttgccgctttcaagaccggtttgggggccgatggccgtcacgtcacaggaccgcttccttggtcatgtcgggcgttggaaggttgcggtagttcaaatgtacgcgctttctatgtggtttgagctcacccaaaccaacagtgataacagaaaccatcactttggggggtgcgatggtttcaggcgggatgttccggaatttcccggcatgaaataagcaaaccggcttaaacctaccacgaatcgcgcctccttggttgatatcgcgaccggtcgtgatcgccgcagcatcaaaccatgagagcctgatccacgttcagttgcttcctcaagcacccagagttgatctcttcgttcgaaccgaaatcaatcctgacctgtaacaagaagccctcggcgccctcgttggttctgatcttctcggcgccctgacaaggttctcgacaaccgatccacctagttcgagaccgccgaccgcaagctgtgagaggaaagcgataccttgcgcatcgggcgggccggcgacagcgggcggacggtcaaagcggcgaggcgaagccgatcactgctcgcgcggtctggatgggaaacgccgcccgaaggcgacaaacccgctctcgaacacgagcccgctgcttggacagttcggcgacgatttgaagctcgaacccgtgttgctgttgtccgaggcgaacgcgcgaccttgccaagccctggcgacgaatggaaccattgacggctatccagcttctccctgctgatcgtgaccgcggagaattcacctgtttattgtccatcatctcaataatagccgctcccagcgcatcctttggctcatggaggagctgggactggattacgctatccgcttttacgagcgaaacaaggatatgtccgcccccgaggcattgcgggcggttcatccgctcggaaagtcgccgatcgtcgaggatctcgatagccccgccagccgccaggtgttggtggagactggtgcgatcgtcgaacacctggttggctcggcggacggcaagctaggcttgcctgcgacgccccgcgaagccgttctatatcgccagtacctccattatgccgaaggttcgctgatgccgatactcttcaccagcctcgtcgcatcgaaaattccccttctgggacggttcgcgttgaagcgcatacgtccgatgctcgagacgcacctgaacttcgtcgaacaggaactccgcggtcgcgaatggttcgctggaaccgcgttcaccgcggccgacatcatgatgagctttcccctcgaggcggcgggggcccgtgggtttctcggagatgacaatcgagcaacaacagactggctcgcacgtatccacgcccgtcccgcctaccatagagccctggagaaaggcggaccctatgcttttggaccgccgcgatcatcaaaggagacgacccaatgaacctcaaggcaatcgctctgaacggcaccctgaaatctagcggaggcgagccgtcatccaccgaccgaatgctcgacctcattgggcgcagattgcgcgaaatgcatgtcgaggtcgaaacgatccgcttggccgaccatgacatcaagccaggcgtcacatcagacgaagggccaggcgatgcatggcccgatatcagaaaggcgattctcgatgccaacatcttgataattgggacacctatttggcttgggcaaccctcctcggtcgccaagcgcgctcttgagcgcatggatgccttcctcgaggaaaccgatgacgaggggcggatgatttcccacggccgggtcgcggccgtcgccgtcgtcggcaacgaggacggcgcccatcacgtttccgccgaggttttccaggccctcaacgacgtgggcttcaccattcccgccaacgcggtcgcctattgggtgggtgaagcaatgggcagcaagaacttcgtggacctcgacgagatcccggaggttgtgacgtcagcagtcgacatgctcgttcgcaacacggtccaactcgcgggattgttgggcaacaaagcgccatagctcttaccgccgacgggtccccgtctggtttggatcgagccacggccgcttctttatgataccagcggtttcgcgcggttgagccgcccgaacgcccaaggtcgcgaactcgatttgcctggggccggacggcggatctcgagcgcggtgcggatctcgcttggatccggcggccatggcaggctggtgatatcgacgtcaccaactccatacgagcctcaccacgaacacgggaggcggcacatcaaacccgaaaagccggtccaaaggctcgaaaaacccgtgcccgccggagtgcgaccgctcctggtcgcccgcgacggcgggaacatgcccactccgttgggtcagccgcgatggcgcgggagatagcatatccccggatatttatggggccattacaccaatcatgagatgccgctgacgaaaatgtcgtggaacacaatctaaatcaggatcgatcgtgcggttgcggaccaagccctcacctcgggaaccggcaaccgtcgtcgaggttgtacatacggtttgaaaaagaggtgcctcatgcccatggttattgatgtcgactttcagataaggtgggcggtgccggttcacgtgcggatggttggcggtagccgtcaacgcattaacggacccgatgcagccctgctagcgctaaaaagccaatggccatcgaaggacagcgcggaattcagcttggcgatgtccaggtgccgcaaggctctaatggagcacggaagcgcggaattggcacgcgaaagcttcatggacgcagcggttcaggcgaaggttctttcatgacagcgatatcagccatgacattccactgggccatcatcttgggatccatgacgctactatgctggatgtttgccggcttctccgctgtcttggggaccaagggcgaaatcaggaacgaggagccaggtcgattgagtgattacctcacgacgggattggccgcggtaggctttgtttccttgacggcgatgggccttttactcggatttggttcgtaggccactggttcgcggtctgcggcacgacatggaggcgatcatgccacggtgggctcacctatgtatcgatatgcagcggatgttcgacgaggagaccgcgtggaacgttccatggatggcggaggtatccggccaaatcgaggaattggcggcgagaacacctgcacggaccatcttcacccgcttcatcccgccgcgctccgcgagccagatgccgggcgcatggaagacctattacgaaaagtgggatcagatgacccttaaccgcttaccgcgcgagcttgtcgaccttttaccggccctggctcgatttgtcccgccagcgcggatctttgacaagcggacgtattccccctgggttgacggacggcttcatcaacttctggtccaggacggcgtcgatacgcttatcgtcaccggaggggagacggacgtttgcgtgctcgcgaccgtggtcggcgcgatcgacctcgggtaccgtgtgctgattccgcatgacgcggtgtgcagtggggcggatagcacgcacgattcgacactggagcttctcggcgcgagattttccgtgcaggtcgagatgacttccacggaagagctgcttgcgaaagtcgtgcgatgaaccgcgcggcgctttcggtgggcgttttccgtcatgtgcccgaccatcgaacgtccgtacagaagcgtacttggaaccggatccgctgataccgggttaatcatcgtcttgttttcgtcaagcattggacggaggtcacatgaagagagttgccttggttacaggcgcgggatcgggcatcggaagagcctcggcccaaacccttgcatcggaaggatattgcgtcggcttgcttggacacagccaggacgatcttgacgcgacgatgctcgagatcagcgagagcgatggcgatgctcacgtcttgaatgccgatatcgcgaaccaacggcaaatggaggaggcggtcagcgagctggcgcgccgttacggcaggctcgacgttgtagtggcgaacgccgggatcaacggcgcgtgggctcccatcgatgatttgacattggaggaatggaacaggaccatctccaccaatctcactggcaccttcctgacaatccgggcgactgttcctctcctgaaggcggcgggtggcggatcgatcatcgtggtgtcatcgatcaacggaacccgaaccttcacgacgcccggcgcgacggcctacaccgccaccaaggcgggtcaggttgcgatggtgcagcaattggcgctcgaacttgctcgtcatcacatccgtatcaacgcggtgtgccccggcgagatcgaaacgaatatcgactcgaacactgcccttcgacaagaggatcaaacagtgatccccgtcatctggccaggcggccaagttcccatcaccggcggcaggccaggcaaaagctctgatgtggcggacgtcatagcatttctggcatcagacaaggcgcggcacatcactggatcaccaatatgggtcgatgggggccaaggactattgcggtgaaaccatcgggtcgaaatcggtcgttgtaaggacgaggccggcagacggagttgttcccggaggtagccaagcatgccgagagctggcgagaacgcaatgaacaggagaaatcgtgccggggcgtcaaacaacgttaactcacatccaaggacgttgagaaatcgacgggtgcgtccaagaacgaaacttgctgatagccgcacgtgcaaaccacgggtccccgccaaatcggacggcatcagaccaggaggcgtaaggggtctcgtccgcaacgcaatcagctccagcacgcaagcggccgagtggttcgatcacgttcgcgacttcgcattctttggcgtcacgatgaccttggagctatccacgcctgcctaggacagctttccacgcaagtcggatggattgaaggcgtgtgtggacacgctccggcgtcgaggtcccgatgccattgcggaaatcagcaagagcctgggcttccaaccgggtgaacctctcatcggaagaatttcgcagagctagtcccgtagtgcgatcaatgaccacccatcggccgttcgacatatcgacttcataacgggtcatctcaaaatctctgcctgacttcgcgaaaaggcatatcgagccgacatgacaggaaacttaacatgcaccatgtctaactgaactcggttcaaacgtggtgaagaaagcgctaccgggacaatgatgctcgggcgctacacagttcctgtcccgcgtcatgccccttggctaatgccggaggcgacagtgacagcgcgcgtcctggcgacgctcggccttgttgacctttgtcggacctcgcatgaggctccccgccgaaaaggccggaacgtggatgagtaaaaagcatgcttggggttgtcgcgtcagcagggctcccagcgaccgttcagggcgcggcggcgtccagcgacagcgcatggaacgcactcgtcgcaaaggccaagggacatgcatcggccaagcgggcactgatagcctcaggcgaccatgccggctcgttttcgatgacgcttctggaaagatcgcgatctggctttcccacggacaggctgcattgatattacgcgctttcgccttgcccttcgcttgcgacccgccacgagaagtcgggcaatgcctccatcgcggagtagcttgggtaggaaggcagctccccggtttgtacatccaacatttgtcatcctggcactcgtttcaagcgcgatgataggatatcgttgagtttgacaggcttgagatcaaaaacatcgaccccaacatcaaactgacggggcgaaggtttgagccggccgtgtgaatgaccgtggagattgattgatttcttgctcatttggttccaggtgcggaaggggtaatggcacatcaccagcagaacgccgtcaacgatgagctctttgtagtgctgcaccgttttccaccctccgcaggcggccaccgtgtcgggatcgttgttgccgatgatcaggtgctttatgccggttaggcgctggagcatatggttgcaatcccccgcgcccctgcccatgaagtccccgagatgccagacttcatcatccggacgaacgaccgcgttccagtttgcgattagggtcgcgtcgtgctccctcatgcccggaaaaggtctttggtcgatcctcagtacgcgagggtcggccaagtgcgtatcgctcgtgaagtagatcatcgaagaaacctaagctgtccgcgtttggcaaggtcggcgagattgatcacatccaccatccgatccgcttcgtccggttccaaggtgtccagacgaacgccgtgatagacggcggcccaacccgtgaagatgtcgataatcgaccagtatgcatcggaatggtttttactgacttgatatcgaagatgtcccatgaacgaaagctggggccggcggccgggatatcaagagccccgagaacgtcgaaaacagtggcgaggccgtctggatgatgacgcgataaaatctcaggttttcgagattataacctcgtcatgcatgagcttggtaagctcggccgcatcgtgaatgccgaattcgtgccatcccacaagcgccttggcagccagccttccgcgatcgctggacggatcgcagtcattgtcgagacaccaatcgatgagaacgccgtgcaacatttgcaggtcggttgtcgtaagcggctcttttggccagtcggtcttggtcaagcgatgtcccttggctttgatgagacagcatcaagaagaaaactaccccgcgattaggcagggcaagagctgaaccatgattgaagcggctcgaaagccatattccggaatatccgcaaatgattgatattaaaacagaatagtctgtacgttagtgtacaatctcgctgcgaaacgtggctgtcgcggccgggggcgcctcggcgtccatgatcaccgtcggattgggaaatggcgacgcaaggctcatgggtccatctatcaagcgcttggcgggcgtttggctcggccgcatcatcatgcgcttctccagacgacgacaacgatcagcacaaggtgcttcgaaattgagacccgatgccgagcagcgcgccgtcattgtcgacgactggcaggctgctgaagccgcgatccagcaccggattcgcggcttcccatattctcggtcgcggcccgaccatgataggatcgggactcgatggatcgcacggtcagcatcacaaatctccttgctttgctcccaggctactggcagggcgctccgggcacgttgacgcccttcaagcccggcatctcacctgagagagcggcggaagccccttagcgagagagtaaacagggccgcggcgatccctgcgagccacatgaactgtggtcaaacgaccgaaaagcccgcgcctctgtaaagcacggcctgcgccatcacgatgaaatgcgtgttcggggccgcaagcatgatcgtctgaatgatttcaaccatgctctcgcgtggtgtcgtcggtgttgccgccgaaggcggaagcagtttgaggctaaggtgaactacaaaatgcgagtgtgacgagcgatttcgacgaaacgaaggatctcgcactgacaggcatcagagggccttacccacggtgtcaacgcggccatctcttcgatggcccgtcgtcattggctcccgcctacgaggttcttggcctcgactgttttttcgcggaccctgctggtggaccagcgttcttcgcgacgagcattgtcgctgtccccgcgctcgccttcgcgctctcgctccagaataccccattgtgttgcgcatcattacgacgtcagtcgcaccggaagtcctggaaggtgcgcaggatcagtctcccgtcacgcaagcggctctatccgatgcgaggagagcggcgtcgggaaatcgataccgaggtttctcgtactgctcggagtcgaaccttgagcacgaaaaacgacggtaggagagtatagcgactatgggcgatcgcgcagtacgatgaaaaacgcttgataaggatccgcctcagggcagggttcgagacttcgttgaggcggtggcgcaatgaacggacagggttcccgcggatgggttaatgcatcgtcatgtgaacttttctcgtaatcagcccgtttaagctcattggcattggcattgagtgtcggtcgtactccacccgaaacgccttgctagcgcgggaacgcattgaggatatagacatggcgaagcgtacaacgaagtccgataacgtggagacctctggggcattcccatggggaaaattgatcgcgggtatcgccgggagtgccgtggcgactcgcgtcatccgcaaggtatcgcttggccggattgtcattgcggcaacgcctttgattgtcgccgccctgcagcggggccgcgaaccgccgaaggatgggccaaagggttgaatacttttcatggaagcgcttcctgcaagtcggcataccactcagcgtacggggtgtttcggacgagatggcgattgtagtcgggagcgccgtcgttccaccacggggttccccgctcgccaagcgctaccttcgcatcgttgacgcggccacgggcgtccgccatctcgcgactgcccgctgtcgcatcgcgaacggcgcgccgcgccgccatgagctgagccaccagacgatcatgggtatcttggtcgagcgcggggttgcactgccgccataggcggccgcgcactatgaagtatcgattatctggcgtggtcgggtagtctggcaatgcgtctttcctagtccaactgtcgtcggacgactgccttcgctgggaacctcgacgatattggcgccttccgtgatcgaatcctatttgatatcgccatcaatcgccagtgtccgcgcttaggctccgatcggccgaaggggcaatcaacaccgtcgaaccgagttctccgccgagcgcctgaactctcggcacccttttttctagccgtcggcatcctcggcatgctcgattactccccgcgccgccaggtcccgcctccgacgcggttatgaaccattaaatggggtttatcttttctacgtagtgcattaacgtcccattagaaggatcaatttaatgcggctgacgcttcaaacccattttaaccgtgagtggcaccacgccgcgacgctcgaattgaaggacgatacggccggcttcaagggcgcgtcgatcgtcgactacgatctcgattatttcgttaccgtggcgtcggtggaattcgcggccggaaaaacggtcagagaccatcgcgccttgtcaatccgctatcctgttgatctcgaaaatcgatttagtggcagttggccgccgtttctattggatctcatgccacaaggacatgcaaggcgaaagcttgcggagcacctagggctcgccgaaggctcgcgcgcttctgatctcccgctgcttctgcgatcagcgacgggcggcataggcaatatccgcatcaaggaagcggctgaggccgaaagggaacgactatataatgtgcggcgccgaggcgtgacggaagaggaaatcctcgagcggtcggatcgcttcatggaggtggctgatcgctttgcaatgcttgcgtctggttcaagcggactgcaaggcgaatggcccaaggtctccatgacccaggcgaatgatggtctttattatcctgatagcttcgtgaccgatgacgaggccgtgcgccacgtcatcgtcaagctggtacgcagcagcgaccccgtcgatcgtctgatcctcgagggcgaagccatctattcgcgaattgctgaagagatcggtcttcatgtcagcgaaccttcgagccatgccgaaggggtcctgatcattccccgtttcgaccggaagacaagagaaggcggcggaaccgtcaggctggggcaggaaagcctcgtgtcggcgatcggcgtcgcggatttcggccatgttggcacacacgaggcgtatatcgacctgctgcgccaatattcagccgagccattctcggacatcgtcgaatatgtgaagcgcgatatcgccaatctggcgctcggaaatcctgataatcacggtcggaactcggctctaagcaaacatcaagatggcacgatccgtcttgctccattgtttgacttcgcgcccatgcggctggccaaggaaggaatcgttcgctcgacacgatgggccatgatgcgtgatggaggcgtcgatcacctccctgactggaagaagatctgcaaaggagtgatggccgttcccgatgagcagaaacgtatggcgagtgcactctactctttcgctgaacaactgcgacgggcgccgaaccttgcgagggacgggggcgcttctcccgaaattcagcagcgagcgatgacgcgctgcgtcgaaataacaaacagcgttctcgaggcctgctcatgacgcggaggtcgaactgatatatggcccgctggaagaagccaacaaaagaacaagttcttgaaaaccgccggacattggccgcgcgcgcgcgcaatggcgatttgcctttacccgaagcagtcggggatctccgcaagggcatcggcatgacccaagaagaattcgctaaatcgctaagcctcactaggcggcaagttgccgagattgaagctgggaccgcgaatcctacactggagacgttggagaagattggtcgcctgtttgggtttggagtcgggtttattccgagatcacgatcatgaaatagcaatatctccggttgcgaaaagcgtgattgacgtatccgcccaggtgcgctgcgggtcgctcaagctggcgcggcgtgccgccgtatcgggaaattcaatggcgccacgatccgactgcggtggctgcgtcgtaaccacgacgcaagtcgggcgtgactttcgtccctctgtccctgcgcggtcgttcaatgtgccgttgcgtttgaccacgccgcgcagcatcgcctcccagcggtcgggcgcatcctgcccctcgcgcagcaccgcctcgtcggcgctctcgcgctcgcaccaaggcgccagcatgccggcgagccatgacgcggccgccgaaaagccggggtgcggatcgaagaccgtgatctcggcgccgcgcgcgacaagcgcatggaccaccgcgaggccgccaacgccggcccctttgacggggcagggtagaacgcagcgcaacattgagccgatcaacgcgtttccgctaggcatggtgctcaaagctagccttcaaatcatcgattacgggcccagcggcaggattgaccattggcgcgagttgatgggagccgcggtggtcgtccggtcaatgcttgggttagctcgtctgcttatgaggaggcgtgcggagcgatggggccggagaaccctgcggtggctatggcctgcattttggagatcgaatatgatcgactcgccaggcgggtatctgcgtgaccacgcgaagcggtcggagcgcggtgagttttcgctcggaccgatgctgatggcgttcttaaaggtaaatgggatggaaggacgccgcgctggctgacggtgcccggttgactgacacgccagagggcctgagagcttgacgcaaaacttgacggccgttttattctggtcttttttcttctgaaacaacgcattagtgggtttgaagatcctcgcgtcgccgacttggcgtccaacatgcatcgagagatgggcgggagagtaacggcttttgcgcttgcattgcttatcggatggtcgcaaagccatgttgaagggcgccacggtcggctcgaaacgacgctggcaaatttaatcggagacaaaaggtctatcatgactcgccagctttctctctcccgggaccgtatttctgtacttctgctcgaaggcattaaccaaagcgccgtggattactttgcggcgtctggatacacgaatctcactcacctgccgaaggcgctcgatgacaaggatctcaagagccacatcgccgatgcgcatatcattggtattcgctcaagaacgcagctgacagacgagatattccaatccgccaaaaagctgattgcggttggttgcttctcggtcggcacaaaccaggtcgatctcgaggcggcgcggcgccgcgggatacctgtcttcaacgcaccctactcgaacacgcgctcggtggcggaacttgtgatcggcgagatcatcatgctggcccgacagatctttccgcggtcggcgtccgcacatcagggcggatgggagaaatccgctgtcggcagccgcgagctgaggggtaaaacgctagggatcgtcggttacggcaatatcggttcgcagctcagtgctcttgccgaaagcatggggatggtggtgcgctatttcgacctttccgatcggttgcgccggggcaattcggaatcgatggcgtcgctcggcgagctcctcgaaatctcggactatgtgacgatgcacgttcccgagacagcatcgacccaaaacatgatcggcgaggccgaactgcgccgcatgaaaaagggcgcgatcttcatcaacaattcgcgcggcactgtcgtcgatctcgatgcgctcgcgaccgtgttgaaggaagggcatctggccggagctgccgtagatgtgtttcccgtggagccggcatcgaacaaggatcgcttcgaatcgccgcttcagggtttgagcaacgtcatattgacaccccatatcggcggctccaccgaagaggcgcaggagcgcatcggccgcgaagtctccagaaagctggtcgaatattccgacgtcggctcgacgatgggcgcggtcaattttcctcaggttcagctgcccgagcgcccgaatggcacgcgtttcatccacgtccatgaaaaccgccccggtacgctcatcaagctaaacgagatattctcttcgcgcgggctcaatataattgcagagttcctgcagacccatggcgacacgggctatgtggtgatcgaggttgagggcgtttccgagacgtccgatgaaattctacaggcgctgcgcgcgatacccggcacgatcagagcgcgactgctctattgacggtgcgcccaggggatgcgccaaacagtctttcggcgaaagtcgttcagcccggtccgccgatgacaggtctattcgtttacgagctccccgaggacgagatacgctatatgaagctggtgctctcgaaacaatatgatccgcagctcaaggacgagatcagcgtgtcgctcgaaccggatgatgctgccccgcaagcgagactggcgacccgtaaagatggcatctgatcgcgtgaagtggacatggtgactctcgctcgcaagcctgccgtttctgatcgcggccgccattgtgatcaatgcatggcgaaacatcgaggattacagccgtcggatcgagaccgatgtcgtggagggatctggtcagctcgactatgccggcgcgacgtggcgcctcgagaaggtcagactgcttggcgatggacgcgacacgcaactgcgtcttcccggcaagatggctcgctcgccaggctggcggccagcttggagcggcaaaaacaagccctagataacagcttggagcgttcaggcgtttcaggcatttacccgcgcctcttggttgaggtgaatttgcacatgggggcatcgtgagcgatacgcaaaccaacacgctgacactgaacgacgtcacggtcatcgaggactccaagctgaagaaggcgatcactgcggccgccctcggcaatgcgatggaatggttcgatttcggcgtctatgggttcgtcgcagccacggttggcaaggtattttttcccgaagcttcgccagcagtgcagaccgtcgccgcactcgcaaccttctccgtaccgtttctcgtgcggccattgggcggcgtgtttttcggctctatgggtgacaagttcggtcggcaaaaggttctatcgttgacgatcgtcattatggcggtcagcacgttctgtattggcctgataccgagttatgcgatgattggcctgtgggcccccatcctgctgctcatgtgcaaacttgtccaagggttttcggttggcggtgaatacaccggcgccgccatatttgtcgcggaatattcgcctgatcgcaggcgcggttttcttggaagctggctcgattttggctcgatcgccggatttgttctcggcgctggactggtcgtcgtactgaccgcggcgatgagcgaagcaaatttcctcgcctggggttggcgcctacctttctttctcgctgctcccttgggtctcatcggcctttatctgcggcatgcggccgaggagacgccggccttcaccgaacgcctgaagcggaccgagaaggaagataagcaggcgttgtccgagcggcccatgatcccgatagcggagatcatccagaggcatcccaggtccctggcaatatgcatcggcatggtgcttgttactaacgtcacctattacatgctcttgacctatatgccgacctatctggcgaaaaccctcggctatacggaggaccatggcgctttaatcatcatcgcggtcatggtcggaatgttattcgtgcagccgctggttggatttttgagtgaccgcatcggccgtcggccgtttctcgcggttggaagcttgatcatcctcaccttgtcgttgccggcatttcatctgatagcgagcggcaacacgatcggcatcttctttggtctgttaatcctcgcgatcggtctgaattgccttgtcggcatcatggctgcaactttgcccgccttgtttcctgcgcgaattcgctacagcgcgctcgccatatccttcaatatctcgattatcgtcgccggcctcacacccactgtggcggcatggttggtcgaagcgaccgacaacatctatatgccggcgtactatctcatgattgccgcagccgcaggtcttctgacgacctttttcctgaaggagacggccaatcggcccctttatggagatacgccgaacgcttccagccgcaaagaggcaagggcgcttcttgcggagcattatctatacatcgaggaaagcgttgaaaagatcgatgaagcgatggcggagttggccgagcagatgcaacttcttcggcagaagcgtgaaaagctcgtgggccaacaccccgaactgaattgatcgcccacgaggtgtgcgaagcaggaagatcgcccccgagggccctgcccctggtgtgcttcggaccagacttttcgggccaattcgagttctgacccctcgcttgataactcgccgcatttcttcaccgacaatttcctccgcagtttacacgtagcgattgtctttgaggttacgcgaatgggagtacgctttgcgacgatcgaccccaaaaaatcagataacggtttgcaagccgagctcgaccacgcgtcctgttggaaggccgaaataatcggtagcgttacctgcgttctgggcgagtacgatgaacaggcgatcctgccagaaaggcatgccgcctttctttgatgggaggatcgtccggcgcgacaggaagaacgatgtcgacatgatgtcgaacttcagaccaagcttgcgaaccagcacaagcgcgcgcgggatgttgggcgtctccatatatccgaacgtgatcaccaaccggctgaacagtgggctgaagctttcaaggaatatcttctcgtcgtcaggaacgaacggctccgttgcggtcacgacgctcagaatgacattgtgctcgtgaagaaccttgtagtgcttgaggctgtgcagcagtgcggtcggtgcaccctcgacgtcgcttgtcaggaacacggcagttccggggacagtcgtcggcggcctcttcgtcagcctttgtatgatcccttccagcggtacctcgtccgcacgcgtgcgagacgccagtagtcgacggcctgccatccatgtttgcatgatgagggccatcgtgcatgcaaccgtgaccggaacccagccgccttccggaaatttggcgatgtttgccacaaagaacccggcgtcgatcaggaagagtggcacgatgatcgccgtggtggtgagcgtcgtccatctccagatgtgtttcatgacgacgaacaaaaggatgctggtgatcagcatctcgcccgtaaccgcgatgccgtatgcggcagacagtccgctcgagcttctgaaatacagaacaagtgcgataacgaacacgaataggaacgcgttcacttgtggcatgaagatctgcccggagtgcgtctcggaagtgtgcaggatctgcaggcgtggcagtaagttgaggtgcattgcctgacgcacaagcgaatatgcccccgaaatgactgcctggctcgcgatcaccgttgctgcggttgccagacacacgattggcacacgcgcccattcaggatgcatgccgaagaatgggtggtcggtcatgccaggatttgcgagaacgaacgcgccttgtccgaagtagttgagaagcaggcatggaaatacgagcgagaaccacgccaccacgattggtcgtctgccgaaatggccgaggtcgacgtagagtgcctcagcgccggtgacagcgaggaagaccgcgcctaggacggcgatagcgtgaccgatattgttcgatgcatacaaaactccgtgaagtggattgatggcgctaaaaatctccaaatcatcgagaatatggacggcgccgcttattccaagaaccagaaaccataccgccatgacgggtccgaatactgacgcgacaccacctgtcccaaaacgttgaacgaaaaacagtacggcaatgatcgtaacggtgatcggaacgatccatgccgacaggccgggcgcgaccacctggattccttcgacggcggacagaaccgagattgctggggtaataatggcgtcgccaaggaagagggaggctcccgcgacacccaagacgagaatccacgctggcttgtcggtgaagctctgccgggcaagcgtcatcagggacagcgttcccccttcgccccgattgtcagcccgaagaacgaacatcacgtatttaacggtgacgacgatagtcagggcccacacgatgagtgaaagaatgccgagcacgttctcccggtgcgatcccaaccccgccgtggcgtgaagtgcttcgcgaaacgcgtatagggggcttgtcccgatgtcaccgtatacgaccccaagggcagccaacaccagtgacggcagaccgttgcgcgattcagttgccagttctgggtcttcagagcgaagttgggggtaggtcaccgagcaatcctgacggaagcgactttgttttcaacattgtaggtgatgatatcgctgaacgctcgaacgttcgattggttcgatcggatgaaccacagcatttaagacttgccaaaaaggaaaagaggccgcgtacggctaccctgtttcgaacggtctgccacacgacatcagggcaggtccttcagcatccggatccggtttgcggttgtgaaggcaataaccttgtcctgctcgattgcccgcaacaccgctaggatttcatcatgcgtaaacccgctctcgcgaagcgggtcgctgatatcaagcaaactgatcgttaccttgcgcttcgccttgagtgcccgaagccttgcgatgagagcattctctgtttcgctaaatcgactcatgtgatgctttcgtttgttgcgtgtcctcgcgttgctctgcgcgccgcgtatcgacctggagagataccactctcgaggttgtcacgctaaagttcctcgacgtcacacaaatcccgtatgtccgccaaacgcaacctcttcatcatcaaggtttcccgtaccaatcctcttgctttctcccgacagtaattcgacgccttggtctgtttcaccttgagcgtgccctcggctttgtcccccgcgagcttcctcctcgccgtcaaatgctcgatcatcctcaccggtgaccaatcggtcagtcttcgcctcagagaatgcggcgtcgatcgcggactgccggttggccacccatgcaatgtccggttcggcgacagaaacgctctgatcgatccgcgtcgcatttgatggcgctgttggcgaaagcttggaaatcttctcgaccattggttctttctttaattatgccttctggaacgcttttttgccctcggcgtcgagtgccctgaattgatcgtcggtcagcgttacgtccgccgcgcggacgttctcctccagatgtttgacttttgaggtgcccggaatcggtagcatgaccgggctacgcttcaagacccatgcaagtgcgatttgacttggcgatacgctgtgttgctttgcaaccgtatccagaagagatccaggcttcgccaactctccggccgccagtggataccacgggatgaagccaattccgtgtttcgtgcaatagtcgaggacgtcctcgctcgtgcgatccaccaagttgtacctgttctgcaccgtggccaccttaaagaccttcgatgcagcctcgatatcagccaccgacacctcgctcagccccgcatggcggattaggcccgagtcgatgagcgacttgatggcgtcaaactgctctttagctggtacccttgaatcgatcctgtgcaattgccataaatcaatcctttcaacgcccaggtttcgaaggctcttgtgtacctgttgaattagatattcgggacgcccgacaggcagccagatatccgggccgtgacgggtgaggccacccttggtggcgacgattgatccatcgttataagggtgaagcgcttccttaatcagccattcggaaacatctggcccgtatgaatcggcggtgtcgatgaagttgaccccaagcgaggggagacgctttagcgttcggatcgcttcaccatggtctgcgggagggccccagatgccggggccggtcacgcgcatggcgccaaaccccaagcggttcacctccatgtctccgccgatcttgaacgatcctgatttcgccgcactgtactcggtcatcgccagactccgccgtcgcatgtagttgatcgatatcgtgaaggtagtggcgcgaggtggttgttaaagtggtcttgatgacattcttacacacgcgcacggaaaggaccaaccttacgcacggcggtttgtcggtcctcggccttacctgccgtggatcatgcgcgcgccagatggtcgaacaggtcttttacaatcggcgggacaccgcggctcgcggcgatgcagaccgagagatgccggcgtgcccaggtatcggccagcggcgttacggagagacctgatgtgcgcgtgcacctcctggcgacggtccctggaacgatggcaataccaacgccagcgccttccgctgagcatatgctttcgagtgtccgcggcctgatccggtatcgcagctttatcgcaagcctgttcgcctgcgcatcgatatgatcttgcagtgcgccgcgctccaagccgacgaaatactcttcaccgatctgcgcgaaccgaacttcctttgcggtcgcgagccaatgtgcctgggccgagacgacagcgagcttgctcacggcgaagggcttgagaaggagttcctcgttggtggccgtgtccgacaatacgcttatatctgcaaaacctgccgcgacgctgcgtgctatctcatggctttggcgctcgcgaagctcaacgtcgaccttagaatgcgccgcaagccatggtgacagccgtgttggaagcgtatcaacgacagccgccgtgttggcaacaatacgaatggtcgcccttatgccctttgcaacgaggctcagttctccacgcatcaaagcggcctggttgagtatttcgcgggcatggtgggaaagtgcctcgcccgcttccgttagcacaacacctcggcggcctctttccaagaggagaacctttcccgtcgcctccatttctcgtaaacggtcgctggccgcagcaagagaaagaccgacatcggctgctccatgggtaatgcttccggcatctgctacggcaagaaagagacgcacttcggtaaagtcaaagcacatcgagggatgctacaagcgattagccttcggtctaggcgaaggcttgatacgggaacgccgcattgtgcatgccgccgcataacctatgagagaggttatgaccggcctatcaacctcgaccctgttcgccctcttcgcaacgttctttgccgccggagcggttaaaggggtgaccggcattcgcctcccaaccgttgcaatgggatacttgggagcctgctatcaccgctcgcagcagcgtcgttgctcatcattccgtcctttgtgactaacgtctggcagttgttcgcggcaccacgtttcatgggcatgcgtaggctctggacaatgatggcgggtgtggtggccggaacacgcagcagtgaccggtactggtggagggcgaaaagtggtcgcccatcctgatgatgccatcttacttcgtcggttgagaccgcgcggtcagtttatttccatcaggatcgcgcagatatgcaacgaacgccccgttcggacgctcggagggcggactctcgattgctgtgccaccgttcgccgtgcccgcggaatgccaacttaaaacatggtctgggctcgtggcggcgataccgatggtcccgccgttggcggcagttgccggattgccatcgatcggtttcgtgatcatcagccgaccaccctcgtgggcgtagatcagcctgcctcgtgcatccatctcgcccggcttgcctcccagtgcggcgaacgtggcgtcgtaaaagcgtctcgcttgctccaggtcgttgctgccaatcatgacgtgggtgaacattgcatcatctcctggaatggggtctaacccgcgcgagcgggtattccaccgtgccaaccaaatccggacaaagttaggtcagatagcgccagccaccagtagcatcgctcacccggttcagtttcatcaaatcagcagcctgtcgatgcaatggcgaaaagctggcagcaaaagccttcagattggcgcattcctagtcgctgggagcttggatcaatccgagaacctaacaatgaccccacgctggcgaaaataagccttcatccgtttccgaccctcccgattactttgcacgagcttggtgggatcgaacacggcatctttctggcttgcacgcgtcagcgctgccttgagctctgcgatgcgctcgtcgatgtcggcgttgtcggcctgaagcgattcatagatccgcttcgttgcatcttctacggtcagttcactcattctcatgctccggctttccgtgtagccctcggctttacgccgccagctttagttcgagcttccacgtgtcctggggattgtgcttggactcgtggatcgaaagcccgctgccttccatatcgatttgcatcgtcgccaggagccaatcggcgggcatgacacagggcagggcttctttaccgataatatcgaggagctcgttctcagtcgcgaggccattgcgggactgctgaccagtgcggtcgagggtccataggtagcgtatggtcaaagtctgtagtccatgcgttattcgagcgccttctctacagtccgggtccaccaagatcaagttcggcgctttgtcacagttcaccgagatccggatgatcagcgtaaagactgcaggaaaaagcgtcacccttgttcacccctgccgcgacgtagcgttggttgagcgggcggtcctacgctgagctccagacaaattagggattgatctttcgggcatccaggagttcaccacgggatccgtaggaaaacatcgctcgccgattggctccacgctctaactggaaccaatcgagttcggaagctgaggaaaactatgactccgaagacgacctttccgctttcatcgccaccattcgctgcgtcagacctcttacctgtaggcgggtcgcccggtgggccgccagcgcaggttgaccgcgtccatggcgacagacgatcccgcatctgctgctaccggactccctggtccatggcgctccgctgtgccacgtaaccgaagttgctggccccgcgctgggtcaaacgccaaaagcgttaccgagggattggcgccaatcttgcgccatttgtccgatcgagtatccgtgtgaatctcgatcgtgcgcttttgcccattcgtagaccgcgggacgaccaggcgagcctgcggacgcccgtcggaatctaccgtgcacaggttcacatggcggaggccggagttcggatccgtgcctgcaagttcgagatcgatccaagcggcttcatcgagctcggttaggttcatgccgacttccaatgagatggccagatttcagaatcctgctcccggctgcgccaagtattcaagctcggcggccgtcgactgtcggccaagtgaccgatttcgatgcgggaagcggccgtatgacctgatcacctctcggtggcggatcgcataatcaaggtactcgtcatcgcccagttcggtgaacagcgcaacagagcgatcctgatgcgcgatatcctccgcatgttcgaacggcatgtagaagaaaacgcggagctctggcgagacaactttgtcgtggccagacctaagcgccaactcggattcggccaaggcaaggccgtctgtcgcgaatgcgagtgctgttccgcggtagatgttgcgagcaaactgatcgagcacgacaatcagcgcgaggtggtttacggcgttttcccgccattcggggctcggaccagctgcgagcgcaagatgggtgtcgcggaactgacttttgatatcagcgtcgagctcagtggcgccacggaaccagtcgtcgcggccgcacttcttgaaccagaagtgatagacgtcctcaggtgtacagatcgaactcacgtgtcctccttgcgccgcaggtagtttttgccatgcgaggctccctaaagcctaagcgcctctagcgcttcttcgccacttcaacaagaggccgatccatccaacgaaaagaatggcgtccgccctggagatcgcgcaagccgcgcttttccttttatcggaccgatcccaattcaggaccggcagcccgatgatcgtcgatggaggcatgtcaatccgcctcttgtagcaatcggatgtggtcgccgcgacaaccggacgtcgcggcggcttttcgccctaaagcgattgcactgcgagctgaactatcagccgaacgcgacgtcaggccgtgctacttatccagatcacgcggcggtccccgacagtcttgagaccagcacaacaccagcaggtcggcggttcagccaccttgcaacaagccggtcgcaagccttcagcgagtggataaaggcggcgggcgaggggatgtggtcgaaccggtccccagcgaacgctgcaccatgacactgtcggcccatcggccgtagcgatatacgacggctggcattaggccgacgcgcacgaaattgaaccttttgtgcaggtcaagcgacgccgcgttgtcggcgtcgatgtaaccgatgatctgtcggaaacctgccgccgcacaggcgtcgatcagaccgcgtaggagctggcttccgacgcttgccgatgtggtcgtgatgcacatagatcgaatgcttgacggtatagcggtaggcagggtgtttgcggaacagcacgacatatgcataaccgaccacggtcccgtttatggtcgggacaagttgcggaaagcgcctgcttgcaaggttcttgcgtcgatcgcccaggtcatccggctccggcgtatcgctgtcgtcaacgccctcttcgacgcctcggcaatcgaacgcaagatctcgcctgattttatgacggtgctgtgacgatggcgagaagtccatcaggagggcgggaaagaattgcttcaacaccacctctgccgcccgctcggtgccgcagcgatcgtcggcgtccttggaactttcattttattgagcaggttcgaatatagtcgcacgcacaaaacaagcgtgcgtttgccgtcacccctttggacggataaaattcgagctcgcgttctcctgcgagggctttcttttaccggccctgccaagagtccggctgaagttactccgccgcgtgacgcagcgaatagccctccagcggctcgacgagcgcaatgagctcgaaatcactgatcatgtgatgttggtcggagccgaggacggccaaggtccagaagtccggatcctcaccgaaaatcgtcgacacctgtacgattgtcgtccggccatcggtgtgtttgtcggaccgtgcccagtaaaatgcgtctggaaccaaactcttcatcacgtctactccccacacaatgaggccacgatatcacgaaattgtaatatgaccatctctcgtcttcgccacctacaacgaggataaagacgataccgtaggttattccgcggcggctttgaccgcggcgtttgcctggtctgcaaacttaccgagtgcagccttcggtccctgatagtcgatcccctggacaacgctgacagtcgtgctctcaacctcgatgcactgtgcgatgaaagcgccgcggccttcatcaccgcctcggacgaccacgagctgccctgggaacgtctgtacgtcggatgcgagccccgattgttccgccgttttctcgatcgtgctcccgcgggtctcgatgctcaactttgccttcggtgtgcgctccacgtgataggtcagattgaaattgctatcttgcgcaagaacaggaaccgtaaaaccaaacacgctcgctgcggtgagcagcagggcagaatacttcattgaaacgtctccgctgaaaggctggatgtcgccggggaattggcgctcggtcgacgaaagggaagagatggatgtgcgctaaccacccgctccagctcgaagggttgttcagatcggagcatttgctcgcttccacgttcagtccgcggcgagtaagcgagccaacgtttccttgagcatttccggaatagctggctttccaagccacagacccttttcgaatgcgtgctttgcatcgtcatcgacctcggcgccggaatacacgacgaagggcacgttcgcgtcagccagcgctgctacgacatcgacgcagaggccatcattcagtcttggatctacaactgcgacatgaggcttgttggtctcgagccatattaacgcctctgattgggtgtcaaaagaagtgatggaagatgcgccgtagcctctaagcatgtcttccatgtcgagcgcgatgaacggctcgttttcgagaacgagtacgtttccaagtttcattgctgcggctccctccaatcaatacgttgaccgagatctccgttcggacaaccagcactttatcgtgtcgagggccgttgcgctgttttgtacgctatcagacggtaacatctcgtagtcctccgcgttctccgcccgaacgggagaataaatacatgacagatatcacggtgaagagccgggcaacttcgaaccttgcaaagaagatcgaagcgcgcgtccggacggatgaaattgcgcgcgagacgatcactgaagaatgtgggcgcagggatgccaagaccgcgcggctgcgggccgcgcggatccaggcacaacaacaagagaggcaactgtaattcggcgcgcgacattcacatgaagcgccaaacgcggtcctgcatgatcgcgtcaacgactaaactggcgattgaatagcggcgccacgctcaagctttgcgaatgcagtcatggcgggaacaatcactaagatcgtcagttttctcactagttgccggtttctttggaaaatgcccatgacctataccgtctctgcgcccgcgctgcgggcattcaaatcacccttccgctcaatccccctacatttcgccgctgcctgtttgatcggcgcgcttcttaccgatatcgcgtattggcgaacgatgcagatgatgtggaccaacttctccgcgtggctcctgctcgccggggccgtgcttggtgccgtcggattgctggccgggctgatcgatgcggcgcggggtcttcttgcgctgaggactgcggcgggttggctctatggtgtcgggaatctcatcgtgtttggcctcgccatcttcaactccttcgttcatagccgtgacgcctggacatcagtgatgccgctgggattggcactctctgtggtgactgtcttgctggtgttgatcgtttcggttctgggcgcgcgcgtccgacgcctcgctgcgggaggatggtaaaatgaagtttctctctcagcgatatcgcatattcacggccggcctgttcgcgagcgccggtctattggcgctagccgggtgcagtgacagtgagccggagccgacggagatcggccctagcccgaaacttccggcccaggccgaatatttcgtgccgccgatgaacgtcgcgaaggtcgtcggttggaaagatggcgagacgccaaaggcggcggcagggctaaaggtccaagctctggccaccgggctttcacatcctcgttccgtctacacgcttccaaacggcgatgttctggccgtcgaatccacggcgccaaagggcgaggcgatcacacggcccaaagacctgatcgtaggctgggtgcaatccctggcgacaggaggtggcggtggcggaggcgaggccagcaaccgtattacgttacttcgcgacgccgatggagatggtgtggctgagacgcgggaggtgtttctcgatcatctgagttcgcctttcggcgtggcgctggttggaggcgatctctatgtcgccaacactgacgcaattgtccgctacccctaccgcgagggcgataccaagatcagcgaccccggcacggttctgaccgagctgccgggcggcccgatcgaccatcactggacaaagagcctcgtggctagcgacgacggtagtctgctttatgtcggcgtgggctccaacagcaacatcacggaaaacgggatcgaagcggagaagaaccgagccgcgatctgggaggtcgaccgtcaatcgggccgccaccggatttttgctgccggcctacgcaatccgaacggattgagcctagagccgcggacgaaagcgctctggacggtcgtgaatgaacgggacgagctcggcccgaacctcgtgcccgactacatgacctcggttaaagatggcggcttctatggctggccatatagctattacgggcagaatgtcgatccgcgcgtgatgccgcagcgtccggatctggtcgcgaaggcgatcgtcccggattatgcgttgagctcgcacgtcgccccgctcggcatgacattctataccgccgacaatctgcccgaggcctatcgaggcggcgcgttcgttggtgagcacggcagttggaacaggcatgctttcaacggctacaaggtcgtgttcgtgccgttcaaggatggaaagcctgatggtttgccgcaggatgtgcttacggggttcctcaacgagcaagaccaggcgcgaggtcgaccggtcggcgtgggcgttgacggtaagggggccttattggtcgccgatgacgtcggcaacacgatctggcgggtgaccgcgcagtgaaccgctacgatcggccggtgcgaaaccagggattaggcggcgacgcgtcacaacaggggcaagcaattcgctgaccgtcctcggcatttatttccggctgaggccgaaaagcgcacgatcgttgttcgagatcagaagacggccagtttgcgggcgatcggttgtgttttcggccggccgagcgtaaacatcgtcgagatgtcaaaacgatcaggcagcgccgacttaccgcttcacggcggacgcgttcctccatggctgggcgagcgcatgaccaaacttggcgttcttatcgcggaggcgattatccaccactatggccgtgatgagtttttgcgccgactatctcacccgttctggttccagtcgtttggatccgtcatgggcatggactggcactcttccggtatcaccaccagtgtgctggggtcgctaaaacgcggtttgaaaccgcgggccagggagcttgggctccatgtctgcggtggccgcggctcccattcgcgaaaaacgccggacgaacttgttgatgtcgggcatcgcgtgggtctcgatggcaccgggctcgccaatgtcagccgcctcgtggcgaaggtcgatagcgctgcggttcaggacggatttgatctctacctgcatgggttcatcgttgccgacgacggcaagtgggttgtcgtgcagcaagggatgaacgacgcgacccgccaggcgagacggtatcattggctgtccgaggggctggaacgcttcatcgattctccccacagcgcgatcgaggggcgaacgcagggcgatatcatcaatctcgccgacaagcgcgcggagcgttctcgcgtcggacaactggatatccttgcttcgctcggaccggatagaattgttcgggaagcgtccgcgctcgcccgcaaagtcgaggcagtacctgcgccggaaccggcacaactgtcgctgccacacctcgtcatgcccgctcatcacgatgtccgcgagacggatgtgaacatgaagcggctgcatggcagcctggcggcagcggcggatcgcggtccggtcgactttcaggagctgctgatggtcccaggcgtgggagcgcgaacggtccgggcgcttgcgatggtggcggaagtggtccacggagctccctgtcggttttccgatccggcgcgattctcgatcgcccatggcggtaaggaccgacacccgtttccggtgccgctgaaggtctatgacgaaaccatcagcgtcatgagatcagccgttgcgaaggggcgacttgggcgcgaggaggaacttgcagccctgcaacgcctggatatccaggcgcggcagcttgagcgttatgtcacggggcctgatctcaaggagatcatcgcgggcgaattccgagatagcgcgagcttcggtggccgcagcgtgttcggctgggaggaatgaccggtcacatcttggctggtcattctcaaagtgcccttgatgctagatcatgatctcgccgccggtcactggaatgaccgcgccggtcatgtagctccctagctcggatgccaggagcacataggcgcccgccaattccgccggctgacctgcgcggccgatcagcgtttgctcgccgaacttggtggtcttctccggtggcatcgtggatgggatgagcggcgtccagattggccctggcgccacggcgttgacccgaatgcctttctcggcgaccatttccgctagcccggcggtgaaatttgaaacggcgcccttggtcgacgcgtaggcaagcaggtgtgccgacggttgtcgagactggattgaggtcgtgtttatgatcgaactgcctgagcgcatgtaagggatcgcggccttcgacaggaagaatggcgcgtagatattggtgcggaacgtccgatcccattctccgtcggtgatgtctgcgatatcggcataggtccgctgaaacgcggcgttgttcacaagcacgtcgatggcgccaagttctcgcacggtgtgctggacgagatccttgcagtgatcttccgacgtgatatcgcctgggacgacgaccgcctgccgacctgcttcgcggacccactttgccgtatcctcggcgtcctcggtctcgtcaaggaaggaaatcacgatatcggcgccctcacgggcaaacgcgatcgccactgccttgccgatacccgaatccgcccccgtgattagggcgacctttccatcgagccttccgttaccgcggtaggaacgctcaccgtggtcgggaacgggctgcatccgtgaggtgctgccgggcggctgttggcgctgttcggggtaagggggtgctggtctgcggtcatcgctcatggtcgcctcctttggctgttcaggaggcaaacctacgcgagcggcaacagttcccactgtggtcatttccccgtcggcgactttggtcgtgatggaacctgtctccgaactccaggcttgcatttggagatcgcgcttgtgtcaaccggacgcgacagggatggtgaacgctgcggtttttccggtttctcgctgcgggcaacgaaacgccaggcgagcatccgacctgtccaagctgcgatttcgcctcaaagccaccgggcctgcggtagcacgaggaacaaagccgcggtggcgacgttagggtttgtagctaaggagaatgctaatggatcacacgaatcacgtgcgcctttccgctgccgagctgacagcggacaatcttcaaggagcgaccgtctatggcgctgacgaccacaaggtcggctccgtggatcacatccacggaacgaactcggtcgttatcgatgtcggcggttttctcgggatcggtgcgaagcccgtagccgtgccgttttcggacctcgactggatgcgcgacgaagatggcgatgttcacgcggtgacaagctggacgaaggatcagctaaaggcgatgcccgagcatcgcgattgagaaggctggctcggttcaatgccgggccttttcatggcctatttttgatccccgcccggcccgcctgtgcaatccacattcgggactcgtcggtcacaagcgaagcttagcctgactaatgccgggtaacgtttgtacggtggtgcccgaaccagcgcgcgctggaacccccgagtggagcgatgtttcttgcatccgcagggaggaaaacatgccgatcaccaagtggggaaatccagttatcatcgtgaatgggttaagccggagactgtagcgggccctttcgaagccatgatccatctgacggatggctggccggagcgcaccagcgcgttatttatcgaggctcgaaacgcgtgccgtgccgcggtagcaggcctcatcgacggcgatgtcgctcaaatcaagtttttggctgcggtggaagcggccaagccgggtgtcaactgacattcattttcgtcgggtgactttaggagccgctgcttgtcggccttccaactgcaaatgttcatctgtgcgccaccgtacaaaattcggctgacgactgcggctcgttatactcgtggaacatacgcgcggccagcgattctctaaatcgtcgtcagcttcaaacctggcgcgacgtgtgtgcggctatccttgccttccgaaaattccttcatatttcccaagacaaacgcccttggcgacgaacttccaggaacacaccttgccagcaactctttcttccggaaacaaaggccttgatatcatcctgaagggtggactgccgtcgcggcgcctttacctcgttgaaggagcgccagggtcggggaagaccacgctggcgctgcaattcttgcgagaaggcgtccgtcagggtgagcgggcgctctatatcacgctttctgaaacggaggaggagttgtccgccgttgcaaactcgcatgggtgggacatcaaggagttcgacgttttcgaattcaactccgcgtcagacgtatttggcgaaggacgagaacagtccattctgcatccatgggagatggaactcaccgagacgatccggctgatccaggatgaggttgagcgggtcaaaccgaagcgggttgtgttcgatagcctttcagagatgcgcctgttggcccaggacccgttgcgttatcgccggcaagttcttgcattgaagcagttcttctcgggacgcgacacgacggtccttctgattgacgacatgaccggcaacgccgaggagcgggatgctcatctccatagtctctgtcatggtgtcatcaccctcgaacggctgacgctggattatggcgccgcccgccgccgcatgcaggtgcagaagctgcgtggcgtcgatttcaccgccggatatcacgacttcaccattaggaaaggtgggctcgaaatctatccgcgcctcatcgccgccgcccatcacgcggatttttccggagaagtgacggcgagcggcgtggtcgagctggaccgtcttttgggcggtggtccgcgacggggaaccagcacgcttctgacggggccggctggctgcggcaagaccacgatcgccctgcaatatctcttcgcagcctgtgagcgcggcgagccctgtattgtttatgaattcgacgaacggatcggaacgctgcttgcccgtgtcaaggcgttcagcctcgacctgcaaccccatatcgatagtggcctgcttgtggtcgagcagatcgacccggcggaaatttcccccggcgaattcgcgacccgcgtccgcggtgaggtggaggcgagaggcgcacgggtggtggtggtcgacagcctgaacggctacatggccgccatgccgcaagagcagcatctaatcttgcagatgcacgaactgctttcctatctcagccagaaaggcgtcgtgactttcctgatcaacccgcagaatggtctcgttggaagcatgtcgaccaacctgaatgtatcctatatcgctgataccgtggtgttgcttcgtttcttcgaggcggaagggcgtgtcagaaaggcaatatccgtattgaagaaccgcagcggcatgcatgaggataccattcgcgaactgcgcattgacagtggcggcatcaggattggcgagccgctttcgcaattcaggggaattctgacggggacacccgaatacatgggcgcgcggggtccgctgatggaagatcgcgaacgtgatggctgagcgactgcgagaaggttgccgaattctcgtcagcgctccgttcgggcgcgatgccgacagcgtcgcgacgcttttacgccaagaaaactacgacgttgtcgtctgtctcgatctcgccgaggtgggagaagcgatcgacgagagtattggcgcaatcctcctcacggaagaagccctcgtcaaggatgtcgataagctcaagtcggcgctggacgctcagccttcgtggtctgacgttcctttcgtgcttctggcagcacctcgcaccagccgagcgccgaacgggcgtctgtctcagttggcgctgtttgatctcgcaagcaatagcgtggttctggagcggccgctcggtagagcctcgcttctcagcgccgtcgcgtccgcaatgcggctgcgctccaagcagttccagatgcgtgaccgcttggcggaactagacgagagcgaaacgcggctgcgtcttgcaaccagcgccgctggtgtcggaacatgggatttcgacctcatcaccggtgagctgagatgggacaaacgctgccgagcgatgttcggaattctctccgatcggcaggtttcctacgaagcggggttcttggccggactacaccctgatgaccgcgagaggtcagaccaagccgtcagggatgcgctgcggcccggcggttccggagagtatgagatcgactatcggaccatcggaatagaagacggtgtcgaacgctggatcgcggcgaaaggcggtacaattttcgttgacggcaaggccgttcggttcgtcggcacggccatcgacatcagtgaacgcaagcggacgcaggaagcactggctaggtcggaggctgcattgcgtctcgagcgcgaagcgctcgatgatctcaaccgaaatctcgaggcgcgtgtcgtgcagcgcactgcggaacttgaagaggaaatggccgcgcgcagccgggccgaggaagcgcttcgtcaagcgcagaagatggaggcaatcggccagttgactggagggattgctcacgacttcaacaacatgttgaccggtattatcggcggtatcaatctcgccaagcgccgcatcgcttccggtcgcgttgaggaggttgggcgcttcatggatgccgccacggagtcggcacacagggccgccgcgctcattgccagacttcttgccttctcgcgccggcagaccctcgacgcaacgtcgcttgacgtggcagctcagctcctcgctacgaaggaactcctggaacgaacccttcctgaaaccatcgcaatagagctgaaagtcacggctgacgtgggatatgccatggcggacgccaatcagcttgaaagcgctctgctgaaccttgctatcaacgcgcgcgacgccatgcctgatggcgggcgtcttacgatcaccgcggagcaatgccgggtcgcggcatcggaagccggtgggcttgacgcggggaactacgtgatgatcgccgtagaagataccggcgtggggatgcccccggaaatcttggagaaggtattcgatccttttttcacgacaaagccgatcgggcagggcaccggtttgggcttgtcaatgatttacggcttcacgcagcagtcgggcggtcaggttcgcattgacagttcccccggacaaggcacgtcgatcaagctttatctgccggccgcattgggcgctgagacgcaagaagagcaaggtgatgccgaaagcccttcggaggggagcggccagaccgtgctagtcgtcgaagatgacgacgctgtccgccttttgatttgcgaggtgctcatggacctctcttatcgtgttcttgaggccgaggacgccgatgccgcgcttcgtacgctgaccgcaacggggaggatcgatcttatggtgtcggatgttggcctgccagggatgaacggcaggcagcttgccgacgttgcgcgtcagcataggccggatctgccggttctcttcgtcacaggatatgcggaaaacgccgccaccaaggcaagcttccttgggaccaacatggctatgatcggtaagcccttcgctgttgaagtgcttgcatcgaagatcaatgagatggttaaccctgcccatggggtcgagcaagcttagctgcttgaggcgcataatcggacaccacagggcccgcttctgcgggccccggtagccgtgtcaccagcagggcgaccgaacgcctcaactacttgcaggtatttgccgggtcggtgccggttgcattgttgttgctcgatggattggtcgttccgccagcaccgcgtcttgcgcagtcattggcgtcgcccccggatgcgccggaattctggccattcatgttggtgtcgttgttcattccattgccagtgttctgaccgttgccactgttcgagccggcaccgtccgtgccgcttgttgcgccggtgccggtgccgcttgaggcgccagagcctccagagctggtaccgccacttcccgatcctccggatgactgggccatggcggatgtcgccaagccaatcgacaggaatgagaccgcgagaattttcgtgagcatcgggatttcctccatttgattgcttacctggacccaacttggagaaaagttagtagttcccgcgagagggacaaagtctgtctaagggcgaggtacccacgccatcccgcaatgcatctgatgtagaaatgtctgccagcgtacccaagaacatgaagaacggcaggatgttatacagccgacatttttcagcgtgtgaggaatgctccgcatgcctcatccgatacaattgaagtctcatgttcgcctctgaccaatcaaccatgcacaaccggctactggctcgtctgcctgatgcggaatttcaggctatcctcggcagtctggaaatgatcgaccttcgacagggtcacgttatcgtcaacgcgaacgggcccatcgaccacgtctattttctgtgtagcggtatcggttcagtcatcaccgtgtcgtcggatggaaaccaggcggaggccgggatgtttggtcgcgagggattttccccgacatcagcgggcgtcggcgggactgtgagtgtccacgaggtgctgatgcaggtcgccggttggggctacaggatgacgttgggcgcaacgctcgaggcaatctcgtcctatcccaacttcgcaaacctccttgcgaggttcatccagacttttgcatcgcagatctcttacacggtgctgtcgaacgtcaactatcagatcgacatacgactggcccgatggcttctcatgtcgcatgaccgcgtcgatggtgacgagatagcgctcacccatgatttcatttccctgatgctcggtgtcaggcgaccgagtgtcacgactgctttgcacgtccttgagggagagaaattcatccgctccgaacgaggtctcatcaccattcgcgacaggcgtgggttggaggagtttgccggcgattcctatggcaggcctgaggaagagtatcggcgcctcattggacgattctagcgcggcagatcagaccggtcatgcgggtggcaacatttccgcatgggaacctttcgttcagcggtgttaaaagagaggcgcgtattgagacgttccgtacgctggcagacgatcgattgccttccgctcttcacgctatactctaaaccgcatgcaaaaagcagagagcccacagcttcgccggcgcgagtctatcagcgctgaggagcggcagagacgacgtgaagcaacgtcgcagaacgcactggctgcaaccaaggccgaggcggaagcgcggcgcctgaagacagagcgccttcgggccgcgcgcgaggccgctcggcctcaaaacgacggcgatgtcgttgatcaagcatgacgaagcggtcggtcagcaagggacctagtcaaatttgatgacgtctcggaatggaactgtactgagaacgtttcccttttcgtcggtaatttcaaattgcattccgtcgatacgctgatcatacaaaataagttcggcgaccatctcgcgcgcggatttcgttgcttcccgcctcgctgcttcgagcgatggaaggtcgatcccttcgtcgtcggcatcgaaactttcgtctgagcgaacattgaaaaagaaaagcattctgtcctccataagcggacaaaacgaatgctggtggtcagcggttccatggaaagtgaacggcatcagccgcttatgagaggttctaaagctcaaccttcgagccagcgccaagcaagcgctcgaactcgcgttcaggcagcccataacaaccggccgcaaatcgctccagacccccgcggttgacgacgatgatcgttccgcggttcgaacgaataagtctgtggccttcgagaatgtgaagcgctgtcgtcacactcggtcgacggataccgaggaggaaggcgatgtattcgtgcgtgatctcaaggacgtccgctttcacccggtcgtggcacatgaggatccagcgggccaaccgcttctcgacgcgaaatttggcgtttgcgagcgcggtgtaagagacctgcaccgcgaaaacgtgcatgaacttgatgaaaggaatctgaagcgtggcgcttcgttcagtcgcctcgcgcattctgtccacagagatacgatatccgcggccagcaacctgcatttctatgaggtatggcaccaccgtgtcgccaatgaccgtcgatgtcggcacaaacccctcgctgccaaacatgccggcctccgccttcttcccgtcgggcagcacgctgattacggcgccgataccgctatctggaaagtagacgtactccagcaaggtgtcagggcgagcgatgggaaatcgggaaggcatttcaacttcttccagatatggtgccagaagcttaaaatcctggtcgctcaaggatcgcagaatccggttggacatctgtgctttttgcattcgttcgatcaactccgcctgtcgatacgcgccacggctctgacgcacgcactatcaaattgtcagaacaattcggacgacaaggtcgcagggacgaaaatgctcgctggtgtcacgcgtaaggtcgacggttactcgctttcactgagctacactcttgacataatagttggtgtgtccggccattgggccgggcacaccgtgtttccgcaaaacgccaaagtgtggcgcctatgatcgccggcagggacccgcagacactgcatcagttttcaaccacttcccggcgagacgctggcgtcgtccttttcgggcaacgaacctgtccctggggtcttcgtctcgtcggtgagatgatcttgtgcatgcggaccggcggccgggtgatcctgaggtttcgcgggctttctgtccgtttcctcgatgtcgcgtcgcgccttcttgtccttgtccatgacccactccctcgatcaaacccgaggaatgggctggtccaaccggagcccacccatttcacgctcttcgggagacttctcaccctcagcgacgtcgcgttgatggcccgtaggcaaaacgtcgtcgcgaatgtcgtcgggcagctcctgatccagttcgtaggcgcgaacgcggggtgaggtttcatgggtgctgcgcgcgtattggtttacgcctgccgcttgcgtggctgcccctgcctcattgagacctggctcgccggtaaagctcggggccggcgtgacttgcctcgctgtccagccttcttctctccataggccagcgcgctcgtccatgtcgatggcgccgtgctcgtccagaatgtcatgggctgtttcgtatgtcgcatcgtctaccgaggccgataccaggaagccaccccggcggaggccttccgcgtagatggagcggtcctcgtcaggaaagaaccagtccttcagcgcatcgaagaagccgccgcgatcgtctgccgcgacattggttttctcggcatcagcttcatagccggccatgaggcgggcattggcgacgcctgcgtcgctgagacgctcgacagcactttctgcttcggatcgggtgtcaaagaatgcggtgagggtgcttttcgcgatgccgtgcgaggcgtcgcttgtgttttcgttataaatgttggccatggtttcctccatccattgatatccgggcaactcgtatggtgcgccaatgttccgtgtactgctggaagttgaccccctttggctcttgggaactgtatctggttggctcacccgcgcggtatgtcgacctgcccgttcttctcaccgtcccaataatacacggacgatgccgagacctttatcagaacgaggccaggcgtttgggtgccctcagggaaccagcggtcgaggcccgaaacccagtgagcttcgaaggatgccttatccttgacgatcgacgccatcccttggatcgcaatgaagatgcccggtttgcccagaaggctcggaggctccgtgaaggtgagagagacatcatcgatgccgttgatctcgctgatcttgcgagtgttttcataagagaagaaccaggaatcgccgtcgtattcgacgtcgccgttgttgctcatcgggcggctggaaatcctacccgacccgctctgggtcgatagcatgcagaagtcgatcttcctgatcttggatgcgaggtcttcgaaagtcatcgcggacatggctgatctcccgttttcgtgtgcgggatatcgtccacgagacccgattgttccgatacgcagcaaaccttttgcgcggaccgacgttgtgtttgtgagcaacgaggagatcagcaatgacccaatttgaaagcagacagagcgaaaaggtgatcgaaaccgcgactgaagccagacagggcagctacggccggccagtattgatggtgctggtctgcagtctcattctggcgctgcttgcgtggggtggcgtcgaaatgtggggtgagcgtcaggacaccgacaccaacccgacggcgtcaaccaagcaggatccgatcaattctcagccatcgggacccggcgccttcgacaataacgcggccgatggtagtggccgcccccccgcaggcgactgatcgcgcccccaacccctaggttatggcggcataccaacacaggtaacgacgccaaacgcttcgcggtagctctgctcgccatcacatcgccgcggcagggagcctgctgccggctctacggtcaaagttttaggggaggatcctcttcatgtcgttccgtcccaggaatagccggcaaccaattctctcgccgtttcgtccagacttccatttcgggagtcagttcgcttgggacgttgtccagcgatccaaaacgaatctcgacgtcatcatcgtttaggcaaaaaaggcgtcctccgcagcgcgggcaaaagctccgacctgcgaatgtcgatatctcaccggaataggtgaacgcatcgcgacgccaatgcgcgaaggaggtgaatgaagatccgctttccttgcggcagtccgcgcaatgacaaattcctatacgaaagggttcgccatcagcctggtatcgtaccgcgccacagaggcagcctcccaaaaaagtcatgcctgtaacctccttgactttgcctgcgccccgattggccaggcaaccagctctccgcacttgtcggcgatgtgctggcgtgcgcggttgacgcggcttttgacggtccccgccgcgcgatgaaagtgctcggcagcctgtttataggtaacgggcagcccgaccagcgtctcatcggcatcgagaccaatgaggtcggccaaggcagtatccgcttaaagaacattcctttccaggcacacgtccagatgccgggttcagccgtcaattgagtagaattcatcgtgttgtgcgcctttcgagttcgttaccccggtaagcggccactcaacccaagggtggttcagcgaataactggtgcgaatggctacggtttgccagagatggtcatgaaacgtacattctcgatcgcgaatttagcgagtttcgaatggcgccatggcaaggcaatagcgtcaggcaagcactttcgcttcgatcgccgcggcgatgactgcctctttaactgcctcgcgggcatgccgaaggctcgatcttcgaggcatcggcgccgtgcagtatcgagcacaagcgaatccgtcagtggccagcggtggcggaagtaatgcaatgcctcgtctggaccgtggatgagttcggagtggccgttgccgatccgtacggagataggcgctgcccggtgagtttccacgggctttgcattgatcgtcatgttgcacgtccaatccgggacaccatcgtccctcacggtgatcgtcgcctccaccttgaacaacgaccgcgcggcggagttcccgtttgagatcgctttcttggttggtggcttggaaagctgtcagtcagttgatagtcgagcgattttcaaacccgatcaccgaaaatcgctccctcaacccatcggcgatcgcggtcgcatcgcgacctgaacggccggatgtccagcggatttcgaacatcagagcgtcgccgtcatcgatctcccgcagagtggtgaagcaggcggtggaacctgatgggagggcggccctgatgtcaggtatgggtgagcccttaggcaccttgatggtcaccgagctcttctcttcgcacgacatccattgctgaatgtgtctcagcggcgcgagaatgagaagggtgagaaccgtggcggccgcgcctatgacaatctgtccgccgccgaaacagaggccgatcgctgttatcacccagagcgttgcagcggtcgtcaccccggtcgcgatatcgccgcgacgcagaattgcgccgccgccgataaaaccgacgcccgtcaatattccgagcggaaagcgcaggatatccatcgagccgttgacgccctggctcgtggccaacagcatgttagcctggatcatcgggatgcaggccgcgagcccgacaagtgtggttgtgcgcagcccggcggcgtgaccgccttgttccctgttcgcaccaatcaagatgccggccagcagggtcgccccgatacgaagggcgatctccggccagccgggggtgatcggcatcaggtcaagcacggcgcgatcctatttttcagcgcggctgagaaggacacgcatctcttcgaagcggcgcttgcgatccccgtcgtcgacggtcggtgaatagcaggtgctggatacgcagaagcgcgccaggttgtgcggtttgtccgccttgtcgaattcgcattcgaaaatatcggtcatctcggccggcgccgtaccctggcgcgtcgagtaggacattcggacaccaggcggtttcaactcgggaaaggactggaccgtgccgatggaaagctgatcggtcatgaaaaagctcttggcaacggatttacaggtatcctcgagctcgcttgattgcgcccttgccgttgcgggtagggtaaatacgacaaatgcaaatagaataatcggcttgcgcacgggcacttcctccactgtctctgtcgatggaggtagagcagcgaggccaaaagcaaatggcggtccgtgcgacgacgacgatcaaggagcgccaggcggcccatcggctaggtactgcgtggagtatgttttcgcaacccgtccatgatcaggcgaacgatcctgtgtgcccgttcgcgccagtcgggcgtgtccgggatcgagtaaatgccgaacagcgtgtagagaacgtcgcttgcctcgagatcgtccttgaccgtgcccgcctctatcgccgcacgaagaagcttgtcgaaggcggctgtcacgcgcgtcgttccctccgtaaagagagcggcgtttgaggtgaacagcagcttcaggctgctggccataccgcgctttgccgccatgtagctgacgaaacggtgcatccactcatcgagcgcgatatcgggtgccttttcggccaagagttcgaccgcggcgctagcgagcaattcgagttcgcgccgatagactatctcgacgagatgttcgcgggttggaaagtgtcgataaagcgtaccaatgccgacacccgcccgccgggcaatctcttcaagcgaaacatccgtgccgcgttcagcaaaggctttcgacgcgacctcgaccagtttggcgcgattgcgctgcgcgtcagcacgtaaccgcggctgttcctgcgcttgcgatgcatcctctttcggtaacaatttcccaccccacgacagggcttgacgaaacttcgtcagccactacctataaacggaggctcctccgtttgtgtcggggtgccatccaatttctagtgaggattgggatggatgtcatgtccaaactgggggcacgggtcgcgaagtcaacctgtgatgttcgcgagttccaggtcttcttgatatttgaggctacgcacgccgcgatcggtgggagcgtttgattatgatatcgacacaccgatgggatcgtaacccagaaagtcgaaaggcgttccctgagaggctaaacgatcgacagccacaattcgaacgacctttcggcgagaagatatcgcccgcgccggccaaagcgttctcgacggattctacggtcgaggttctcgattttgctgtgaaggcaacgctcgccggccgacaagttgcgttctgcacgctcgtcgaaattcgcggcggttcgtcacgtgctttgggcgctcatatggcggtggccgatgacggcttgtacggcggttacgtctccggcggctgtaccgaggcggcagttgctgccgaagccttgcaggcgatatccaaagggtgtgatcggttcgtcatgctgggcgagggttccccgttcttcgatattgtcttgccgtgtggaggcgggattaccgttgccgttcacgttgtgcgagacattcgaccgatccgaaatgtgatcgaagggctgggctgccggcgcgatgttggcttggcttatagtccgagcaaccaatcgctttccttcgttttcggaaaagccgacaccggttgggatggtgaggcgttcctgacattttaccgtccggctgttcgagtcctcctttcaggccgcacgctggaggtcgagatcgcctcgaaggtagcgcgggcggcaggttacaatgtccttcaatatgatgcggccgccggcgagcgacctgacgacacgctgatcgacgcggacacggccgttgcgcttctacagcacgatctggaccttgaaatgccgatcctcgaagccgccctgcgtggccagccgttctatttgggcgccttgggcagcagccgaacacacgagaagaggatggagcggcttcgagaacagggacattcgcaggaggcgatcgaccggatcaaggcgccgattggcctgttcggccgtgcccgtgacgcccattcgctggcgctttcggtggtcgcggatatcgccgcttgtcgccaaaccgtcttgatggggacttgagcgaacttcatccggattcgtttctgcggctcaacatcgccaatgcttttcaagccccaatgctcttcagtcaaaggagatgtctcatgcattttatcatcaatggagaggatatcgaggtggaggcggacatccgcacctcattgctcgatctcatgcgcaattatctggatttgatgggaaccaagaagggttgcgatcaaggagcatgcggcgcctgcaccgtgctggtggatggcgagcgcatcaattcctgtcttgcactggcggtgcagtatcagggacgcggcatcaccacggttgaagggcttgcggtcaatggcaatctccacccgatgcagcaagcctttatcgaacatgatggctttcaatgcggctattgcacaccgggccagctctgttccgccatcgggatggcgggcgagatcgaacggaatattccgagcgctgtaaccagcgatctcaccgtagctgatactccgatcgacgatcgtgaaatccgcgagcgcatgagcggcaatctgtgtcgatgcggagcctacaacggcattgtcgaagcaatctcagaagcgttggcccaccagacggctgctccgaccgaggaaagggtgcgggcatgaatatcttttcctatcagcaggcgtcggacgccgtttccgcgatcgctttgaagaaggccggtccggccgcgaaatatctgggcggcggcacgaacctcgttgatctcatgcgcgaaacggtcgagcagccagggatgctcgtcgatgtcacacaccttcccggcgatatcgaacagcgtgccgacggcagcctcctgatcggcgccgcggcgaaaaacacatcgctcgccgcgcatttggcggttcggtccgatttcccgttgctttcgcgctccatcctggcgggtgcaagcgcgcagatccgcaacgtcgcgacggtcggcggcaatattatgcaacgcacccgctgtcggtatttttacgacaacgcggcgcgctgtaacaaacgcctgcaacaggcaggatgcgacgcgcttgaaggcttcaatcgctaccacgctattctcggtgcatccgatagctgtgtcgccactcatccctccgacatgtgcgtcgctctcgtcgcgcttgatgcggtggttcatctgcagggagcggccggtggccgcagcatgccgctggccgaactgcatcggctgccgggcgatcgtcccgagattgaggcggaattgcagactgatgaactgatcacggcgatcgaaatcccgccgctcggctttgcacgccgctcgacttaccgaaaggttcgcgaccgcgccagctacgccttcgcgctcatatctgtcgcggccgctctcgacatcgacgaggcgggcaaggtgcgtgatgttcgcctcgcgctcggcggcgttgcccacaagccatggcgagccatcaaggcggaggccgcgctgaagggacagcttgccggcacggaaagcttccgcgccgccgccgaggccgaactcgccgatgccgtcgctctcagcgaaaatgggttcaagatcgaattggcgaaacgcacgattgtcgccgtgcttgacgaattgaagggagacaacgtatgagcgtccaacctgaaaccgataacaataggcccggccgctggcagcctgccgtcacacccgatcccatgctgcgcaaacatggcgctctcgggcagcctgtctcgcgggtcgatggtcctttgaaggtacagggaaaggcgcgttttgccgccgagtttgcctatgaaaacataagctatgcggcactagccttcagcagcattgcgcgcggtcgcatcaccgaactccagaccgcggctgcggaagcggcgccgggcgtcattctcgtcatgacctatcacaatgccccgcgcatgaaggcgccgtcgttgatgatgtcttctccgacggctgccggcgccagcgacctgccggtgatgcagaatgacgagatccactggaatggccagcccatagccctcgttctggccgaaacgcaggagcaggcggatcatgccgcctcgctgatcaaggcgagctacgcaagcctgcctgccgtgacttcgttcgatgaggcgaaacaaacgccgcggcagttggaaacgctgcttggtcagccgccggtgctggagatcggcgatgccgaacaagcgctcgcaaatgccgaggtcaaggtcgatttgacctatcggaccccgcggcacaaccacaatgccatcgaactgcatgcggcgacggtggcctggaagggtgatgcgcttcacttgcatgatgccagccagttgattgatctaaccgctggtcaactcggcgatatttttggcttggaacccggcaaggtgcgtgtcacctcaccctatgtcggtggcggtttcggcggcaaatgtctgtgggatcaccagatcctcgccatcgcggcctcgaaactcgccgagcggccggtgcgcatcatgctctcgcgggaaggcgtctttcggatcgttggcggtcgcacggtgacggaacagcgtgtggctctcggtgcgcgggcggatggcacgctcgatgcgctcatccataccggcaccgcggcaatgacaccgcacaattcctgcccggaacagttcaccttcccggctcgccatctctacgcggccaagacattcaagctcgcgcaggatgtcgccgacatggacatgctcgccaacactttcatgcgcgcacctggtgagtcggtcgggacattcgcgctcgaatgtgcgctcgacgagctggcggaaaaactcgacctcgacccgattgaattgcgtcgccggatcgagccggaaaaggacccgaccaccggcaagccgttttcgtcacgctaccttatcgaagcctatgaacagggcgccgagcgtttcggctggcggaaccgcagccagacgccgcggcagaaacgcgagggcgaatggctgatcggcatgggctgcgccaccgcgacctatccctaccatcgcttccccggtggcgcggtaaagatcaggctgacgtcggaaggtcacgtaaccgtctcgaccgcggtgcacgacatgggcatgggtacggcgacggcccaggctcagcatatcgcaggccgcctcggggtgccgatggaagacgtcaccttcgaatatggcgatagcagcctgccgcgcggggtgattgccggtggatcgacccagaccgcatcgatcggcggtgcggtgatcgcggcgacggaagtcttcgtcgaggagttgatcaagctcgccggcaacgactcgcctctcgcgggcctatcgctcaccgatgtcgagccacgcgatggtggtctcggtcatcgcgacgatcctggcctgttcgagagctataagtccattctcagccgctccggccgcgatgaactggtctgccaggccgaggcaccgccgccggcggagatggaggccttctccatgcactcttacggcgcccagttctgtgaggtcagggtcagcgccctgacgggcgaaatccgcgtgtcgcgttttctcggttccttcgacgccggccagatactgaacgccacgacggcaaccagccagttcaagggcggcattgtaatgggcatcggcctggcgctcaccgaggaaaccaatttcgacgaaaggaccggccgagtggtcaatgcatcgcttgccgaatatcatgtgccggtgcagatggatgtcccaaagatcgacatcctctacaccaacacacccgatccgtgggcgccgatgggtgcgcgcggtattggcgagataggcattaccggggtcggggcggccgttgctaacgccgtttacaacgcgaccggcatccgagtgcgcgacctgcctatcactctggataaggtgctacgggaactgcctgtttgagggtattgagattgcgtgctttgacggctggggcacaggcagcgatgaagttttcgtggcctgcgcgtcgccaacgcgagaagggacgggatcagtatctcgttagtaaggaaagagccgacttcgcccgaagctttcctttcgcaaggctccgtgagcctgcgactgtgccgttcatgttaacgaggtgcgccagcagccgcctagatgcgcctctagatcttgcaacagctcgctcacggatgctcggggcaagttcattatgtcaacggccttcaagaaggaaccggttacggcaacccggacgaaagtgcgaatagcgagtatctgatctgagaaacgtcctatgactaggtggacgatgatagctttccacgctcactggataagccggaccatgcaagttcttgcgaaacgtgggcaaacttgcggtatttagagggacttcagcctaagtagctgcaggtatacaagatcggcgtactggaccgcactcctgatcagatggcatcggttgtcgaggaaattccggccgttgaggcgacgcaatccgctctttgctgtatcgctgtcgaaggacacatgtctgcgtccgtgacacgtgttgtgtcgacggcccatcgcaacgcggcgggacaggcgctgttcagggctgcgggcttccgtcccacgataatcgagatgacgctttcctgaactgcgaggctggctagaaaatagccggacgctggaggcgatattccctgcaaaatgttccatgtttatgcttacctcgcaatgtggaaattagatatccagcttgtttcgcgattcggacgcccatagttcttatctgccgattgccgcagttcatcgatgccacgttacggcgaggccagagggcgcgggccggtttcatcgctagtagtgtcgtcgttcgggcggtattgccgccaccgacgagcgagtccgggattatcacttaccggtcggcggcattgcgaggagacgcacgtgagttgctactcactggttttgcagtgcgatccactaaagatcagcccacctggaacagtgtttgtcaaagacgatctacgtaggaggtgatgcgggccacgatctctttcagggtgggccggccatgataatatagggccgacgtccgctcgtaagcgcgctcgtagactccgaacgtctccggatcggataggctgaacgcgggattgctgccgatgtcctgattgtcggccttcggaaagcgtttctgcttgtgggcaccatacgcgtccgagccgaggaaagcttgcacgtccggttggtctagcaagcagtagacgtcgtaataatgtcggaggaaattggcggggaactggccggtttcctgctgcttgcgatatttagtggagatggtctggagcttctcgaccagcgtgtagccgggctcgtagcagggaacggccagtgcgcgattattgatcagctcgacgcgcgatacagcgtaatcataggcccaggagctgatatccttatcgatattgggagccaccgtgtcgaagccggcctcgagcaacacgccattcttgagatccgttttagtgccggtcgtctcgcggtagtagaggcggatgccgccactgcggtacgtctcgttgtcgaattcggtatcgcgctcgatcttttggataccctcgatcgtgatcgtctcggccagccagtcataaaaagccttccggctttcgcgatgtgccaccttgtcgtgattggggccggtttttacctccatcgctttcggcggttcgatacggatatcgatatcctccgagaagcggttgatgatgcggtatcctttcgagagcgaggtgcctcccttcagctcgaatgccatctccaactgctgcaggccgtataggcaatgcatgatccagtagtctttttcgaccagcaccggctgcaccttcatctggtccgctacgatgcgcagcagggatgcaaaatccttgtgcctatggaggaagtcagctggcatgcgtatccgcggcgagggtgttgaagaatttccgcgtgcgcaccataccgtattctttggcggcacgggtgagagcggtaggattgtcttgcagggcacgttccttcacgcgggccagcacgtgatcgcggtcctcggccagctggtcgagattgttgaccagatcgaccagtaggaattctttggtcaggattttggggaaggccggcttttttcggaactcgaactcgcgaccgcccagcatgaagttgccgtggcgcttatggttatagacgacggttttgttatagagctgtgtcacgccaacacccaagctgttataggcattgggcgaggtgacgaggtaacggtcatccttcagaaaagcctcgacgagcgcatcatcctcggcgggggctttgccgaacgcggtttgcttcggccggtgatagacgccggttgatagcttggtcaggtatccttctgccagcatttgctgcaaatgccgatcaacagacgacgaccattgggcgagatcctgccgacggtagaccttgccggaccgcagatgctttttcaattcctgtaacttcgtcatgggatagctcctgcactcactataacgacatatggtggtgaatgcaattttttacaaatttcatgcaaattttggcatctgatcggggtcagtgtttagcctgctcttgccaaccacgcctgcttgaacgccaaggacggcctcacgcacctgctcttcttgctgttacgacgcagccaccggagtcggatcgtggcgccattgaagttcacgatacggaagcacgccgcgccggcttgagcgacctgaagcgctgccgggttatggtcacgagtacaatcatgatatcgccgagccgcccagtcgcgcccgacctgcgtcgtgatctcggtccgctaccccagagatacggataggcgatgatttatccgggaaggaattcacggctcatcgccataaccttcgccgcgcgctagacgatcgatttccgcttcaagcaagtctatatgttccgcgggcatttccgccgcgcgatgtactttacccgtatcgccgcccgtgcgccgacgctcgtcatgatcgtggctcattaggacaaagcgcgacttcccatgcttggtcaggacgaccggctcccggctggcggcatctgtgacgtcaccgacctgcttattgaggtcaccggtcgtgaactggcgcatgaaacgaactccgattgaagtttccagaatatccagattttctgcatttgcgagaaaaggttgttcgtcgcgggtttgccatcgcgacgcaggctaccgcatggctgtcgtcccgcgctttctctgtccatcaagcacaagatgtcagcgactgcgttatcacaagcgaaacaagcaatcaggagagcaaccggcgcgcatgcgtttagcttgcatgctggcgtgcgtcgaacatcgtcgcccactcggcggcccacggaccatcaaggtatctccatagatcaagccccgtgatgctgatgccgtgcatctggaagccctccgagagctcacgataaagcttgtccgcccgcgccggtgccaccttgttttgtatggtaatgtgcggttgccacgtccgcatgtcctgagagcccagccagttgataaagactttccgcagttcatccctgatcgatatcagctcggggctttcgatactgaacccaactcccattccgaggtggcgaacgccagtgactttcgctgtaaatgggccttggtggtccgcgacggactgaagacttcccgtgatgcgcttaacatattcacccggcaaccggtgaaacattgtcagatgcgcgcggagaaaatttcgctccggcgggaaatgcgtttcgcggagaagatcgaatggctggagatcgacctcggcaacgcgcgcggtgaggattagaggcttattcgtcttcaaatcggcgctccgctcctcataccttaaatggctccgcgatcctataggagaatccaccaggcgcgaacatcccgtcattggcgttggccaagaaccgtccaatctcaacttcggcttagcgccatggcttcgtaacctccaaccattgtcgggtgcgggccacgggatcggcattgcgcgtaatgtcggtgaccacggcggcgctgtcggcgccgtgagcgaagacgccgtcgatgcggtcgatgttcagcccgccgatcgccaccaatggcaggtcgccgatcttcgatttccaggcgcatagtcgcggcagtccctgcggcgcccatctcatctgcttgaggatcgtcgcgtagaccgggccgagcgcgatgtaatccggccgggcaacgagcgcggtttgcagttccgtctcgtcatgggtggagaggccgagtttgatatcggcggcgcggatggcggcgaggtcggctgtctccagatcctcttggccgagatggacgaaatcgcacccctcctcgatcgccagctgccagtgatcgttgacgatcagctggcagcggtgctggctgcagatcgcccgtgcttggcggatctcctggcgcagatcggcctcggagcgatccttgacacgcagctgcaccagcttgacgccaacagggaccaggcgggcgatccagtcggcgctgtcgacgatgaggtagaaggggtcgagcttcatgcgaacaccgcctgtccgataaccggcgtagacggcacggccatgtcgcggggctccagcatgcccgcctcgaaggcctgtcggccggcttcgatggcggcggagaaggcggtggccatcaagacaggattgccggcgccggccaccgcggtgttgagcagcacggcgtcgaagccgagttccatgacggcggtcgcgtgcgagggccggccgatgccggcatcgacgatcagcggcacatccgggaaatgtgagcgcagcgatctcagggccgtggggttgagcgggccggcggcgcttccgatcggcgcgcaccagggcatcagcacctggcagcccgcttccagcagccgctcggcgacgacgaggtcgtcggtcgtgtaggggaagacctgaaacccttcgccaacgagaatgcgggccgcctcgacgaggccgaagacgtcgggctgcagcgtgtcgtggttgccgatcacttcgagcttgatccagtcggtggcgaacagctcgcgcgccatcttcgccgtcagcaccgcctcggaaacgccgtggcagccggcggtgttgggcagcaccttgacgcccagcgagcggatcgtctcgaagaaggcaccgccattgcgcccgccagccgtctcgcgacgaagcgagacggtgacgatctcggtgccggagcggctaacggcatcggccatgatcgacggtgacgggtagcgcgcggtgccgagcaggaggcgtgagcgcagttgcgttccatggagttcaagcatcggtcaacctccctgcatcggcgacaggatctcgatccggtcgtcattgttcagcgaatgggccggccggtcctcgcggtgcacgagttcgccattgacggcggtcgccagccagtcgccttcgtaatccatcagcgccagcaactcctcgagcgtggcggcggcgatctccttggcttcgccgttgacgatcagtttcatgatgcgtgtcctcccgcggtatcggtgttgaagacaaggtcggccgcccgcgccgccatggcgggcgcgagcagaaagccgtggcggtaaaggccgttaagcgagatcagatttccgtgtcgctcgacgcgaggaaaattgtcgggaaaggcggggcgacggccggcgccggtttccaccacggtcgcatcggcgaaggccgggtgaagcgtgtaggcggcgttcagcagttccatcaacgagcgggcggtgatcaggcccgcgaagtccgtctcgatcatcgtcgcgccgaccatgaacaggccgtttccacgcggtacgatatagacggggatgcggggatgcagcagccgcaccgggcggtcgagggttacctcgtcggtcccgagatagagcatctcgccacgcacgccgcgcagcgaggcggcctcgccgatgcgcgccgcgccggtgcaatcgacgaggtggtcgaagtcctgctcgtcagggagggtttcaaagaagacggcgccgtgcgcgatcagcttttgccgcaagccagtcagcgcccggcgtggatcgagatgggcttcgcgcgggaagaacagtgcttgccggaagcgaccggccaaggaggcctcgagcgccgcgatccgctcttcgtccagccactcataccccgtcgtgcgaccggcgaagcgcttgagctccgcctggtcacgggcgggggcaagcaccaatgtgccgttccgttcgacctcgccgggcagcatcgcctcccagcggtcgggcgcatcctgcccctcgcgcagcaccgcctcgtcggcgctctcgcgctcgcaccagggcgccagcatgccaccggcgagccatgacgcggccgccgaaaagccggcgttgggatcgaagatcgtgacctcggcgccgcgcgcgacaagcgcatgggcaaccgagaggccggcgacgccggcccccttgatgaggacgcgcatctcagccggccacctgcccctcggcatcaacggccatgtagagatcgccgccgtcgcgatacttggccgccatggcgtccagcccctccttccgcgcctcggcgcggatatcgtgggaaatccgcatcgagcagaatttcgggccgcacatggagcagaaatgcgcgaccttgtgcgcctccttcggcagcgtctcgtcgtgaaagccgcaggcggtttccgggtccagcgagagattgaactggtcctcccaacggaactcgaagcgggcgcgcgacagcgcatcgtcgcgcagctgggccgccggatgccccttggcgagatcggcggcatgggcggcgatcttgtaggtgatgaccccggtcttcacgtcgttgcgatccggcaggccgagatgctccttcggcgtgacgtagcagagcatcgccgtgccgaaccagccgatcatcgccgcaccgatgccggacgtgatgtggtcgtagcccggcgcgatatcggtcgtcagcggcccgagcgtatagaacggcgcctcgccgcaggcggccaactgcttgtccatgttctccttgatcttgtgcatcggcacatgaccggggccttcgatcatgacctggcaatccttggcccaggcgatcttcgtcagttcgccaagtgtttccagttccgcgaattgcgcggcatcgttggcgtcggcgatcgagccgggccgcaggccgtcgcccagcgagaaggagacgtcataggcgcggcagatgtcgcagatttcctcgaaatgctcatagaggaagctctcgcggtggtgatgaaggcaccacttggccatgatcgagccgccgcgcgagacgatgccggtgacgcggttgaccgtcagcgggatgtattggagccgcacgccggcatggatggtgaagtagtcgacgccctgttcggcctgctcgatcagcgtgtcgcgatagacctcccaggtcaggttctcggcgatgccctcgaccttttccagcgcctggtagagcggcaccgtgccgatggggagcggcgagttgcggatgatccattcgcggatgttgtggatgttgcggccggtcgagaggtccatgacggtatcggcgccccagcgcgccgcccagaccatcttctcgacctcttcgaccatcgaggaggtgacggcggagttgccgatattggcgttgatcttcaccaggaagtttcggccgatgatcatcggctcggcttcggggtggttgatgttggcgggaatgatggcgcgtccggcggccacttcctggcgcacgaattcaggcgtgacgtgatcgggaatatgcgcgccgaagctctcgccgtcgcggatcatcgcgtccgccttcgcctcacggccgagattttcgcggatggcgatgaattccatctccggcgtgatgatgccggcgcgggcataggcaagttgggtcacggccctgccgtctttggcgcgcagcggctggcgcttggcggggaattccggcgtcaggcgatcgccgctggcaaagccgttatcctcggggcgcacctgccggccgtcatgggcctcgacatcgccacgggcgagaacccagtcgcgccgcaatgcgggcagaccgcgctcgatgctgatgtcggcgccttcgacggtgtagataccggaggaatcatagaccgtgaccggcggctcgcctgaggtcgggtggacgctgatctcgcgcatgggcacgcggatatccgggtggatctcgcccgggatatggatcttgcgggaggccggcagcgggccggtggtgactgtgggggtgatggtctttgcggcgatattcatggtttgaggctccaagttttcgattggagacccagtcctcagccggaatgatgaaaagacgccggcatggattccacgcgggaatcccggccttcaagcgctcgcaccgtccctacgccagtatgaactggatcaggttcaacgggtcactgcgcacgatagcagaatctcagccccttgacgggacacccctggtgaatgacgcaaggtattgctgactaacggtctgcgtcaagccgtgtgtcggattattggtctggtcagccaagtcccccgtaaacttgcctgatatctcctaggttgtgggttcgtaccccatcaatgcgtacagctactaccaggctgatattcaggccgcccaatatgggacgtaacgcgcgttaccctttccttggccgggatcggctggtgcgatgcggttgagcttaatcgactcggtaataacggccgagactgcctgatattcgtccatagtgttcggctttcagattgtcgataccgtcgccacggcgctcagccacttcctgcgggacgcgcatcgtcgcttcctttggaatccggttcgtgccgtgaatctcccattcccggtagacgacgtcacttattccatggcccgcttcgcgacggccaggctcctcctcgtgaagaatgagcgaggtgccgggcaggaggcgaccgaacgcttttttcgggcgtggcgggacagatgcgctttgccttctccagtttcgagatctggcagttcgaaagcggaatctgctcacttgtacgctccgcgtcgatcctcgaggagcggtatccagagcgccggtccgtaattatgcggcgttggcgcgagcaagatcgagactggcgcttgttcctgacagtttctgacggagcgacaggctagactttccgtaggcgtctcaaggacgctattatgaaaggaaagcctaatggtcgcgttttcgcccgacgtctttgccaagttcctagctgaagaggacgacgctcctgtcgtgatgctgaaccttctacggttcgtcccagatggcggccgtgaacggcatttgcaatacctgagactggccgaacccattcttgcccgctttggcgcacggatcctattccgtggcgacggcctcgacgttctgacgacggggcaggtggaagggtgggacgcggtgctgctagtgcagtatccccggcggaccgccttccgtgagatggtggaagacgccgagtaccagaaggcgttcgaggtgggaaaggcggcgcttgcagatatcgtcctgcagcctctgcagatctcgaaaggactttgaaacaacctaggctgccgcgccgtaaagctgcggcagccctcatgcgcttcgcgcgttcgcactggaggcgtggcagggctcctcaagcggaagtgggttctcgattcaagatcctcatcgtccgtatctgcgccgcaagcgcgagcatcgccttctacaccgtttcatccgacatctgttcgatgttgcttgcgatgtcctggatgacgctttaagcggcgtcgtcgacgggtgcgacctttccagtttttacaagcagacccctcagcgccccggacgctgacactcccttttcgagaagcagacgccggtcggcaggggctagcgtctccacacggttcgccgcccgtacgaactctgaaatcatgtcggtcgtcacggtcaaagggagttcacctccggcataggcttgcccgcgaacttggaagagttgacgtcccgaggcactctgcgaggagtgcctttctccctgatcgttttcgtcacggaaccgaatcgatgttcacgctttgattcgctgaatgtcaggagagtatcgcgtcatgaacagctcccacgtccaggttcctatccgcccgctccatgtcgaaatcgaaggtctcgcgcgataccgccaggcctataccgtagacgagcttgcgggcctgctgctcagcgtgagctggcccctcagcggaaaacagacgtccgagttccaccacgcgctcgcgacctcgctcgacgccttggaattttatatcgatccggaggtggcgcgcgcggcattcgaagacgccgcgcatgtcgcagggctgcacgtgctgccggacgacatgtcggcaatgaagctcgcgggttgagaaaagaagccccgcctcgggacggagcaggctgaggtcatgctgcacccagttagttgaagccagacgaaaccaccatctcccgctcgtacgacgtgttccttagatcagtgtaagtagtcctcatgagtagccgccgaccacgttcccagccgcttctagccgacgacgcgccagtcaggagccgcgcgagaaagccccgcgatcccaagcagccgcaactgcctttcgacgcgatgccggagagagtcgagccctgcctcgcgcagctccgtccgaagccgcccggccgtgacaggtatctgtatgaagtgaagctggacggctacaggctggccatacatatcgaaccgaagcgtatccgcatcctgacccgcggcgggcacgactggacgcaccgatttccagccatcgccgccgcggcgaaggaactgggggtggcgaccgccatcctcgacggggaggcggtggtccacgacgccgaaggacggaccgatttcggagcgctgcagcagagcctgggcggccgcgggggaaagcggtcgtcgagcgaggcaatattcgtcgcattcgacctcctctatttcgatggacatgacgtccggggcatggagcttgcgagccgacgccatctgctggaaagcctgctggccgacgccccggaagcgatacagttttccgaggagatcgaaggggacggcgacgccatcttcgaagcagcctgcgtgcacggtctcgaaggcatcatcgcaaaggagagggacagtgcctatcgatcaggccgtctcggcgactggtacaagatcaaatgtatccagtccgagagcttcatggtcgtcggctacgagcggtcggcgtccgcgcgcggcgggatcggcagccttctcctcgccgcctggagcggccacgacctcggctacgtcggatcggtcggaaccggattcaaggaacgcgacgcccaggagctgcgcggccttctcgacaagctggcaacgaagaaggcgccggtcgcttacgagggtcggcggaaaaacgtcgtgtggtgccagccgactttggtcgctgagatcgaattcagggcatggacgcacgacgggaagctccgccatgcggcttacaaggggctgcgcgacgtccaggacaatgccgccgtctaccggatcgagagctgacatcctgcacttcagtcctcacgcggacggcgcgcaacattttggaatctcgcgcgtttcaggtgttccgaagaaaggagacagtcatgtcgaaacgcgaactcatcgacaccggaaccgacaagcgctacgtgcgccgcgacgagaagggacagttcaaggagtcgaccgacgtgggccggtcgctgtccgcagacaagcgtcacaagtccaagacggaagcgaagcgcggcgaaggtgatcgcggcgaccaccatgcgaagcactgatgcagatcggtccgtcgttcaacgaactaccacccgcggagcgtcaggccgtccctgaacggcttgccgtcaccctcgaaacaaacgccgcgtgcgcggacgacgagggcaacgacgcattgggaatgatgatgcgttcggtcggcacggccctgctatccgttgcgggcgatttggccgatacggacatcgcgctcgccgaggacgtcgccgttcgggcggtcggctcgatcacacgtccatctcagacatcctcagtatgccgtcgggccgacacttcattgagggcgtcgacgcctcccaaaccgcggaccgcttgttcttcagccttcccgtcacgcccagaccttgcggagcgccgccaccgtctgccgataggtctcgaaacccatccgctcgtggtaggcctgagccacggcgttgtccttgccgatgaaggcctcgatcttcggcaatcctgcttctatcacagcctgctcgctagatgcgaacagtctggtgccgacgccggttcgagctgcgtgcggcgctacatgggttccaatgatccccagccgaccggcgtgtcgtaggggttgccctcgacggcgcggatcagtgactgaaaaccgagaaggctaccatcctcgtcttcggcgagactgcagcgtatgccaagaggattggcgacgtaatgatcccgaacatactcttcgtccgccggcatcctgcgtctacccgccgcgacaagcgtctcgagcatcgcgctcatcgacgccacgtcatccttggtggccgtcctgatgtttattcaggaaactccgctcgatctacgtcaggcaccacgaacgttctcggctttcgacttgccggtctttcgatcctgacccacgtcgtacgacaccttctgcccttcgcggagcagcgtcgaatcctggaccgcgctaacatggacgaacacgtcctgtccgccttcgtctggcgttatgaatccaaagcccttgtcctggttgaaaaacttgaccgtaccgtaagccactgaaaatcccctggttggtatcctgcggtattcatagcggctcggcgggaggcccgcaacggcttcgccgccctgttgggtgtggtcggggccaaccaccgctcgagggttgttgcgagaggggaactgtctgatggaacccacgcgcaatgccgccgtcagtggaactattcgggccgccggtcattccgctcaggatcagcaggggctgccagataatgacagcagtcagagcgacgctcgacgtgcgggcaagcgcctcgcaggggcgcgattcgcccggacgagcctcaggccaggcagtcagcttaatgttctgcggaagttcacatccaccttttatatcggcgcggagtatgcgaaggtccgctaccgtatatgagggcatcctcatgcagtcgaaaggaccgcagtggtgctgataaccgattccaccgaattcaggacgccgctcgccagtctgacgaaagcgacctccgccatttcacgtgcgcgcaccctcgacgaggtggtcgcgatgatacgcgcaagcgcgcggtctctcgtcggatgcgaagggataaccgtcgttcggcgcgagggcgacctttgtcactacgtcgaggaagattcgatcgcaccgctgtggaagggcgagaagtttcccgcgtccgcatgcatttctggctggtcgatgatcaaccgccagacggttgtcgtccccgacctccggcgggacgaccgtatcccgcacgaactctacgacggcacgttcgtccgggccgttgcaatggctcctatccgtcgcgaagaccccgtcggcgcgatcggcgcatactggtggcaggcatacgagcctacgcggtgggaagtcgaaacgctggaggcgttggccgaggcagcggcgactgccgttgagaatatcggcttcacagcgaagttgaggttggacagatctccggcttctttatcttcggatgccgtaccgggcgactatcgagccgacatcgaggcgatcgccgggatcgcggcggttcccaccatgctcgacgtcgcgctccgaatgaccaagatgggcttcgcagccattgctcgggtcaccgagacgcggtggatcacctgtagctccctcgatcatgtgggcttcgggctgaagcctggtgacgagttgccgatcgagagcacgctctgcaacgaaatccgcgataaccgacagccaatcgtcttcgatgacgcgtctgcggatgatcgctaccgggatcatcacacgccccgtatctacggcttgagaagctacatctccatgccgatcatccgtgcggacggcaccttctggggcacgttgtgtgcgatcgatccgaatcccgcgaaggtcgacaacccgcaggtcatcggtacgttcaagctttttgcggaattgatcgcacatcatctggacgctggcgaccgcctccggacaaccgaggcgtcgttggagcgcgagcgcgaactctcggagctccgggagcagttcatcgcagtgctcgggcacgaccttcgcaatccgctcgcagcgatcgacgccgggacgaaccgtcttctcaaggaaggttggaccgagcgaagcccgctcgtcctcaacctgatgaaggcgagcatttcacggatgaccggactcgtcgacaacatcatggaccttgcacgcgcgcgtcttggcggcggaatctcccttgacttggcggaagccgaccttgtcgagacgctgcaagttgtcgccgacgagatccgttcggcgcatcctgaccgcgaaattcatctcgaactggacttcccgcagccgacagtcgtcgaccgtctccgggtcgcacagttgttctcgaacatcgtgtcgaacgcggtcacccacggattggaagatcatcccgtccacatcacggggcgccatggccctgacggcatcgaagtcagcgtgcgcaactcaggttctgcaattcccggggaagacctcgaaaggctgttcatgccgttcaagcgcggcgcttcctcccgcggcgggcaggggctgggtctcggactctacatcgcgctggaaattgccaaggctcacggcggcaccatcgacgtctcttcggatgagacaggaacctgcttcaccttcaagatgccgaggggacgctagaaaacgtagcgtccgagcctcggtgtgataaagcgaggaagcgctggccgatacccggtcgatgaatggatcatgttcgatcttcgtcgaactgctcggcacctgcgatcggagccagccatgattcccggcgcttcacccagagttcgtatgtcggcttcagcggcgtcggcgcgtcggaaagaatgccaagcttgatctcggcctcctgctcatcggccgaaaacagccgcgatccgcaattcgggcagaaagatcgtccgcgaaactcgcgggtctgacctgtcgtcttgaactcgctcgctggccatactgcgtagaacgtaaacgctgatccgctctcctgacgacagtccgtgcagtgacagatgccgatgcgcagaggcaacccgcgaaccgcgaccttcacatcaccacaagagcaagaccctaccagcgtggtcatgccgacttctccgccgcatcgtcgacgacgtcggtctccggacggtctccgccagaagcatgttccgtctgccagcgtccgtcggcgagctgataagaaatctcggcgtcgcggccttccaggtgctgccgctcggcagccgatcttgccgcggcaagcgcggcgtcatggtcgagaaaggactcggaccatacgtccccgagccgatacgcgaaacctccgtcatgctcggcaacgtgataggtgatctttgtcatgtgacctactcctgaactaagaaagggagtgctcgatgcgctcccatgatgcggcgtgaagcgccggggggaaccgacgcttccttgtatattccatcaggcgctgcgtgcctgttccggatgtctgccttcgccaaattcctcgacgatcttcgcacagaacgctggcaggtcatcgggtttccggcttgtgaccaggccctgatcggtcacgacctcctcatcgacccaggtagcgcccgcattctcaatgtctttccggatcgaagaataggacgtgacagtgcgtccccttagaacgtcggcctgaaccaaaagccaggggccgtggcagatcacgccgaccggctttccctgctcgaaaaaggaacgcacgaacgaaacgatatcgtcatccgcccgaagcttgtcggcgccgacggtcccgccggggatcaccagtccgtcgaagtcgccagccgaaacatcctgcacggtcttgtccacgacatagctgccgccgggatcgagatcgccattgttcgtcttggcctcgccggcctcgatcccgacgacggtcacagtcccgcctgcggcttcgactgcttccttgggcttcttgaattcgggctcctcggtgccgcgcggcgcgattagaacggcgatcttcttcccttcgagggtcatgtcatctctccaatttgggttgaggttggaacggaatgtctaggttgaaacccgcgtgtaccgtcgaagttccggccaagtgtgccgtttcgttctcagaatgtacgatagaggacggtccgcccggcggcggaacaaccctgcacgcatctcgttccccggtctcctcaaccccagcaaggagaacgatatggtcacgatgattggcaacgaatacgacatcaagggtctcgtcaaaaatctgctctacttggagcacgatgcgatcgccgcatacgattcctgtatcgagcggctcgatagccgtgaactcgcaagccagatttcagccttcaaggaagaccacctgcggcacgtcgccacgttgaccgagatggcccgcgaactcggtatcgaagccccgaccgaaggcgacatgaagcagatgctgacgaccggcaagatcgcgctcgccgacctcatgggtgattccgcaatcctgaaggcaatgaagacgaacgaagacgatacggtcacagcttacgagcgcgcgtcgcgcaacgaggacgcgattcctgagtcgaaggcgttcttcatgaaggcgcaccaggacgaggaacgtcaccgtgcctggatgagcacgactgccgacacgctgtcttgaaaccgaaggcccgcattgaaatctaagtgtcaccaccaaaaagcttggccgagtatcgcgacatgactgtcgccctgcacggccgcgcggtgaagagggcgctccgtcatgaagacgtcgagcgccctctgtgtgtttaacgaggagtttcaatgatacatggttcgcttatcatctttctgcatggtattggcgcgtccggtgctcagcttataccgatggcctcttcctggcgcgctggtctcccgaacacccggtttgctgccccggacgctccggtgcatcactggcgcggccaccaatggttctcgaccgaaggcaacccgcttgatccggcgagggtgatggctgcccgagaagcgttcgacggactgatcgaccacgtcgtccggcgcgaggggttcgccgaaagccacgacaggatcgccttcgttggcgtctcacagggtgcgatagtagccctcgacgcggtcgcttccggccgatggaaggtcggcgcgctcgtgtccttcgcggggcttctcccgccacagcccatctcgccttccagcaaggacacgccgatcctgctcgtacacggtcagtccgacacgacgattcctgcggctgcctcgacgctcgcggcggcgcggcttggagcggcaggcttcaaagttgaactcgatgtcgaacccggcgtcggacatacgatttctagcaccggcgctcggacggcgttatccttcctgcagaaatcgctttcgtaaccgaaacccgacgatcacctgaccgttttcttgtcatgaccgaagacaaccacgaagagaccaaggacaccgaccctccgcgggagaaggtatccttcgcctttgaccggatgactgtcgcgcgctttcgcgagacctttccgaatgcccggtggtcggacagtcttcgggcctggacggttcccggcaagaccgctcgaaagcgcatcgaccgatggctcgcctccgaagcggatcgaagggcgccctacgaagaggagcgcggccgcgacgcctaccagtttgaacccatcctcagcccctatctgcaggtctacgaccgcggcttccgcatcaagacacccttctcgcggacggtcgtcgacgagctccggcagatcgctttcgcccgatgggacggcgacgataaggtttgggaggtgccgtacgcatcctatgacgacctccagcagcgatgggaagcaatcgaggaggccgcgaaacgagccgagcctgaggagcgcaggaaacgggccgaggcccgcaagggtaccgaagaggaggcgaaaaccaagcggcggatgtccgagcgcgggaaaaagcgactgcctgtgccgagcgacgatctcccgccgctcgctcggcctgtggcgacagtcgctttcgggattgtcgttatcacggagatcaccggagaactcgtcgaccccgaagaggttgccgagcaccatccggacgccgacgacgagtatgtctgggcgggctggcgtgccgccacgttggaagaactcgtccatacctggccggctcgcgcggaaccgggaggatacgagcgggttcgcgggtggtggcagccgacgctcgaggagttgcgtgtcgcgaggagttccgcgaaatccagggaacggcgacggaccaatcgcgatgccgttggaccgtcgccttgatatcgacggattgcgggactagaacttgttcatcgggattgctgatgcgcttcagagagtgccgctcgcgataccccgtctaccggctttgaccacggaagtactggcagggataggaagacgaacgaaaggtcggtgctatttcgccccggccttttttgtttgccgcggtcaggcgagacgaaccttccggaacgtcccagggatcgcaccgcagttgtcccatgcatgcgctgggacgatcctccggctgtccaatcacgccgggagtagatcatggatttcgcgctgttgtcctatcgcgagctggcagctcgccagggtggaaagtcgacacggctcgcaagactgcgcatcggcaagggtgggacaagtcaacatcgccggacgggacacatgtgctggcgaaagtgccgacgtctttcttgcgtccggagggcagggatgacccagcatataaaggaggccggagcgtcgttcgaggtcgcctacaatcccgctcgtttcaagggcgtcgaatcggcgacgaagcgttgctgaaggggatcgagggccatctggaaacgatgggcttcacaggaggtctggcgtacaagtcgttcgacctgcagaggccgggcctcctgctaatgcatatgaagccggcgctcatagcttcgatgtttgcggatgcggtttccgggcgagccggctgaccgggagcagggctgctctagcaggttacccgcggtactttgtcccgcaccgcgcgccgattgctgccgcagcgctgccggacggatcgcctccgggaagtcctggtaggacaccggtcgcaggaaccggtagatcgcaagcgtaccgacggaggtggatcgcccatcggctgtcgccggatacgggccgccatgaaccatggcgtgcgagacctctaccccggttccgaacccgttcaccagcagccggccggcgagcatctcaagtttcgggacgagtcggcgagcgtcgtcgagatcgccggcgtcgacatgcaacgcgacggtaagctggccctcgagggcgtcgattacttgctccagctcttcgaagtccttgcagcgcaccaccaaccctgccgcgccgaagacttcgtcctgcagttcgtgatgtgccaggagcgaggcggccgatgtctcgaagagcgcggccactccgtcgtagtccccgccggtctttcccttggcgagcatcgacacctcggaatgctgttcgaggcggccaacgccctcacgaaacgccttggcgatcgacggcgtcagcatggtctgcgctcctgtttccggaagaagctcgctggccttggtgataaagacctctagccctttgctgtcgacagccagtataaggccggggttcgtgcagaattgtccggcgcctaacgcaagcgatgatacgaagaacgtcgcgatctcctcggcgcggttctccagcgcacccggaaacaggatgacgggattgatgctgctcatctcggcatagacggggatcggctgcttgcgtttggacgcgatctccatgagtgccgttccgcctctgcgcgaaccggtgaagccgaccgcgcggatcttcgggtcggcgacgagctgctgcccgatgtcgaagcccgtgtcgaacaggagagcgaacgtacctgcgggcaggccggccttcagcacggcgcgttgcactgcgcgtccgacgagctcggaggtgcccggatgcgcggagtgtgccttcaccacgacagggcagccagcggccagagcggaggcggtgtccccgccggccacggagaaggcgagggggaagttggaggcgccgaaaaccgcgacggggccgacagggatgttgcgaagacgaaggtcgggtttcggcgccggcttgcgcgagggatcgcccgcgtcgaagcgaagttcctggaacctgccttcgcggacttccttggcgaacagccggagctggccggttgtacgggcgcgctctccctccagccttccgcggggaaggcccgtctcggccatggcgcgttcgaccagctcctcgccgacgccctcgatctcggtggagatcgcctccaggaaggcggcccgcgtttcaaggtcggtctcgcgatagacgtcgaaagcttcccatgcgagacgggtggcctcctcgacgtcggcagccgaagctccaccgaacgaaacgggcagggcggttcctgtcgccgcttcgatacctgtaaattcgccgttagaaccacgtctttccgatcccgcgatcagcaggctgccgttgatggtcatgatggaatgcctccgatgaaaagtaatacttttcgatataggtgctctctgtgcggatttctacccgctccgaacacaggcgttcatgtattgggcgaaatgcaccggtaaccggctggttgcctttaggctttcaggtgtgagactgcgcggtagccaagctctcgacagcctcccgtaccaggcgcaatctctcaagttccagtgcggcgtccggaagtgcgcggtgggcaggcacggcaggcccggaccgggcgatgacattggcgacgagcgcagccgcgtccacgccacgaacatcgcggtcttcagtcaacatcagggcaacttcgacgaagaggtcgtccgacttacggactcgaagagcctgtcgtggaacccctccggcccgaagcaggacgccgagcgatttcccatcccatgacggcgagctcgcgaagagatcatattcgaaagcgtggccgtcatctcctgcacaacgattgatatcgggacgccttcatcggcaagcttttcgcgagaaatgccgtgaagcccttctgcgttcgccgaccagtccgtccagttcggcggccggccgcaaggcctcgactgagaagccgtggctcggcggccaccaccggctcgtttccggctgaaatcgacagtccaccccaacaacgcgggctggctgaagaccaagcctggaggcgaaaagccgccgagtggtggcgcggcttcatgccgatcgaatatccctcgaccatgccgcacatataggtggcttgccgccttcgcgcgtacgtggcttgtcagccagcggacgatggtgcggggtgtgcttgttcagctggctctccgtcccggcgaagcgttccagtgcgatggagtgaggacctcgctttggtcggcggcgagcgcgtcaagccaagggggccgcacatatcaaactgctccagggggcaggaatgttgtttgatgctcaccggcacggcgtccgtgcacgcgggggccgcctgatcgcggaacggtgaccatgatctcccggcggccccttcatctccacgcgcggatgccgcgtcgcggcacggaaaatttggaagccgttagcggcggtctggaaacgaccagcactcgagagaggtaacgaaccattggcgcgggtctagggcgttccttgtgggctttgtacggtcccataccaattccttgccgaacgctagcgacctcacaagttaacgcggatgactgacgataaagagatcaatcaccgctccagaaagtctttcaccaatcaggagcgacgcgaacaattccaagccacgcacgagaccgccatggccgcgatcgaagccgaggccgaggcgcgacgaagaaagaccgaaaagcttcgggcggcgcgggaggcctcgacgccaccacgctgacgctagattagtctcgcgcggcaaggctgaccggcggacgccgaagaggcgcgacagacagcgtacgttaggttgcggctttttaggttcgtaccgcctcggcgcgtgaaaccgatggcctgtatcttggaatggggaccttggaggagtttggtgttcgagggattcgcgcttgatttcattgatgttggccccggcaagctgagggtgcgtcacggcggctcggggccacccgttctcctgcttcacggccatcctcgaacgcacatgacgtgggggcaggtcgccgatatgcttgccccgaatttcacggttatctgccccgaccttcgaggcttcggacaatcgttcttgcccgaggatgccgacgaccacgtcaattcggccaaacgcgcgaaggcgaatgattgcgtggcgctgatgcggagcctaggccacgaacgcttttccgccgtcggccatgaccgcggtagctacgtggcgtttcgcttggcgatggatcacggggatgcactcgaaaatgtcgtggtgatcgacggtgttcccattatcgaacacctggagcggacggactggcgctttgctcgagattggtatcactggttcttcttcgcgcaacccgacaaaccggaaagagctatcagcgtcgacccgctggcttggtacggcaaactctcgccgagcttgatgggcgaggacgcttaccaggacatcgtcgcggcggtatccgacccgcgtgtcatccatggcatgatcgaggattaccgagccgggcttaccgtggacagacgcgatgagatggacgcccgtgcatccggccggaagataaactgtcccttgctatgtctctggtcgacgaaggacgacttggtcgacaccgtcggtgatccattggagatctggcgaagatgggcgaaaaacgttcaaggtttcgggatcgagagtgggcaccacgtcgctgaggaaaatccaggtgacctggcggccgcgatatcccggtttatcggatgagccgaaaacacgtcccggaccctcgagcgggattgtccacgtcagcggcgcccgtgcgggcacgacagtgtcgggccgacccaagaccgtacgtgaataccttagggcgggcggaaccatcctcgccaacgcaaattctaggtgtgtcccattacgaaaagtgtccgctcatggcttccgccaaccagttcgatattcaagatccccttactcagtatccgcgccccgagtttgcgaagcagccacagcccgttccgggcctcgccaaaaagatgctgcccgtccccgaccacggtgagcggagctataagggtcttggccgcctgaaaggccgaaaggccctcatcacgggcggcgattccggtataggtcgcgccgcggccattgcctatgcgcgcgaaggggccgacgtcgtcatcaactatcttcccgaggaacagtcggacgccgatgatgtcgttaaactgatagaggccgagggtcgaaaggccgtggccattcccggtgatctgaaaagcgaggaattttgcaaggagctggtatcaacggcgcatcgcgaactcggcggcctcgatctgattgcaaacgtcgccggacgccagaaggcgatcgacagcatcgaggatttgaccgcggagcaattcgacgagacgttcaagaccaacgtctacgcgctcttttggatttgcaaggccgccttgccgttgttgccggccggcgcgacgatcatcaacaccgcgtcgatcccggcctatcagccgtcggaaacgctccttgactatgcgccgaccaaatccgccatcgtggcgttttccaaggcgctctccgaacaggtcttgccaaacggcatccgggtcaacgtggtcgccccaggacctttctggacgcctcttcagacgtcgggtggccagaccgaatgcgcgccgatctacgtcttcctcgcctcgcaggaatcgagctacatcaccggcgaggtgttcggcgtgacaggcggcaacacgctgtcctgatgctgacatccctgacccctcaacgaaccgacgactttctcccgctggagcactacgccgccattggagacggccgctcggtcgcgctcgttggagcggatggatccatcgactggtggtgcgctcccgacatggactcaccgcctctcttcaacagactgcatgacgcgtcggggggcaggttctcgatcacgccaacggagcctttccgcatcgagcggcgctaccgtgaaaacagcaacgtgttggagacggttttcgttaccaggaccggctcggcgcgggtcacggaatcgctgaacagcggcgtggccgagcgtctgccctggtgcgagttggcgcgtcgggtggaaggcctgtccggtcatgtcgacctcgaaatacgtcttgaaccgatccgcgccgccgggccagcgcgccgcgtcaatcatccgaatgccgacattcgctatattggcgatctcgtgaccacattccgccacgatccggaactcgagatcaccgtggacgaggacgcacgcaccatcgctcgatggacggcccgcgctggccaacggacgtgccttgggcttcttgtgtcggatcgagcaccgctggctatcccagccctatcggacattgacgaccgtatcgattcaagtgaccgggactggcgtcggtgggcgggccagctcacctatgacgggcctttcgccgatgaccttaggcgatgcgccttgtccttgaagttcctcgtgttctcgaagacgggagcgatcgccgcggccgcgacctcgggactacccgagcgaattggcggcgacaagaattatgattatcgctatgcctgggtcagggacgccgcctataccatcaaggcattgctgcgcgccggctctctcgaggaaccgatagccgcgttcggttggctcgtccggacccttggcaacgacgggccgcggccccgggtcgtctacaccttggatggagccgaagtccccgacgagaggatcatcgatgttccaggctacaagggctctcgccctgtcaggacgggcaaccgcgccaaggagcaggttcaactgagctgttatggcgatatcctcgagaccgccgcgctattcgccaggatggggcatgtcatcgatcccgatgccgccaggctgctgaccaagctcgccgatcaatgcatggagcgatggaaagtcaaggattccggcatctgggagctggaggacgagcagcattacaccttctccaagatcggctgttggttggccctgtcaaaggccgcgcagctcgctcaagacggtcacatcgccggagacgcggacaagtggaagcgcgagagtgaacgcgtgaaggcttgggtggacgagaattgctggtcggaaagactgcaggcgtatacatgccacgcgggatgcgaaacgcttgacgcctcgctcttgctcaccacccggtttggcttcgagcatgacggaagactttttaagacccttgtcgcgatcgagcgcgatcttgccgtgggtcccttggtgtaccgctttaccggcgccgacaggcaagagggcgccttcgtcgcgtgttcttgctggctggtggaggcgtacgcgttcctgggcaaggtggaccacgccgaagccttgctgaaaaccctcttggagaagctcgggaataatttcggcatcctcacggaggagatcgatccggtgaccggcgagggattgggcaatcttccgcaggggctgagccatcttgccctgcttcacgcgatattctcgatccaggaaaaccgatgatcggtctcctgggggcgaccaggacgccgtccccaagacaaaggtttgaaaccagtcaaggtccctcggtttttcgaacctttctcctggccggttcccggccggtggtgatctccacgactggcgccggggatgaagtcgcctgtcgatcagctggaggatcgcgacgcttgacatcatcctcgcggtcatcctcgtcgatcagttcctggaaggtttcgtgcgtgtcctcgccggcaagctcgtcggcggcttgaagccagtgtcgcaagtccgcgccctctggctgtccctcgtcaatccagatttgataggcgcgcgtcctgatttgctcttgcaggtcctgtcccatgaatgcttcccttggctaggctaaattttcgcgcggcgacgggctaaacatcgccacgaggcagttttccggacgcgtccttcattccttccttcgtgtccttggcgacatcggtgtcatcctccaccgatttgcctcgcccggctccgccttgatgcccgccagcctgcggcacgggttcttgctcgcgcgatggagttcggtccgaaaaattcttgtcgcgttccattgtcttctccatgcttgcgccgctttcgcggctatccggcctttcggcccttgatttcagcgttaacgctctttcgaagcgcgtccatgatgttgacgacattggacgccggcgccgaggctgccttgcccttcgttgccttactgggcttcaggagtttcttcttttcggcgatgagcttcagcaaggcctcctgtacgggatcgctcaccatgtcgggcgaccatttggccgatttcttcttgatcagctgctggaccaacggaacaaggtcggggtccgcttcctcgtcaatgtcctcgaaatagccttcctcggggcgaacctcgtcaccgaaacgcagtgtccaaagaacaatcccctggtcgcggggttccaggacgacggcgcgttctcgccggccgatgacaagtctcgagacgccgaggaccttttccgccttcatggcgtcacgaatgaccgcgaaggcctcgttgcccacggcgtcgtttggcatcaggtagtgcggcttttccagatagatccattcgatgctgttggccggcacgaacttctcgatatcgatggtcttgacggtgtcgagcgcgacggcgtcaaggtcatcgtccgtcaggataacatagtcgttctcgccacgggtataacccttggcctcgtgttcgtccttgaccggttttccggtgacggaatcgacatattgtgaaacgacccgattgcccgtctccctgttgagggtatggaaccgaaccttctcgctctcgctcgtcgctggcgtcatcgcgaccgggcaggtgaccagtgaaagcttgagatagcccttccaatagtacttctgagccatgatggatgtcctcaactagcctttcgatgggaagcggatttcgccgccccggcgtttgacgccgatccgcgcgtggcgcgctgacgacccgcgccagcattggcattggcattggcggccgtgcgtttgggcttgtccgccgccgccttcaacagaccggcgctctggcgaagtgcggcgagcaggtcgtttggcttggagaccgcgacctttttcggttttggaagcgatcgtccctcgagcttggccttgacgagctcggccagcgccgcttcgtagcggtcctcgaacgccgccggatcaaacgtgcccttcttcgtgccaataatgtgtttcgcaaggtcaagcatctcgccctcgaccttgatcctgggcatctcctcgaacgcctttttggaggacctgacctcgtaatcgtaattcatcgtcgtcgcgatcaacccacgaccatggggccggatgaggacggttcgcatccgtcgaaagaggatcgtcctcgcgatcgccgcgaccttggacttcttcatgccgtcgcgcagcgccgcgaagccttctccgcccatcttgtcgggggtcagataatagggcttgtcgaaatagacgtcgtcgacgtcggagcaggggatgaaggcctcgatttccagcgtcttgttgctttcgggaatggtcgccgccacttcctccggatcaatgactatgtattggccattttcgatctcgaagcccttggtctgttgttccttgggcaccagctcctcggtctcgctgtcgatgaagacgcgattgacccggtttcccgaggccttgttgatcgtgttgaacgtgatgcggtcggacgtggaggccgcggtgtagagggccacaccgaatgacacctctccgaacttgatgaaacccttccactgggcacggtggccagttgccatgacgcatactccgaatcacctggttggcgactcaagcattgaacgcgtgattcgttccctcacgaagcgaatcattttcaacgggttatcccggcttttgaagaagatgattcaggtcgaaacgctaagggtcggcgcgccagtggggaccgggttggcggcggtgcatccatttgcccgttccaacgttgagctgagatggcaaatgagaggaggcttaccatgaacgaactggctgggaaattacggctcaaactggagcagctggtcgacgagttcgtcgtcaccggcgtcaaggcaccggaagtgctatcgatgatcgaggctgaaatcgaaaatatgaaggcactttacgatcgcgaccccgatccggccgacgatcccgccgcgccggaagaaccatccaacgactggccggctgcttcttgatggggccccatgcggtcagctatggacacggtcgcgggcttccccccgaggatcgctgatcgagacgcggctcgcggccattgcctcggaaaaagccccgcttgctgggcggggcaaaacaaacccatgagttcgaagtggctcggaaagccaagttcattttcacctgaatgctgtcgattttcaacattgatccgtgcgcgctagcgtaccaaagatcgatgtcggccatccctcggccttgtggcatggtggtaggcagacagagcccggtcatgggccatgtcccgccgcgataaatcggccatgacttgatgacgaactccgccaatccttcagttgcgctcgcggtggaacgtccttgagcttgaacgcggcgcgtccacccaggcttggatctccgttgaggcggtcccgagtggctcggagccgcgcgtgccaaggatcgcgaaggcgccacgcttcacgatcgcttcgcgcggcagccagccaaaccgctgccgtggctcgggtgacaacgacaactaatgttgccgccatacgcccaacgggcaggaggttctcccggccaatataggaccttcgtccgatggccgttggcccttgtcgctttagattaccgccagcaccagacgaaaggagatccaatgctgtggtggctgatgatgggttatctcgcggtgaccttgacgacaatgatctgtctacttctcatggtcgcgcgccacgtcttgaacctgaggaaatcgaaccctcgggacgtcacgatcgccgagcaagagcatcgtgatgcgaaatcgatgacgccaaacaggtaacgcttgggcacacggttcacgcgatcgaccccgcgaattcgatcgtcgcggggttggagccaatttgtggccaatgaaaccagaaagccgcgccgtgcccgttgggatcaaatctcgggcgatggctccgcggggtcggctctatactccctggccaagcaccaccccaagacatcgatcagggtggtgatgaaagcccgacgcggctagctggtcgatgcgctcccggaccgccttcgaggggcggccatcgtgcatcaatggaagataaccgtgggcgtgccacttgagcctcgcgaattccctccggtatccaaactggccggttaagcttcaaccaaccatgacgttaaccgaaggtacgccccaccttattgagtacccgtgaagactgatagggtcgtgtacggcaagtcctgcaaatagcggcttggcctgctggtcaggctacttgacgtaggtcggttttttcatctccttcaagtcgttcatgttgagatagcggtttgcctcgagccagttttcgtgggtctccacggcgagcgagcggatgaggcgtaggcaactgtcttcgttgggaaagatacgcagcacgatcgtcctgcgtttgatctcctcattgaaacgctcgagcatgttcgttgacttcatgtgtttgtggtgctggcgaggcagcctgtaaaaggtgaacgtctcctcgatggtctcctccgcccagctggcgagtttggggtatcgcggtgaccatttcctcagccaagcagcgagatcgctcttggcctctgacaattcccggcgatcatagatccaccgctgttcctggaggcaatcgtcgtctgctttgcgcggcaggtgatcgagtgcgttgcgaaggaagtgaacatagcagcgttggaaccatgcgtcgggcagcacctcgcgaacggccgcgcgcaagccggcatggtcatcggcaacgatgtattcgacaccgtgcagtccgcgctgtttgaggccgagcaggaagtccttccacgacgagtggctctctcggttggcaagctcgactgcaaggatctgacgacgcccttcccaatcgatcccgagcgcgacaagcacggcgcacgagcgaacgacacctgcctggcggactttctcgtacttcgcatcgatgatgagataggcgaacggctcgtccagccgccgttgggcaaaagccgtcaagctctcgtccagtcgcttgttgatcgcggatatcgtcgaggctgagaagctgtggccgcatagctcttcagtgatcgccttcaccttccgggtcgaaacgccctgaacgtacatctccgccagcgacgctaccagcgcctgttcggagcgttgatagcgctcaaacagctcagttgaaaaccgcccatcgcggtcctgcggcactcgcagttccagcttgccgacccgcgtgatcagcgttcgattgtaatgcccggaacgatagccgatccgagcctcgacccgttcgctcttcgcggcaccgagtgcctcggtcatctcgccttccagcatctcctgcagcagatcctgcataatcatgcgcaatgcgtcgtggtttgcgcccatcagatctttgacggcggctatcgatggtttattctcactcctggtcatggtggggctcctatggagttggtgacgttagacatcaccagcctgccatggccgctcaaatcctcaacagatttttgcagaacctcccgcacgctaccactgatagttatcaggaactttgatcgactgtaggtagcatccttggcttcgttcgcagggttggggaaatggctttgactgcttggggacggaatttcgcgagagagacgacatgaatgcttggattggcgctgacgtattgcatttcgcgctacacgctgctattttccttgcgaaggagataagccatggccgccactgtcgaacgcaaggaatacccgatctcgatgcgcctgcctgaagcggacgtcgcgatgatcgatcgtgctgcaagcctgcgcggacgctcacgaaccgatttcgtgcgggaggccgctgtgcgcgccgcggaagaagtcgttatggatcaggggctcattcgtatgagcccggagggcttcgctgatttcatgggtattttgtccctaccggcagctcctgtcaccgagatggttgaactggccaggcggcccgctccgtgggaagccggttacgacccgaagcaataagccgtggcattatcggctccagagccgcttacggcggcgcacgatatttccaaattttcctgcggccagcccacacttgatcattggctgaaaacgcgcgcgctttccaatcacgaaaaaggtttcactgcggttctcgtcgtccaggaggccgggcgcgtcgtcgggtattacggcttggcgccgaccgccatcgttcccgcgatcctgccgcgctcaatccgcaccgggcaaccgcccgatccggtaccctgccttctcctcggccagcttgcgacggacacggaatgggcggggagaggcatcggcacaggtctggtgaaacatgcccttgagcgatgcgtccaagccgctgctctgatcggcggccgagcgttgatggtcaacgcggtcgatcacgaagcggctcggttctggcggcggcgaggtttcacgccctcgaaggacgacccgctcgtcctgtttcgctcgatcgctgcaatcgccgcatcgctggcggaagcgcggcagcaagagcaatgcgcctgacttagatcttcacaacgccacgtcgcttctcaacggcggttaacaacccgctctggcgggcttcatccgtgtagatccgtgttttcagactgaggatgcgtgcggcggccgagggctaagggcgcctgccgccagtagcccgggcggaggcgatcagcggctcgaacgtcgtcgtgctcgccgccaacccggcgccggcctcaagcacttactgagctctcacgaacgctcgatctaggaggctcgctaaaattgtaattccatcgaatacgcgaatttagcttgctcgacctatgctgcgttccgcggttaccaaggttgcctgctcgtgcaagccagggaccgaaggaacaaacaagtgtaactacggccgaagctgtggaattttaaaggtgaatggtcaagatgtggggcagacgctgattgctgaagggcttgcggttcccttcgtttgcgccccgtctggctgccctcccactccgcgaccatggtgtggctgaccgcggagctgccgcgcggcccaaggccggccaagtgagctctccatgaccgatatcaccctggatctcgaagtcccttcacgtgggcgttgccaggccgggttaacgaggacgaagctgcccgcgagcgcaagtgggccgaggtgccgaccgagagccgcccatcgaaatgagagtgcggcggggttatcgcccatggttcgcgggcccggagttggatatcgagctttccgccttgcgcgagaggatgcgcccgctcgtcaccgagcggtggcggcacgatgcgaccggcgcacggcactcaattcggcggttcacatccagcccgcggcgtcgggaggggagggcgacctacaagcggacaatcaccgtgacgacggcggcacactcggtcccgtttggtgcgacggaccctcggctgtgacaggcgtaatccgctccgcccggcatcgacggctgaagggggaggcgaagggcttcggagctttgggggaacgaacccttcgcctgtcactcaagcgtattcagaaactcccaagcgacccggccatggtagccgatctgatggcgacagcaagatcgacccgatgttaggcagctcaaaaccgatactcccgcgcaacggaggtgaattgcttggcagtgaagccgcgcggaagacaagcgcggccgcccgcgcccgctcaaaaggggcggtcggcctttgaaaccatcgctgataattgacggcaagaaggcgccacaagcggtcatcgaatgtatgcgatggcttgaccaacactatatatccattattctggatatatggaatcaaagaatgctatcgcggcgctagctgccctcgcgcagacgacaaggctcgaaaccttccgcctgcttgtcaaatccgagccggatggcattccggctggtgaactcgcacgcataatggacgtgccgcaaaatacgatgtcggcgcatctcgctaccatgtcacgagccggaatcgtgaagagcgagagacagagccgctccataatctatcgggcggatctcgagggctttcgcgccctaacccttttcctactcaaggactgctgcggtggaagcgcggagctttgcgcgccactgatcgccgatctgacgccgtgccgcgcgccgggaggaccggggacatgcgtgaactgacgcttcggcttatccccgcggagatcgacctcgggatggcgctcgttgccgctggacttccagttgacgacctcgccgatgcgggacggcaatacttcgaatgccgggatcgtgacggcgtgctgatcggctactcggggctggaggaatgtggaccgaatttccttctccgctccatggtgatcctcccggaattcagatcgcgaggatacgggcgcgagttggccatggcgacgattgcccgcacgccatcggcagccgagatctatcttgcgaccacaacagcgtcggcgttcttcgcggcgctgggcttcgaagcggtgacccccggcagcgtgccggaaccaatactttccacccgtcagctctcgggcatctgcccggcatcggcgacgatcatgagactgaacaggccaccgaccgaacacggaacgcgaccatgaccgacaagacctataacgtgctcttcctgtgcacgggcaattccgcacgctccattctcgccgagtccatcctcaacaaggaaggcgccggacgcttcagggccttctccgcgggcagccagcccaagggcgaagtgaacccgcatgcgctgaaggaacttgaaacactcggctatccgtcaacgggcttgtcctcgaaaagctgggatgtcttcgctgaacccggagcacctgagatggatttcatcttcaccgtctgcgacagcgcggccggcgaggcctgccccgtatggattggtcatccgatgaccgcccactggggcgtcgaggatccggccgctgtcgtcggaaccgaagtcgagatccagcgggcgttcgcgcaggcggcccgcttcctcaagaaccggatcatggccttcgtaaacctgcccatcgcctccatcgaccgcatggcgctcgagcagcacgtccgccagatcggcacgctggaaggcgcgtcgacgaaatccggaaaggctgaatgagatgtccaccttcgaacgctacctgaccatctgggtcttcctctgcatcgtggtcggcattgggctgggccatgtcatgcccagcgtcttccacgtcatcggcaccgccgaggtcgcaaaggtgaacattccggtcgccgtgctgatctggctgatggtcatcccgatgctgctgaagatcgacttcggctcgctggcgaaggtcggaagctactggcgtggcatcggcgtgacgctcttcgtgaattgggcggtgaagccgttctcgatggcgctattcggctggctgttcgtgggctggctgttcccccctctattgcctgtagagcagatcgattcctatatcgcgggcctgatcatcctagcggccgccccgtgcaccgcgatggtctttgtctggagcaacctgaccggtggcgagccacacttcacgctatcacaggtcgcgctcaacgacgccatcatgatcgtcgccttcgctcccatcgtcggcctgctcctcggcctgtcggcgatcaccgtcccttgggacacgctgacgatctcggtgatcctctacatccttatcccggtcgccatctcgcggatcgtccgaaagcgcctgaccgccgacgggacgacccgctccctcgacgggttgttggcgaagctccagccgctttccctgctggcgctgcttgccaccctgatcctgctcttcggcttccaaggcgagcagataatcgcgcagcccgtcgtcattggtcttctcgccgtgccgatcctgatccaggtctacttcaattcgggcctggcctatctcttgaaccgaatgtcgggcgagaagcattgcgtcgccggaccgtccgccctaatcggagccagcaatttcttcgaactagccgttgccgccgcgattagcctgttcggcttccagtccggcgcggcgctcgccaccgtcgtcggcgtcctcatcgaggttccggtgatgctgtcggtggtctggatcgtgaaccgtaccaagggctggtacgaggccgcgcccgccgtctcccgaaatacggtcaccgaaaggacatgatcatggatgtcacgatctaccacaatcccgcctgcgggacgtcgcggaacacgctcgaattgatccgaaatgctggcattgagcggacgtaatagaatacctcaagacgccgccatcccgaccggaactcgcgaggatgatcgccgacgctggcctgacggtacgcgaggcgatccgggaaaagggaacaccctacgaggaactcggcctcgacaatccggacctaaccgacgatcagttgcttgacgccatgctcagggatccgatcctgatcaaccgtccgttcgtcgtcacgccactcggcacccgcttgagccgtccgtccgaggccgtccttgatatcttgccggacactcacaagggagcgttcgtcaaggaagacggcgagaaggtcctcgacgagaaaggaaaacccattgtctgaagcattcccagcgcttgaagagcgacatctacgccaacccgatctcgatgcccttcgtccgcccttctcgacccacaagccacgtatcctgatcctctatggatcgatccgggaggtctcctacagtcggctgctcgccaacgagtcccgccgcctgctagaacatctcggatgcgaggtccgggtcttcgatcccgaggggctgcccttgcccgacgacgcgcccgccagccatcccaaggttcaggaactccgggagctgtccgaatggtccgagggtcaggtatgggtcagcccggagcgccacggggcgatgactggcgtgatgaagtcccagatcgactggattccgcttgctgtcggctccgtgcggccgacacaggggaagacgctcgcggtgatgcaggtgtcgggcggctcgcaatcgtttaacgccgtcggccagctccgcatcctcggacggtggatgcggatgatcacgatccccaaccagtcctcggttgccaaggcctatcaggaattcgacgctgacggtcggatgaagccatcgtcctactacgaccgggttgtcgacgtctgcgaggaactggtgaagttcacgctgctgacccgcgacgcctcgtcctatctcaccgaccgctatagcgaacggaaggaagactcggccaagctagaacagcgcgtgcggttgaagtcgatctgaatttagccagaggcgaggaggctccgtttcgtcgccatggccacgacgacaaaggcggccatgccaacggttccaaggcccgcggtggcgaatagggagacgccgatcccgaactgctccatctccatcgcgaagacaaaaggtgctgcggctcccagtgcgagccgcgccgccgccatcttgcccgtgatcgcgccatagccatcgctgccgaacagatggagcggcaggctgccttgcgcgatggaattgatccccgatcccagaccgaggcatatggcaacgccacggcgccgggcagccagcttccgctcaggcccaggatgacgataccgatcaccatgagcgcagcggagatgacggcgagcacgggcggcgacaggcgcgtgccgaagatcatgttgatcaggcggctcagaacctgtgccggaccgaatacggatccgatcacgaccgcggcagtgccgagaccgagattgccgagcatgggaaccatgtgcgccaaaatcgatgtcagcgtgaagcccaggagcgcgaaagcggtggacacgacgatcatcgcgccgcgccgtccttccggtgggatcgctccgattacccgcgcgcgttcacgagttgctcggttggcgtttgccgcctttcccttccgcattatccagaagtgcagtggcatgcacacgagcagattgagcgccgcgaatgccagatagatctcccgccacgacaagtagcccatcaaagcggctgagatcggccaaaagatcgtggaggcgaagccgccaatgagcgtcagataggtgatgcttcgggaagccgtcctcggatcgctttccacgagcgccgcgaaagccgcttgatactggaccattcccgaggatatctccagcaggacgatggcgagcgggaacacggcgacggatggcgaccatgaacagagcgccagcgtcagggcggagagtagcgagccgaccgtcagaacggtcgccgcaccgatcctgtccatttgcctcccaatgaccggagccgaaagcccgcccaccagaagcgaagcggaaaagacaccgaacacctgctccagcgagatgcccaaatccttggccatggcgggcgcaagaatggagaacgaatagtagagcgtcccgtagccgatgatctgtgtgaggccgagcgcggatatcgtcgcgagagaaatcgcgtccctggcttcaggcatcccggtccgcttccgacgtttcagcgccgcggcaagcctgctcggcttcggaaactccggggacgcgaggatgaccagcgcagcaatcatgcatgagaaaggtcaccaatcccgacagcgcatcgtagttggcgttgtagacgatcgagcgggatacccgcctcctagcgatcaatccggagcgctcaagctccttgagatggaaggaaatgttcgacggggagacgcccatcttccgcgcgatcgtgcctgccgccatgccctcggggccggcaacaactagggtgcgaacgacccttagacgggtctcctgcgacaatgccgcgaacaacgtgaggactcgacgttcatccataattcaacattcattgaaactttgaattgattatccgagacgacatcgatgtcaataatgttttgacggctcacgacatgccgagaacagttctaacgcattatcgccgtttccggcctgtcctgcgcatcgagccaggagggcgtggaccgagcgaccgctttgggtcctcggttttcgccagtatcggccgactacagccatggcccagaagcgccaccgcggtcattcgcgaggaaagcttctgcaattccttgaaactgcgtggcggtaacatcccccgtgagcgtcggcatctcccaaccggggaagacccattgagatcgcgagcactcgttgaagttcagcgggacttgtccggtgcggttcaattgctgcttgaaccgacaccgagccacctagaactcatcatgtcggatggctcattaaggattaggcgattagcatgatagagcgtaaggttcgctgtcggcctatacttccgggcagagccgattgggagattccatgtgctcttgcctaaaggtaggagtacctatgatgagtgccagttcgagcaactatgtcgcgccaacgatttttggtcttcaacccgtcacgacatacgcgaaaatctcaaatcctccaccagcacaaagcaggctgcataagtttgcaattagcggtgtgcccgccggtgaacgcgtccacaccaaggtgtactcgatgagtgatttgcggcgtgggccggaaaagcacgcctgatcagtacccgaaaatacgcgtgggagaaattcatgactaccccaccaccgttcgaaagtatgtctgtcgaggagaggacggccatcctcagggcacttgctcataggctacggattccgcacgtgtcgctgagcgtgattgcgatccagtttgccggttgctgctggcactcagtgttcgactagcaggatgctgtgaagaggtggcggcagacccacttcgtggcgaagacgttgttgaaaaagccctcaggttgctcggtgaattcgcgctacgtcgacccgaaggcacgattcatgaattcgcgatcacgtcgctacactgatcttggggccgatcgatcaatgcgacggcaaaaggcgattggtccaacaacgccaaacgccgtttgtcgccaaattctcatccccgaggtctaattttcgatgcagaggagcatgaatatgacggaagttccaaaggctggattgcctggtgcgccagggaaaccaggtaagcctggtaagggtcaaaatcctgggaagggcgggtcgggcggtgccggtggaaagccgggcgcacccggaaagggaaacgggaagacttaaatcaaggaacccattctcttcattggaacggccgtcgcggtgatggtgtcgcgtcgagaaccatcagtctatcacttgagtatcgtcccagtgaagggagcgaccatcggcggcccggacctcaagccgagcgactggcgcatgtccttgtctgtccaccagcgatgaacgagcctcgccttcggcgaacaggtgatcttcaccccactggcgcagcgcaacgataaccgggaacagaccgcgccctttctccgtgaggatgtattcgcggtacgcggtgccatccgaggcgggcacggtctcgaaaattcctcgcttcgtaaggtcgcgcaatcgggtcgacaatacccccttgcttatgccgagcccgttctggaactcgccaaaacgccgcttgccatcgaatgcgtcgcgaatgatcagaagcgaccaccagtcgccaattgcatcaagagagcgcgcaacagggcaaccggcattccataggctaacccgtttcaccattggtacggacctcgatttcgaatctggttctatcttagaactagatttgatgtgagccaagtggtttcacatcggaccgagttgagatcacgaggagccgccgatgagcgaaaataccgcggatgccgcgaataggggcgtggcccgagggctgtcgagagcgcagacgctgatcgtcgcggcggcagcgggcatgagcgtggccaatatctattacgcccaacccatgcttgatctcatggcgaacgacctcggcatttcgccttccagcattggccttgtcgttacgctgacgcaggtcggatatgggttgggcttgatctttatcgtgccgatcggcgacctcatcgaccgccgaaagcttatcatcggccagggattgctgtcggctatcgctcttgtcgtcgtcgcgacggctggagcgaaagcgacgctgctcgccggtatgggggcggtcggattgttggcggttctcgtccagacgctcgttgcacatgccgcggcgttggcgacgccaactcagcgtggcggcgtggtcggcacggtcaccagtggtgtcgtcacaggcatcctcgccgcgcgatccgttgccggcaccattgccgaccacggtggatggcggacggtctatctgacttccgcgctgctcacgatcgcgatggtcggtatcctggtcagggcgctgccacgacaagaggtcgaacgccatccggaaacgtatctcaacgctctcctttcggttccgcacacgtttctgcgtgagccggccctgctgtttcgtggcgtgctcgcgctactgatcttcgcatccttcagcacattctggaccgcgttggtgcttccgctcagcgctccgccattttcctactcccataccttgataggtctttttggattggtcggactggcgggggcgattggagcgacgtgcgccggaagacttgccgatagaggctatggtcgatggacgaccgggatttccctggcactcctgctggcatcctggggcctgatcgctttcctgcccagctcagtcatactgttgttgatgggcgtgttcctgctcgacctggcggtccaggctgtccacgtgagcaatctcagcgtcgtcgtgagcctgcatccgcgaaagagcggtcgcctgattggcggctacatggtcttctactcggtcggcagcgctgtcggtgcgatcaccgctaccgcgatccacgcgcggtacggctggccgggaatttgcgtcttgggaggagctttcagtggtattgcgctcctggtgtggatcgcgagccgttttcaacgcgcgcggatcgaaagacccgcctggccggatgtcgccacgactgatggctcgaatgtctgaaacgagggttcgttgtcgcgacgactcattggataaggcgagcaataacactgtgcggcgtgcaaattgtacttccgatgccgttgccacggtcttgctcgcaacatgtcctcgcggatgagcgacgcgcgtcaacggaactcagacagccatttgtgcttccgtgccgccttttccagctctgggatagtgatgttgccggcctgaaaaagactgacaagcaccgcgccggcaaggacgccgtccgccgacgtcgggtcaaccttatgctcgccgcaccagccaccaagcaccgcttcgattaccttgagctcctcggagccaaatgtcctattcagttgaaatgtcatgatattgttccttagcactgcgcggatgcgacgccataaatggtcggggcctcgagaatttcaagctcgctccagcattatcctcgcgataaccgctcggctcctctcgaccatcttggcggtctcgcgggactgatgtcgttcgacacgtggatcgaccccgcccttcggtggcggatgaggcagtctggcgtgctcggacccagattggatctcggcacgacctgaacatccacggaactcagtgaagcgtcgcccgccgtgccgctctgcccaccgccgcctccaccctgccgatcagcccgctggccttccggagcatgatcccgccacgcttgtccacgacgaagtcgtcggccatttcctcgatgaggtcagccacatcggtcaacctctttgcaagctctccaagattgagataactcgcctgtctcgccagccggtgcaggcactcggcgtagcgcgaggcaaccatcatctgcccgccggcttggcatgcttcaacgtcactgagacggggaagctccttgctcctcgtggtcatgatcttctcctcggccgtgatcgcccattgagggtttcgcctccagcaaggtctttaccttcgtcgagacagcgcagagcgttgaggatgtcctggcagcgaatgggacgaaggaagcccggaggtttcctcaagtgtggacgcgagtcgacagcgaataggtcggatgcccacgaggccaggatcgcccgcttttccccatggtcgagcgccgttgcgagcacgtcgcgtgggtggtcgtagcgctgccgcgtttgaaaaattcgtcccgcggagatggcgtcgctgccggacgagttcccgaattggttcctttcgatcgtcattgtcttgtctcctgaaaaccttcagcaatggtgtgaaaatcttgaggtaccagatgagattgttcgtccatttccgcggttcaagatgtacgagcggagcttgcgaaaaaaatttgaacaccgctcttgaaaccaaaaaaacgcaaaaccagatcatttcgcgtcggtcgccaaagaggggccggcaaccaactgagacgctggttttcgcgtctcttccaactcgctttacggaggatttggtcatgagaaacgaattcgacttcgcacccctgttccggtccagcattggctttgaccgcgtcttcaacctgctcgccaactcccagcggctgcaggccgtcgagacgtggccaccctacgacatcgtcaagaccgctgaagacggctatcgcatccagatggcggtcgcgggctttggtgaagatgatctcgatatcacgcaggagcgcaacgtgctcgtcgtgaaggcgcagaaggccgaggaaccgaacacgggcgaatacctgcatcgcggcattgcggcccgcgcgttcgagcgccgcttcgaacttgccgaccatgttcgtgttgagaacgcaagcctcaagaatggactgctcagcatcgagttgaagcgtgaaattcccgaggccatgaagccgcgcaagatcgccatcggcggcgaggcgtctgtcgccccgatccaaatcgaaggcgaaaagcaggccgcgtaggataatagggtagcggaggcgccgcgcgtggtgcctccgcttcaagctcgcccgcacccggctatccggttccgccgaggtcggtcgcaggtcttgaccataccgatgatcggttctccgacacccgcgtgtgcgatcccgcgaacgcatagctcaacctggccccttacgacgtccccgatcagctcttcggtggctttcagttacggtgacttcggcgcggcgtgccatttccgtcgatctcattgcgcggacgcggttcagacctttcaattgcctctgaaattgccgtacgcccagacgcttgtgaagtgcggaatgaggaatgtcggggatcttgctccgacttcggatgcgagcgcctacctctatatccaacgcggtcgcggtttctcatgcctgaaggccgcagcttcgatcttgcccgcgcaaccatctttacttgcgacccgctggcagcgcgggtgtgaacctgttgatactatcgtattggcattttgcgccacgagtcgctatttttcctcgtgaagaagacaagccatggccgccaatgtcggacgcaaggaatacccgatctcgacgcgcatgcccgaagcagacgtcgcgatgagcgatcttgcggcaagcctgcgcggacgctcgcgaacggattttgtgcgggaggccgctgtgtgcgccgcggaagaagtccttatggatcaggggctcatccgtatgagcccggaaggcttcgctgatttcatgggtatcttgtccccaccggcggctcctgttcccgagatggttgaactggccagccggcccgctccgtgggaagccggttacgagccgaataagccgtggcattatcggctaaagaacgcgtttgacaatgaatcacgaagacgacgttcttgcttcaaaatattctgaataccgaaagctctccgaggcttcgaaccatgcgtgtcatttatgccatacaagggttccggccgccgaaaaccattcggctcgatccggagcttggccgaaagcggacggtctatcgcgacttcgcggatgatgccgcacgagatcttgccaacgggatcaatcaccgtatcgatctcacgatgcgcctggaggcttggagcaggtatcgaaggcttgatgtcggcgacaagaacctgctgcagcacgagttcgtgcaaaatattgccgccacgtcgcttagcagtccaaactctctcaaaaccagatttttattttgcggtcgcgcatctgtcccaccaagccaactgcataggtaggtctccggagagaaacggcctaattgctctggaacctgaaggcgacggcttcaattctgccggtgctaaaaacgagcagcgtggtttttggattcgaagccaaccctttcgcgtccagcgcttgatattaaatggatctaaaagttcatcgtattacggccttgcgaccgggcttcaaaggtttcggccgtgcatcaccggggttaggctccgtgagaaggagtgcgacatcgatatcgagtgcgccagcaattcgatccagtaggtccactgaagcattatgctttcctcgttcgatgtcacttatcactgttcgatcaacgtcggcgtcaacggccaagttctcctgcgtcacccccagtctcgaccggtggtgtctaagattccatgcgatgcgggcgcgtgtgtccataggggatcggcaccatcttgcattgcattaatccatcgtatataaccgacataaagcaaattgttatgtttcacctctctgctgtgatcggcgaccctcatggaactacgccaactctctcttttccgagcagtggctgaggagcttcacttcggccgggccgcgatcaagatgaacatcgcccagccagcgctgagcaaccatgtcatggcgctggagagagagcttggctgtccgttgttcatccgatcgacacgtcgggtcgagctgacgagggcaggggagaccttctacgatcgtgccgttcgcatcctcagcgagatggagctgacgaccgagctgacgcgtgccgcaggcggaagtcgcatccgccagatcaagattggtaccgtctatccagccaccatgggcatgttgcctctgtttcttggcaagatcggccgcaagtttcccgacgtccgcattcacattgcttcaggcaacacaggggacattatacgcggactggagaccggacaattgaacctcggcttcatcaggccggtcgagaacatcggatcgctgcgcttcttctcggttgcccatgaacgctatcttctggcggtcgccgagagcaatccgcttgcttccctcaacgagatttcgatcgaagacctccgcgatcagaagatcatcgccttcaatcggcagaacctctcctacaccgaacgatatttcaatgagaagttcgaggaatacgatctgaccaagaacgtcgcctatagctgcgacgacacctattcgctggtctctctcgtctccgccggtcttggcatcggtttcgcaccggagtggacgacccacatcccgaaccgcagtttcgtgctcaagaaggtgaggggaatcgacttcaagatcgggcttggcattgcctggtcgaaggaggatccgacggcatcgcgagacgatatcgtcgagatcgcgaaatcgatggtgcggcgcgggtaatcatcgcgccccacgcgcactcccgactgtagccgccatttcgaggccaacaccatcacgtactgcccaggcttttggtacgactttacgacgagggcacatgcgcgaagctgttggacaaagcagtagacagggcgttttgacgacggctggcatactcttatgcgcgggttgggtaccgcatttccggttgttcgtctggggctaactcggtcaagaatcgggcgtagacggtgtccgccactagcaagcgcgaggattcccaccggagccctgtctccatctttatccaacagcagatgacttctgtttccgctaagcccagctcttcaggctgaccgaccggtgcctaccacagggctttcgaacacctcacgctcactcgggacctgcccgtttccaaggccaatccgcgtcaggcacgtcggcttgccgaggcgatcggaaaattggccaagacagaccgtgcggatgccgagatactggcgcaattcggtatgttgctgaacccgcgtctcttgccaccggatgccacttctttccctgaactcagagagttgcatgccgcaggcctggccctggtgaaggaaagaacagctgcgaagaaccgcagccggaacatcactcagccgctcctcaaacgacagaatgctggccgcttgaagcagatcgaagcgcagctcgcccaggtcgagcagcccatcaccgaccaggttgcgatcgacgaaagcctcaaggcgcgcttcgatatcctggtttccatacccggtctttcgaagatcacagcctttacccttcgtattggaatgccagacctgggtgttcattgagaaggccgttggcacgcttgcaggccttgcaccgagcgacaggcgatccgggcgatggacaggacgcgccttcatcgtcggcggccgcgccatcgtccggcaagcgctctatatgccggcgctggtcgccacccgcttcaatcccgatctcaaggcaaaatacgacgctttgcgaaaagctggaaagccacccaaagtcgccatcaccgcgatcatgcgaaagctcgtggtcatcgcaaatggacggcaaaaccactttatcaacggatatatagcccgtctttcggaccgccgcagtccgacaatcatcaccgaactcgccagcggcgtaagtccccgcagcggatcatggcaaagcaccttgccatcacagacagttatccgtggaggtaagccggcaagcccgacggccgtcgttactggaggatagctgttgcacatcgcctccatctgtggccttgaccgtaggagagctggtcgttacgtgggaaagcctcatgccccgatagagcttcattacgtcgatgacagattaatgtgaacaatgcgtggtgacgtctggctgcagcgtgcagcctcactcgatgagctgaatatttattttcacgcggtacgttggtcactagaatagtgtggatggatactggtaatgacaacgctgttagtcgtctgtaacgatctggattacttcttaagacatcggtttgctgttcccggtgaattggcaaagcgcggtcatcgcgttgtcgtagccagtggaggcaaggcatttgtcgaattaccaccagaaggcattaagtttcaacatctgaaaatcgaccggttttcgtttaacccattcaaagatatagggctcgtgatcagatcgattgcaataatgatccgcgaaagaccgaagtgcgttcatctaatcaccctaaaaccggcggtatattcaggcttggccgctctctttcttagagctataggtctcgggcctgatcgcattttgataactattccggggctggggagactattgtcacctactaccgctcttcgtggggctcgggccgctcttgcgcgcattatttcgaagcaggtcttgagattaatttcccgtcgggggcttgcacattttaccttcgagaccgaacatgaccgcgccattctcagcgcggcaaaggtcgtgaccaatgcgaattcgtcagtaattcaaggagcaggcgtggatcccgccgatttttatccgcgtaaatacgctgatagttcaacggtcaaggtgctcttcgcgtcacgtttgctgaggtcgaagggtttggaggcattcctgctcgccgcagagcgcaatcctgaacctgacacagttgagtatctagttgccgggatagaggacgattcagatcccgacggctactcatttaacgatctgaaagcacaggtgagcgtgacattcctcggggaagagcttgatatgccgtcgctacttcgccgcgttgatatcgtgtgtctgccgacactgtatggtgaagggataccgagaattctaattgaagcaaccgcctgcggtcttccggcaatcgcaacgcaaactcctggatgtgttgagattatcgacgacgggaaaacaggcatgttaattccgctcgctgccgtaggtgatatggccaatagcatcaacgaatgcatcactgcttatgtgagttcgccagacttacggcgtgctcactccgagttggctttgaaaaggtttcgagaaggcgattactcggaaaaggcggtggtagacagattcattgatttgctcccgatgggagaacgataaaggacttttctcgatcactgtgctcgcaccgattgtttattttctcgtaacattttattcagcccgcgctggtgggcagtatggcgtcgagatgggggctgggcccggctaaaaggttggtgaagtcgcttcgaacgaggtgtagagggttgcgaggtaaattcagaaaccaatgacagcacaaattccgttgacatttgtcatcccttcttttgggcgccaacgagggctcgacaaagcgataaacagtatactctcacagagagttctacccgaagagattattgttgttgacgacgcttcgccagagcccttgcgcccaccggaagcggcgacagcaaccggtcgtgttcgtctaatacgccaacaatctaattccggcgccgccgaggcccgcaacttggggatgcaggctgcgaaaacagaatgggtgagctttctagatagcgatgactggttgctaccggacacgttgcacaaacggtggtcgtttttgaaagaggctgagggcggaaaggcccaaccgggaacgacggtatatggctgcggctggcaagacaccttgcccgatggcacagtgctacgtgaccgaattcctttgcccacagtggacagcgctgattttttccgggggtgctggttttcaccgggatcctgtatcatcatcaacagacgcttcatcctaacgacggtaggaggtgcggatcgccaactgcgcagattggaggactatgaatggttcgtccgggtgggacttgctggagttgatctagtggtacaagatattatcggatgtggaatagagcgaggaagcaataccagtctcaatgctgtgagaacggcctctaagcaaatccaactgcgtattagagaacttacagcaggacgagcggataaggcgaacttaataaagatatcagacgcctatttactatatgaacaagcggcgtcagcctggagagaaagacgcctgggaattttcgctttgttactggcaagatcgttaattgcccaaccccggctccgcgtttctccttcacctggttggtggatacgtaaaggtcaaaattctataaaacgttgactgtagcaataacttttcgaagcaacagcccgacggcagcgcgtgggtgcgaacgaaatgcttcaaaaagaacgcgcaaggccagtttcctctcatcttgcttgatacatccgttgaacagtcgcattaggaaatcgcacataagcgtttcttttcgtgcccctctctctagctgacgatactgagtccaagcactcttcagaccgctcgtgtcagacatagagacatatgcgtgacgcaaaacaaacagagcagcatcgacatcccgccgcaactggggagggaattcatcgataaggctcgcatttatcgtaacgactctttctgtgggatctcgcattccggcctttcgtgcccggtgcgctaggcgagccaccacactacctagttcctgtgcgtcacggtgtaccgaagacacgttgcgtccgtgtactcgatagctgagaagggcctgcggcaaattggcgattccatatcctagttcgctgatgcgaagccataggtcataatcctcgcaatgtctgaaagcgttgcgataaccacccgcctgcaatattgcctcgcgacgtaaaatcacggctggatgtgcaaccggggaaccgtgttcgagaaacgccgctgcatccctggccaatagtggataattgccaattcttatgaacttacctgactcgtctataattcgaattgagctaccaagtaccgcgagcttcggatcagcggttatttttgcgtattgaagcgcaaaacgctctggcatagctacgtcatcagcgtccattcgaacaataaactggcctctcgccaactcgacacctttgttgagcgcggaagtgagcccatcattgggacgttcgactaatacaactctagaatcaagagccgcgtaacctcgtagaatttcgccactgctatccgtcgagccatcattaatcaagatcaattcaaaatctcgaaatgtttggctgagaatgctctccacagcctcccctacgaaagcttggctgttgaaaactggcagaacaacgctgatcgcggggggggcggtcattttaataagatccagtcatttggatataggtcaagcacgttgcaagcggctagcctatccgggccaaaccagcgagccggagcaatgacacgcttaccctcgtgactattcagccatgccccccaccaagaataagagctgttggcgattatgttgtgttggcagtgggccatcaaaaacatgtcctcccacggtgaggaggggtcagagcgtacgacctctgcgaaggggagtgatccaaaagcctcagcaataaattcaggttcatcggaaaagagaaaaaaatgcgcctctggtcctattaagtctcgcatcaacgtcacagcgcggtcgtagtagcctcggtctagtacagcgtgcaccgttgccgctgccgatgtaacatagtcgccccgacgcacgtgaagcgagacactgtatggcgtagctgcaattctctgtgcccagccaactgctttttctgtcaggggcgttcttggtcggaatcgctcgcgcagcaaatcttcaactccctcaaagtaccgtgggctttgaaaatagccgtccaggacgacatcaccaatttctaggtcgaacactgttggatcgaagtggaaatgttgctcacggtagatacccttaggcaaaggagcgctgtgtccaagcatgcgaccaactcgtgccagaatcgagtttgcagttggcgcaactaaagctcccgtatacagatcctgaggcacgttaagacagtcgagctggtatggccacgttttgtaaaccttgaattctgacacatctagccgcaacgccttgttttgccgagcggctatcccgagtccccccgcatactggaacatttggtttccaagcccgccaacgaggcggattgcaactgtaccactcatacaagcgtcacccttcaccataaccaagcaagcgcttcacacgccaccatacaatgcggagaactccgacactaacctttaaccaaaaatgaacgggactaggaaaaatggtaacggccatcgggctatccgagctaaggccccgatagaaggcttgcgccaaagaaggtgaacgaagtgtcggtaggacgacatcaatggcgcgccgttgtagactgtacttaagccgtcgatctccgccgattacgctttcccactttgaaaagacaagcatttgttgttgaaagaactgcagttcgcgtcccggatggttccggcgctgagcactttgatcgtgaacacggatgccgacaactgcgtcagacgtgaaatcaacgttgctaactcgcgcaagcctgatccaaagatcccaatcctcaccatggaaaagccgttcgtcgaagtagccagcactgtcgagcacatcacggcggaccagaacgctagacgccgagccagacaagacataatcttccagaagaagcggcgcaaacacatctcctcgcaatctaggcgcgaaaatcgtggagttttcgataggtttatcgttctcatctatacaaaaatacgaagagtgtacaaaacccgttttcgcgccgccccgcgcgaaagcttccatctgtcgttcgagcttctccggaagccaaacgtcatctgcatcgagaaacgctatgaattgagccgacgactccgcgatcgcagcattcctcgtagaagacacgcctgcgtgtggtagctttaaatatgtgatacggtcgtccgcctgcatcaacgctgcaacggtgttctcggtaccgtcggtggatccgtcgtctgccacaatgatccgcgcaaacgctaaagtctgctgctgtacggactttattgccttggaaatgtattcctcgccgttgaagaccgggattatgacgtcaatattactgctcacttgatctgtccgtatctctcaggcgtacccatgactcccacacgaatgggtatctccactgcaatttatgggtacgagcgagtcgctttgccagctgattgtactgttgcctagcccccggaacatgcaaatggaactgcacttgcaaatgttggatcgattctatccggcgagactcaatcaaccgattcaaaagcgcatactccccgccctcgatattgagcttcgcaaggtgccattccctagtgtcgcactggctgagaaatcgctcagcatcccataagactactttaacaagtttgccgctagagcgtccgaaggcaccagacgcgtcggcatcaacttcgaaatcaacgacctcatccttgtccgaaagcccagcctcgtaaacgcgcacccgaccatcgttagcaaaacgctgtttaatctggctcgcaaaatccgacatcggctcgaataccgtcacatttgcatcgcagcgctcgataaatcgagcagcgaaatctcctgcgtaccctccaacatcaaggacattcgcgcccgatggcaaatcgtagcggtaacgcgcctcttcatggggatatcgcgtgatccacctttgatgtgcgcggtagaagtcgctactcatgtacatccagtagtgacctatccgccgcttcattattatttcgtaatactttaaacgacggtatattcttaacagcacttggtgtctttccagttttggggatagccgattcgtcttagtggggatcgacggagcgaaatagccttccggatacagaataccaggtcccgttcccgatggcttgtcacctgacaagatctcgcttgccacttttgccaatactgcgaatatattatgttcgttcaagatgcggtgacgcgcctcttccaacgaatctctgcgcagctccgccagatctgagctaatcactcggcgaataatctcaatggcctcctcgggtctgtatatattaatctgctggagcgactcttccgggaaatagtcgccaacattagggcagccatggtaaatcgggtacgtaagagttaaatatggatccgcaagcttttccgtccaatagtcttcgactgaacagttctcaagtgcaatgtgatatcggtaggtatctagaacatctcttttgtcagcgaagtcttcaattcctcgtccgaagacgtcaacttgatcgcccaattcagccttgagcctggcaacaaaagctagccgcgcccggtgctccgcagtgaagttcttgtctgaggaaacgaccgaagccacacgagttttcggcggagcgaacgtctcgaagtcctcgaaaaccattggcttgtcaagcaacttaccaccttcggacatgctgccgacgtgccacggcaagcctgcttgcataaagattgggcaggggtgttgcgtctcgcggtcggaagtgattaccgcatcgaattgggcgaggaacgccgacccgtagcgttttacatttggtggttccgatgctataaaaacgatcggaactgactgcggaaccacagtttgttgctcgagttcatcgtaaacaaagatgatatctgattcatcgatcggggcaaaaaactcgacactgtgaaaaatcaaccgcccaacgggcagctggcgcctccacggccatgtttcgtgcttcgtgatgaatgctgccttagtcatagaattccgctgccactcgctatctgcattccgacacacttacgcataacttcagcctgattggctcatagccgtaccgctccgtcattcaaaccccgttaagcgatacatcttgatattccgatcgattcatttgatatcgggacgacggcccactgattttcggtagagccaacgatgccataggaaccgtaggacacgaaacgctggagagggcaaccgcacgcgcagcgttgtagacagtttcgcaatttggtatggcaaatggtcacgtttccaaacaagaaaccgcaacgcctccctatcatagacctcacgtagtgatagcctaggcgtcagggctagtatcttctcggcatcagcgatatcttttgtggctccccgacttactttcaagaacagcaccgcatccagagagaggaattttaatcctttccagcgaaaatggaaatctgggttggcaataaagctgtccaacgagctcgagatcgcaggatattctttgttatggctcgcgatatcgaaatctgatacttcgcgcttggttaaaatctggcttctcgcggcgatgtagtcaaaatcattgcagtctcgaattccgtaggccgcaaggactgcgccggaatcaatagcaaattcttcttgatcggtccgtgcctccaatgctgcggtatacgcggatagcaatctcttgaactgttttggcttctcgtaggacgacttcctaagatacttaagaccaccgctcgaaagcacgatgtcggctatccattgcgtctctttatgagtatcatttgcgtggacgcagtgcaccgcaggacagtgctggcgaattagttctttgatcggacgtgagccggctttgtcagcgggagagaagaagatgacattgattttcctgctgcgagacaagcgcagctgaacgaattcagcggcctttgcatcactccaccaaggttcatggccgtacagcaaacgcatgaggttgagacagcctacgttgcctaaaactatttccttttcataaacgagttcaccgtttgccgtaattacacttctcgctgtttctagaacactttcggattggccgaaaaaaaccgcgcagtagacgttctcgtcaatacgaatatattcttgaagtaattgttcggtagcggaatcctttagtccaagctgccttaagccgcgccagttcatcacctgtcgcggccccgtgacttcaacaaaatatattggatagttgaaatataaggcgacagcatatcgatgagcaccatctacgatggtgtcgcccgaaaatggaatgacaacatcgtctacattgaacctgccgttgcacgcgtcgcgcattaagttcaaaaagttcgacatatagtcagtaagattagattttctaccatccccgtcgtaaaaggaagggctacttgcgaacagaagagctctatattgctcagcagcccaacctatcccccacccaagcgcggtgtgtttgaccagtaagtaccttgatattatatcaagcctgtttggtgaaagaaattcgcgcgcaggcgcacgaaagcaccggccgttctctggcaactcgtaaaacttccaaatgtttttatcgagtttgagaaccaactcctgtttgttaatcgatgtctcaatactcatttgcgatttcccaagcgaggacgggtgcaaccgatgacgggcgtgctccgatccagagacttgaacggagggagttcccctggactgtcagcgttatctcggcttcgctgttctcgcgagacagtaaagtatggtgatgcatcacacctgcgatagcttgcagtctgtattcaccatcattcagggtattgataggtatctgagacctgagcgtctttctgccgggctcaagcttttgaccatcgtggaggtccgaatggtatgtatagtatacgagtgtttgcgtctgatcgtaaagcgcataaccaatcgccaggttcgggttcgtggttttcacatcgcattgaaattcaacgaacacttcttcctcagctgaaattggtcgtgagatcacctctttgtcacgtgtgacagcacaaaatcgaatgggagtaagctctgcaaagtcaatttggtcgttattcagccattcagagagcttcttttgctcatttcgacgaagatatttgcttatcacataagaaacatcgccactgtcttcgatcactgagccttcttgcaaaaggatacaacgattgcagagctgccgtaccgaactcaaattatgcgagacgaagatgattgtgcgcccagaggccgaaacctctcgcatcttcccgaggcacttgttctgaaaatccatatcaccaaccgcgagcacctcatcgataatcataatttcaggttgcagatgggcggctaccgagaatgcaaggcgcattttcataccgcttgagtaacgtttgataggtgtgtcgatgaaatcatcaacgcctgagaatgcgacgatttcatcaaaacgtgctttaatctcgtgtttcctgaggccaagaacggtaccgttgaagtaaacattctcacgccctgtcagttccgggtgaaagccagttcctacttctagtagagagcccaccctcccgttcaggattgcttgaccgcttgttggcgtggtgatccgcgaaaggatcttcagtaatgtgctttttcccgcaccattgcgccccaaaattccaacgacttctccctcgttcacatcaaaagatacgttcttcaatgcccagaactcgcgaatactctgctgggctgcttctttcgctgtacgggggttcctgcgcagcgtgagggacgccacaagatcgcgcatggtatcatacggtgctccactaccgttcaactgatacttctttccaattccttcgacgctaatgattggcggcatgcctcagatcctatccactatcgtcggttcgagttggcgaaacgtacgaaatccgagaataaaaatgaccgctgtccatgccataagaatgcagaaggacgcagggggcggggcgggggagccaatcaataagaagcgtgcagtgtccaagagagtggcgatgggattgaatagaaagacccatttgtaagcttccgggatgaagctaactgggtagataacaggtgtcaaatacagcccgatttgcacaaaaaagggcagggctatgctgacatccctgtaaatcgcgttgactggtgcaagcagcagtccgaagccataccccagcatgcctaaaaaaagcactagcagaggaagcagaagagcgtaaggggttggcacaagaccatacatcaacatgagcccaagcaaaataacaagagaaattcctagttcgacgacccccgacagcgctggaactaacggcagtatcaggcgaggaaagaatacctttgttataataccttcatttttcaccagcgaactcgaagattcgattactaccttgctgaaatactgccagaataagagtcccgacagcacgaatactggatagggcaacccgtctgcgggaaccttggccaaaaacccaaagatcagcgtgaagatcacggtggtaaccaaaggctgcatcacagcccacgctacccctatcaccgactgcttgtaacggatttggacctctcgcagcgcgagagtccatgcaatgtcgcggtttgaccatacatctctaaggccgtcagcaactgtatgtcgcgcctgcggccgaataacgactcgggctgcacggtgatcgtgtggcttcttgtctatcacttaacttccgctttctaatcgcggcggcaggaattggctcgcgccgccgtttcgtcaagacactgacgcaacaactcgaactcttgcgttagcgggaagtgatgattgcctatgaatagaccaatgtcgtcgatggattgtgcattcggcaattcaccgctaacggaatagtcgaaccattgcaaaacctcgttcttcgcgaagtttccggcaacaatcggcctaacatcgaccttgtttcggtcaaaggtggcgataagttgctcacgagtgaaaggcgaagctgaatctatgagcatagaaaacccgaaccaactgctttggccaatctcccgctggaggcgtacatatggataattgctcatcagttcctcaaatgcttctgcattccgacgacgctcggctacaagattaggcagcttccgtagctgcgccaaaccaattgccccgctcatctctaatgggcggaggttgtatcccggaagcacaaaccgaaaggactctgtgaaagcatcatcgctcttaggcgtcgtaactttgttgaacttcggtagattccgcgtccatccatgagcacgcaaagccagcataatatgatacagttcttcatcgtcggtcaccaccataccaccttccatagtggaaatgtggtggctgaagaacgcgctgaatgttcccatgactccatgggtgcctgcttgccgcccttcgaaggtggcgcccatcgattcacaattgtcctcgataatgtcaatccgtcgctcgccaacaatcgatcgaatacgcgcgaagtcgttgggattgcccagcaaattcacagccataattgcccgcgtcgctggtgtgatcgcgctttccaactgatctaggtcatagttcaacgtgttgatgtcaatatcaacaaaccgcagtttcaggccatattgataaagtgggtaatatgtagtgctccacgagacggcaggaacgatgacttcagcaccaggtagcaagggatggtccttgcggtaacggagtgcgccaaccatcactaagttcgccgacgaacctgagttcaccatcacgcaatattttgcgtcacaccaggcggcgaaagcatgttcgaactcagcgactcgcggccccatcgagaacattcccgactccatcacatcccggatcgcggcgtattcctcttcatcccaactagaattagctagcttgtaggtcatttgcatcatccaatgttaggaaatagtcgtaagcttggcgaattccgtcgcgcagggtagttcttggtgcccaaccaaactgggtttgccttgtgacatcgagtaatttgcgcatcatgccaaccgggcgtgatgtgtcgaacacaaagccaccatcataaccgactacatcggctgccacttcataatactcacgaaccgagaggtcagctccaatgccaatgttcaggtcaccgggcattccagaaatgcggtcaaggcagtatacgatcgcctcagccaggtcccctgcaaacatgaattcgcggcgagctgttccgtcgccccagatttcgacctctcgctgccccgtcattcgagctacatgtagtttccgtattatcgcaggtacaagatgtgaaaccctcgggtcgaacttatcgtagcgaccatagagattgcagggaatcaaggtcttgtactggattgccggcgtctcgttgcgcatatatgcgcacaatcgggctataacgcatttagcgagcgcgtagccctcattggttggctccagagagccgcttagaacatcttcctcacgcaacgcatcagggctattgcgcgggtacatgcaagaactcccgaggttgagcaagttcggcacgccggctgtccgagcagccgacagcaagctatgaccgatcatcacattccgcgtcagatacgccactggctctcggatattcgcctggattcccccaacatagccagcgcaatggataatgaagtcaggccgataccgctctagccaaactagtactgcagtttggtccatgaggttcagatcgccacttgggggggcaagcagctggtgtccctcgttcgcgagacgatcgagtacattgcgccctaccattcccgacgaaccggttacgaatattcgtgacatagttaaaccccggtcggccctttagctgctgagagacgggcttcttcaagatcgctcgcaaccatttccctgacgagtgcgttgaaagatgtagtgtgccgccagcccaactttgcctgggccttagcaggatcaccaagcaaaagatccacctccgtagggcggaaataacgagggtcaatttttacaagttcggctccagtcttagcatcgatgccgatctcattcacgccctcgcccttccaagatatagtgcggccgagctcgccaaatgctagctccacaaactcacgcacagagtgcgtctcgcctgtcgccaacacgtagtcatcaggctccttctgctgtaccattcgccacatcccttcaacgtagtcacgcgcgtggccccagtcgcgcttggcatcgagattgccaaggtacaggctcttctgttggcctatttcgattgcggcaacggcacgagtgatcttccgcgttacaaaagtttcaccgcgaattggactttcatgattgaagaggatgccatttgaagcatgcattccataagcttcgcggtagttgactgtgatccagtaagcgtacagcttcgcagcagcataggggctacgaggatagaaaggagtggtttccctttgcggagtttcttgaacttttccgtagagctcggaggtagaagcttggtagaagcgggtcttatcttccagtttcaacaagcgtattgcttcaagaattcggagagtgccaattgcgtctgcattggctgtatactctggcgtctcaaagctgacctggacgtgactttgcgccgcgagattgtaaatttcatccggttgcacttcctgaataatgcggatgagattagtcgagtcagtcatgtcaccgtacacaaggcgaaattgagtctcgacctcatgcatatctttgtagatatgattgatgcgaccggtgttaaatgaggatgatcggcgcttcacgccccatacagcgtaaccttttgagagtaagagctccgcgaggtacgcgccgtcttgcccagtcacaccagtgataagtgctcttttttgcaaaattcaatccgtcgttggcccaccagtggctatactgtgcgggaggtagccttgagaaaattcccctccacttacacgaagtcctacctgcacgacaacaaataagatggcggtgatcaagccatacaggcttatagggacggtcgccaatcaatgttctcgtgcccaaagccgttcaagcgccgcgaagataggtccgggcgccgcagcgagaacccgataatggctctgggtccaagtgcctaggattggccctactaaacgcgcgatttgggcggtgctatcctcgagcggtttggatttcatccggtcgacgagacgcgtcgagctgacgagggcgggggagactttctacgatcgtgccgttcgcatcctcagcgagatggagctgacgaccgagctgacgcgggccgccggcggcagtcgcatccgccagatcaagatcggtaccgtctgtccagccaccatgggcatgttgcccctgtttcttggcaagatcgcccgcaagtttcccgacgtccgcattcacattgcttcaggcaacaccggagacattatacgcgggctggagaccggacaattgaacctcggttcatcaggccggtcgagaacattggatcgctgcgcttcttctcggttgcccatgaacgctatctgctggcggtttcggagagcaatcctctggcttcgctcaacgagatctcgatcgaagacctacgcgatcagaagatcatcgccttcaaccggcagaacctctcctacaccgaacggtatttcaacgggaagttcgaggaatatgatctgaccaagaacgtcgcctatagctgtgatgacacctattcgctggtctctctcgtctccgccggtcttggcatcggcttcgcaccggagtggacgaccgatatcccgaaccgcagcttcgtgctcaaaaagggtgagggggatcgacttcaagatcgggcttggcattgcctggtcgaaagaggatccgacggcatcgcgtgatgatttcgtcgagatcgcgaagtcgatggtgcgccgaggataatcagtcgcggcgagcgtagctcccgcctgtcaccgccatttcgaggccagcgccaccccgtcctgcccctgcttttgtcctgccaggctcgcgccggccgcaacggccttgccgtcctgctcttcgttccggccctacgggtgccagccgacgcttctagcctggctttcggaccgccgtggcaggtcgcgatggtcgcgaccccgaacggaggccgacatgacaagagagcacagcaaccacagatccgatatttatagccgcatcaccgacaagatcatcgccgaactcgaccgcggcgtgcgtccctggatccagccatggcacagcgcctcgccctcagcgaccgtcacccgtccacttcgccacaatggcgagccttattccggcatcaacgtccttctcctctggtccgaggcaatcgcccgaggcttctcctcctcgacctggatgacctatcgtcaggcagtgcgacgtgaaagtcgcatgaaaggagtgaccccatgggtccatgagtagtgttcaactctgtcgccacattccccatgcgacgtcggtaacggcgtggtgtgaagcgggaatgaaagcccaagatggaaatgcagccaacgcattttgtcgggcgaggcgaaggtcggaagggcgaacgcgagtgaattctcatcgaaacgcgccgtgaggtagtaaggccgtaaccgttggttgacacggccgagctgggcaaatgcgaactggggtgagcttggccccaccgcgaacaccgcgccccggcgtactgagagcgcccgccccgaccgcatctccttcatgtggaacacggaaaccccgatgggaaccggtggcaacgccggtaggccgaccgcaagggaagctgaatgcccagcgggaacaggaagacccaagaagcgaatgccggcagatcgaaagatcaagggaatccataacctgccggatagagcaatgctcaagccgaaaggctgctgacgtgggtttggtgaaccgcccgaagacgttgtgatgattgctaaccgagggaaaagttaggtgcggaattcttctgcaaacggaaccaagggacagaccgactggaatgccgtcaactggcggcaagtcaatcggcgcgtccgcaatctgagacagcgcatcttccgggcgtcccgtgagaacgaccttgccaaggtgcgttctttacagaacttgatgcttcggagttactcaaacacgctgaaaagcgtgcgacaggtcactcaggagaacaagggaaaatacactgctggcgtagacggcatcgtcacgacgaccgtcgaggctcgcaacgagttggccgacagcctcatgtcggttcagccgtggcgagcagcgccagcgcgtagggtgtatattccgaaggcaggcgggaaactgcgcccccttggaatcccaaccatccgtgaccgagctttgcaggcgcgggtgaaaaacgcgctcgaacccttctgggaggcacgcttcgagccttgcagctatgggttcaggccgggacggggatgccacgatgccatagcgagaatctacaatgtcgccgcaccagtgcgccgccgccgatgggttctcgatgctgacatcaaaggggcgttcgataacatcgaccatgaattcctgctcaacgccatcgaagggttccctgcaaaggagctcattcgtcagtggctgaaagcggggtacatggagcgcggggtctttcacgacagcgatagtggtacgccgcaaggtggcgtgatcagtcctctgctcgccaacatcgccctgcacggcatggaggccgcggttggtgtgaaatacatcacccgcggcgacaatgtcggcaagcggtgtttgatccgctacgcagacgattttgtcgtcttctgcgatagcgaagaagatgcgtgtcaggctcgggtggaactatccgcctggctggcagcgcggggccttgtcctctcagacgagaagacgcggatagtgcatctatccgatgggttcgacttcctcggcttcaacatccgccaatatcggagtccggaaacccgatggggctggaagctgttgatcaagccttcccggaaatcggtgaagtcgctgaaagccaggatgatacgggaatggcgaggactggacggtcagaacatagtcaccgtccttactccggctaaacccgatcattcgaggctggagcaactattaccggagcgtggtatcgaaacggctattcgcccaactcgacagctggatctttggcaaagaggtccgttgggcgcggaagacacatccgcaaaagccatggtactgggtcacgcgtagatactggggtaagttacaccccaagagaatggactactgggtcttcggcgatgctgccggagacggcggtcgtctcatcaagtttgcgtggaccccgatcgttcgacatatccttgtgaaagggggcgcatcgccagatgatccagccctccgagactattgggtgcgacgaagatcgcgtcagcatgccgagctttccggtcggcaacaggctctcgccaaagaacaaggaggcatgtgcttccgctgcggtgagaccctgcacaacgacgaggccctgtgcgttcaccacatcacggcacctcgccttggtgggaaacgcacgctcgataatcagcgcctcatgcacctctactgccatctccaggctcttgctgcggagaggagtgtacgggatcgcaagcggtttgcttgagccgtgtgcggggaaactcgcaagcacggttctgagggggcggggcagcggcgacgctgccccgctacccgacctggaactgggagccgccgtccgcaagggcgagaccggcacaaccgtcgtcttcgccagttcgatcatccgcgccg

SEQ ID NO: 9 - DNA, 150380 bp, Rhizobium matallidurans
  source 1..150380: mol_type = genomic DNA
agccgtcacgaatccggataaagcatgccccacaaggtttccctgtcccgtctcaagctcaccgactttcgcaactatgcgtcggccggtttgcagctggatggccggcatgtggtgctggtgggggataacggcgccggcaagaccaatctgatggaggcggtgtcgtttctgtcgccgggccggggcatgcgccgcgccacctatggcgatgtcacccgcgtcggcgcccatggcggtttctcgatcttcgcggcgctcgacggcatggacggcgaggtcgagatcggcaccggggtcgacggcaacgacgagagcacgtcccggcgcctgcgcatcaacggcacgccagccaagaccgccgacgagctcaccgatcacctgcgccttctctggctgacgccctcgatggatggcctcttcaccggcggttcgtccgagcgtcggcgctttctcgatcgcctcgtgctgtcgctcgatccggcccatggccgccgcgccagcgatttcgagcgcgccatgcgcagccgcaacaagctgctcgacgagcgccgcttcgatccctcctggctctcgggcatcgaggagcagatggcaacgctcggcatcgccatggccatggcccgccaggaaatgctcggcctcctcgtccgcctcatcgaggaaacgcgtgagacctcgccattcccgtcggcctcgctcgatctcgccggcttcatggatggccagttcgatcgtcccgccgtcgatctcgaggacgaatacgccgcacagctcgccgaaagccgctatcgcgatgccgccgccggccgcacgctcgagggcccgcaccgcgccgatcttctggtccgccaccgcgacaagcgcatggaagcggcgcgctgctcgaccggcgagcagaaggcgctgttggtcggcctcatcatggcgcatgcccgcctcgtcgccaatctcaccggccatgcgccggtcctgctgcttgacgagatcgccgcgcatctcgacgaaaacaggcgcgcagcacttttcgatctgatcgacgcgctcggcggccaggccttcatgaccggcaccgaccgctcgatgttctcggcactcggcgatcgcgcgcagttcttcaccgttgccgatggaaagatattcgaatgaccgacactttccccgtcgccaagggccatgctagcatcgcgcccatggaaccgttgagcccggaagaaatcgcccgctaccagcgccacatcctgctgcctgagatcggcggcgccggccagcagaagctgaaggcggcccgcgtgctcgtcatcggcgccggcggtctcggcgcccccatcctgcaatatctcgcggcagccggcgtcggcacgctcggcatttcagacgacgaccgcgtgtcgctctccaatctgcagcgccaggtcatccacgattccggcacgatcggcgaattgaagacggaaagcgcggccttcgccatcgcgagactcaatccgcatgtccgcgtcatccgcttcgaggaacgcttctccgcagacagcgcccgccgccatctctccggcttcgatctcgtcatcgacggttcggacaatttcgacacgcgctacaccgcggccgatgccgccgaggcggcgcagttgccgctggtaacgggcgccgtcggccggttcgatggctcggtcaccgtgctcaagccctatgaggccgctgccgatggcgcgctcaaccccgcctaccgcgacctcttcccggaaaagccgccggagggccttatccccgtttgcgccgagaccggcgtcatcggcgcgctcaccggcgtcatcggcacgctgatggcgatggaagcgatcaagctcataaccggcaccggcgagccgctggtcggccgcctgctgctttatgatgcgcttgcggcgcgcttcgacaccatccgctacaggcgtcggcgcgcccggcagagcccgagccagagccagagctaggcatcgtgaccacccttcgcctcgatgccggtttcccgcgctgggacgagcttctcgcgctcatcctgtcgtccttcgcttacatgaacggccgcatcgatccgccatcctcggcgctcaagctgacggctgaatcgttggccgaaaaggccgaaaccgagatcgcctatgtcctcatcgaggacggcgtgctggtcggctgcatctttctgcggcccgaggcggattgcctctatgtcggcaagctggcggtggcgccgggtgccgcacggcgcggcatcggtcggaaactacttggcgtcgccgaggacaccgcgcgggcgctttcgctgccggcactgcggttggaaacgcgcatcgagcttaccgaaaaccacgccgtcttcggccgctggggcttcgagaagaccgcccagaacgcccatccgggcttcacccgcgtcacctcgatcgagatgcgcaagcgactcgctgttgagggcctcgcgtcttaacgccccggcagcacccggttcggcgggcggtggccgtccatgaaggcgcggatgttgatgatcaccttgtcgcccatgtcgatacggccctcgatcgtggccgagctcatatgcggcagaagcaccaccttgccctcgttggcgagcttgatcagcttcggattgaccgcaggttcgttctcgaacacgtcgagcccggcgccggcaagcttgccttccctgagcgacttgatcagcgccgcctcgtcgatcacgtcgccgcgcgccgtgttgacgagataggccgtcggttgcagcagcgcgaggcgccgtgccgagagcaggtggaaggtcgccggcgtcgacgggcagttgaccgatacgatgtcgacgcgcgccagcatctggtcgaggctttcccaataggtcgcctcgagctcgtcttcggtcgtcgccgtcacgcgcttgcggttgtggtaatggattgagaggccgaaggccttggcgcggcgggcaacggcggtgccgatccggcccatgccgacaatcccgatccgcttgccgtgaatgcgccgtccgagcatccaggtgggagaccacccggcccattcgccgggccggtctgtcagcacgcgcgcaccttcgccgagccggcggggcacggcgaggatcagcgccatcgtcatgtcggcggtatcctcggtcaaaacgttcggcgtgttggtgacggtgatgcccttgcgggcggccgcctccacgtcgatgtggtcggtgccgttggagaagctggcgatcagcttcagctgcggcccggcctcgtcgatcagcgccgcgtcgatccggtcggtcacggtcggcacaagcacgtcggcgctcttcatcgccgcggcgagctgggccgcgctgcgcggcgtgtcgtcgatattgagctcggcgtcgaaaagttcacgcatgcgcgtttcgaccgcgtcaggcagcttgcgggtaatgtagaccttggtttttttcttcgtcgtcatatcctggagctgctgccttgttcagaggtccttaaccaagacgcgggataattttcccgttccggggaatttctaccagacccgtacgcgaagacaaacaaaactcgttgagcgtgcgtggaatgtcgaggtccggaaaccaggcggaggaaccgcctgggtcttagcgaacggaaatcgtcatgcgcagcacagtcctgaaatcatgcctcgccctcgcgttgggctttgtgctttcggccggcaccgccgagcttggctatgcccaggcggcgaagggtccgagcggcctgccgctgccgcgctttgtcacgctgaagtccaagcgcgtcaatctgcgcatcggtcccggaaccgattatgccgcgtcgtggatgtatctgaaagccggcctgccggtcgagatcatccaggaatacgacaactggcgccaggtgcgggatgccgatggcaccgagggctgggtcaaccagtcgctgctgtcgggcgcccgcgccgccattgccgctccctggatgaagggcaagggcaagagcgtcttcgtcaacatgcgccgcgaagcccagccgtccgcgaccgtcaccgccaagctggagcccggcgtcaccatgacgatcggcgagtgcaacggcgactggtgcttcggcaagaccgacggcgccgagggttgggtggcgcagtcggaaatctggggcgcctatcccggagaggccttcaagtaaggcctgtcccggcgaagccttcaagcgggagaagccttcagcgaactgaaggcttcaggtaagcgcggccttagacaaggcccgcgcgcttgccggcttccacgagcgacgtcatcgggcgcggtccgatctgctggatgacgatgccggcggccaggcagccgagtttgccgcaatcctcgagcgtccgcccctgcgtgtagccgtaaaggaaacccgccgcgaacagatcgccggcgccggtcgtgtcgacaagctccttgatctcgatggcatcgacctggaagcgctcgctgcccttgaggatgacggcaccctcttcgctcatcgtcaccgcggcgatcttgcaatcctgcgcgatcttcgtcagcgcctcctcgaaatcctcggtctcgtaaagcgccagcgcctcctgcttgttggcgaaaacgatgtcgacggtgcccgaacgcatgaggtcgagaaactcgtcgcggtagcggccgacgcagaagctgtcggagagcgtcatcgacatttcgcggccgttctcatgggcgatgcgggcgcaatcgcggatcgcttccttggcgcgcggcgggtcccagagatagccttcgaaataggtgaccttggactgcgccacgacctcgggctcgacatcctccggtccgagttcgacgcaggcgccgagataggtgttcatcgagcgctcgccgtcctcggtcacgaagatcatcgagcgggcggtcggcgggaacttgcccttcggctgcgtctggtagtgcacgccctgggcgcggatgtcgtgcgcgaagatctcgccgagctggtcttcggcgaccttgccgaaataggcggccttgccgccgaagttggcgatgccggccgccgtgttgccggcgctgccgcccgaggcttccagcgccgggcccatatgcttgtagagcagttcggcgcgctcggcatcgatcaggttcatcgctgccttggtgatcttgtgatcaatgaggaactggtcgtcgcaacgcgcgatgatatcgacgatggcgttgccgacagtcagtacatcgaatttggtcatgaaatgggaggtcccggttttggtgatagccggtagtcggtcttagcggattttcagcccatgggaagcggaaatgccggacttgccgccgatcctttcgcaaaaatgccgcgtggacgtcattcgcctgtcattttggctggctatatctcctctcaacaagatcggcatggacggctttaacggcggtcgccgatcgagaagggcccgataaataaaatcatgcccttcgacgataccggtgcgacgctgaccacggatgaactggcagcatgaccaaccggcaatccggcaagaccggatgcggaaaagcgggccgaaccccgctttttttgcgtttgcgcccggcgtggcgtcattccggtttgtcagcgcgaacactttgctgctagacctttgatattccaaagcagtaggcaaatcctccccgatgtccgccatctttcttgacgttcttcccatcttcgtgatgatcctgatcggctggctgatcgtcaaggtggggctgatgaaggccgaggtcggcgatgcgctgagcgagttcgtcttcaagatcgcggtgccgctgttgctcttccgcacgatcgcagaggcggacttcaagggcgcctcgcccttcaggctctggatcgcctatttctccggcgtcgccgtcacctggaccgccgcccatattgcggccacccgcttttttggccgcgacgaccggatcggcgtgctcgccggcgtgtcgtcggccttcgccaacaccatcttcatcggcctgccgctggtccagcgcaccgtcggcgacaagggcctcgtgccgctgtcgatcctgattgccgtgcacctgccggtcatgatgatcatcggcaccattttgatggagcgcgccgagcagaagatcaatggcggcccgcgaaggggcatcgcgcaggtgctgcgccagatcacccgcaatctcgtccgcaatccgctggtcatcgggcttgccggcggtgctctcatgcatcttctcggctggacgatgccggtgccggtcaagctggtcgtcgatcagatcgccggcgtcgccggtcccgtcgccctcatttcgctcggcatggcactgcagcaatacggcacctcgggcaatgtcggcattgccagcgtcacctccgccttcaagctgctgctcttgcccgcctgcgtctggacgaccagctatctgctcgggctcgaaagagactggaccgcggcgctggtgctgatctcgtcggtcccgacaggcgtcaacgcctggctgatcgccaatcgcttcggcgtcggccacggccttgccgcctcgacgatcacgctgacgacggcgctcggcgccatcaccgtctccttctgggcctatctgctcggatagccgatatgcctgaaacgaaaagcccggcacggcggccgggctttcgcatctcatccgatggatgacgtcactgggtcgccgaagcaggcgcattcggatccggcagcgccaccggcgaatcggccagcgaacgcaggtagaggatcacgttggcgcgatcggcttccttctgcaggccggcaaagcccatcgccgtcccggcaatgtacttcttcggcgccgccaggaactcgttcaggtgctcataggtccacttctcgctggcacccttcgaaaagtccttcatcgcggcggagtaggcgaaaccttcatgcgagccgatcggacgatctacgacaccaaagaggttcggcccgaccttgttcggtccccctttcgtgccgtcatgacaggcctgacacttcttgaacaccgtctcgccggccttggcgtcggccttcgcaagcaactgcgcgatcggcacggcggcagctggagctgcgccgccggcatcggcggccgaagcctcctcggccacgatggcaaagccttccttctccggctcttcggatttgaacaggctatccgaggcgatggatacggtcatcagcacgaagaccgtaccgagcagcgctcccaccgccgtattcacgtaagaattcatctgtgatgctcccccctcacagccggcagacataaaaccggtctgtctcttgaaatcgagcgaaacctatgtcttttggctaattcttgcaaccgccgaacgcctcggcggcatgagactttttgacacctttccgcccggaaatgaaggcctgagcaatggcaagtccaaatttagacaacgtactcgtcctcattcccgcccgcatggcatcgacccggctgcccggaaaaccgcttgccgacatctgcggcaaaccaatggtcatacaggtggcgatgagggctaaggaggccgcgatcggccgcgtggtcgttgccgtcgacgagcaggaagtcttcgacgtggtcgccgccgccggcttcgaagtggtcatgaccgccaaggcgcaccagtccggctcagaccgcatccacgaagcgctgaccaaggtcgatcccgaaggccgcatcgagtatatcgtcaacgtccagggcgacctgccgacgatcgagccggaaacggtgcgcgcatcgctgcgcccgcttcaagacgccgccgtcgatatcgccacgctgaccatcgccatcgacaacgaggaagacaagacggcgccgcatgtcgtcaaggtggtcggctcgccgttgtccgagacccgcatgcgggcgctctacttcacgcgggccacggcaccttatggtcaaggcccgctctatcaccacatcggcctctacacctatcgccgcgcagcgctggagcgcttcgtatcgctcgggccctccacgctcgaaaagcgcgaatcgctggagcagttgcgggcgctggaagccggcatgcgcatcgatgtcgagatcgttgacaccgttccgctcggtgtcgatactcccgccgaccttgaaaaggcgcggcgcattctttccgcccaatagaaatgaccgatgtcgcgaaatgacggatctcccatgagcatcaagaccaacaaaatcgcctttcagggcgacttcggcgccaattccgacatggcctgccgcgacatgtttcctgatatggatccgctgccgtgccagaccttcgaggatgccttcgtggcgctcgaaagcggcgatgccgatctggcgatgatcccgatcgaaaacaccatcgccggccgcgtcgccgacattcaccatctcctgccggaatcgcggctgcacatcatcggcgaatatttcatgccgatccgcttccagctcatggtgctgcccggcgtcaccaaggacgaggtccgcaccgttcacagccacatccatgcgctcggccagtgccgcaagatcgtccgcgccaatggctggaaggcagtggtcgcaggcgatacggcgggtgccgccaagctggtgcaggaaaccggcgaccgctcgatggcagcgctcgcgccgcgtctggcggccgatctctacaagctggatatcatcgccgaaaacgtcgaggacaccgaagacaacgtcacccgcttcgtcatcctctcgcgcgacgagaagtgggccgagcgcggggcagccgaggagaagctggtcaccaccttcgtcttcaacgtccgcaacattccggcagcgctctacaaggcgctcggcggcttcgccaccaacagcatcaacatgaccaagctggagagctaccagctcggcggcaagttcgtcgccacccagttctacgccgacatcgaaggccaccccggcgacgccaacgtccgccgcgcgctggaggagctgcagttcttctccgagaaggtacgcatcctcggcgtctacaagggtcacccgatgcggggccttctgcagaaataggattgagggcgttttttcggtcgttgtggacattgcgaggagccgagacgcctgccactctctccctcattcctgtgcttgtcacaggaatccagccagcccaagtccttgggctggaaggctcttttcgcctcgcagacgcgaggcggctggatccctgtgacaagcacagggatgagggcggagaggagggaagcgccgagcaataacgcgccaacgctgagcctccatcagcacttacttatccggctcacaaacccgcagccgatgcccatcgggatcaagcaccacgaaggtcgggccgaagtcgagctgtgtcaggtcctgggcgatcggcaggtggcggtcgcgccagtcgcggtagaggttcgagacaccgttttcaccgggcaccatgaaggcgatctcggcgcggctgccgatcgccgatggctgcggcacgacgctgctcagccgccacaggccgagcgtgaagccgccatcgagcgcgaaagccacgaaattgggtgcggcggcgaccggctcgcggttcaacagcgccttgtagaaattggcactgtcggcgggatcgcggacgtagagaatgatgagattagggctattcatgatggtgtccctttgcttgaaaatagacgtggtgatacgaacgccgccggggtcccggcagcgatccaaagcgtgatgtgaaatgttcgtaagtgtcggttacagctcacgcccggggtcacggtcgcggctgccccagtcgatgacgccgatatcgcgcctcagattctccgacatcgattgcggctcgaggcgcggagcgccacggcgccccatgccatgcgccatgcggcgcgacgcacttcgcatcaccctgagcatcagcgattgcgggtaccaggcgtcggacagagcctcgtcggaacggtggttgcctgatgtcggctggcccatggtgcggcccacgttgcggcacatgtcgcggcccatggtctggcatgtgttcaggctcgtcatggcaggtcctcctgtttcgatggacccacattagactcatatgctgtcagtttatggcagtagtgtttgccggtcgcgcggcacgatttcgcggtcgctccattcccgcagcaggatggcgcgccggcgcggatatcgcgtgtcctgcgggatcatctcgacgatgcggtcggtgcggaagtgccggtaatcctgtctaagctcgcaccaggccacgatcatccggacctgctctgtatagctgatggcgaagggccagacgtttcggatggagaccgcgccgctttcatccgtataggtaagcttcagcacccgctcgccgcggatcgccttgcggatcacgcccatgtcggccttgcttgaaatcggcgggcgcatgtggatcaggaggggcgaggtctcgatctcgtcgcggatctcgcgcggcagtacctcggcgatctttgccagagcatcggcgccggctgccgccagcctcggatcggccgcccgcgccacccatcgcgatcccagtaccagtgcctcgatctcgtcttgcgaaaacatcatcggcggcagcatgaagccgggtctcaggatgtagccgagtcccggttcgccttcgatgtcggcgccctgcgcctgcaggctggcgatatcgcggtagagcgtgcggatgctgacgccggtctcctcggccagcaccgcgccagtcaccggccgccggtagcggcgtagcgtctgcaacagggtcagcaacctctcggagcgcgccattccgttgacttaccggttgttccactccacccagtcgcgcatcaggcgatgggcgatggcgcccttcggcggtggcgccttgccggtcgtgccgggacgctcgagcatctcgatcgtctcctcgcgggtaaaccagcggcagtcctcaagctcctgctcgtcacgggtgatgtcgcgtgacttggcctcggcgtagcagccgatcatcagcgtgtgcggcatcggccagggctgcgaggcgtgatagcggacgcgccccgtgcggatgccggattcctccagcgtctcgcggcgcacggcgttctcgatggtttcgccgggctccacgaagccggcgagacaggaatacatgcccggcgcgaaatgcggaccgcgcccgagcaggcagagatcgcgctcctcgtcgatggtaagcatgatcacgacggggtcggtgcgtgggaagatcgtgtgctggcaggcgttgcagacgcgcttgtagccgccgatatgcatctccatcgtggagccgcagcggccgcagaacctgttgtcgccgttccagcggatcaggctggcgccctgcgcgaattcgccgagcagcacctcgtcgagcagcatgtcgcgatagagcgaccggccgtcggcgggcttgtattggctggacaactcctcttccggcacggcgaccggcaccgccaatctgggctcgccggtcttgcggtagccgagcaggatcgtctcgtcccagttgggcttgagatcggtcagctcgtagcgcgcgaacagcgggtcgagcacctggccgtcatgtttcaggaccagcttgtcgccggtaaaggcgaagatatgggttccatctttggcgagcgcctcgtccaccgagctttcgttgcgatgctcggaatcgcggatcaggtcgttggcggcgaatgccgtcagattgctgggctcgggatggggtacatccgtctcgaaaagcgaacgactcatgatgaaagggcttcccgcatcgtctcaatgaattggtttcgtttcgcgtcctcataagcctccgccttgccgtagccccagatcgggccgggccagttcggatcaccctcgaagcgcgcgacgacatgaacatgaagctggcggacgatattgccaatagccgcgacattgatttttgtcgccccggtcaccttcttcagggccgtcgaggcaagctccgtctcaaacgtcagcatcacctggtcgagcggcgtcagctcgaaaatctcggtgatatcggcgcgctgcggcacgaggataagccatggccagcgacagtccctggcgagccgaaagtcgcagaggccggttttcaggatactgatgctgtcattggccagccggtggtcgagtttgaaagcgtccaacgggtattcctccagagttttccataggctagcagttttttcggagcttggcttgcttttgatcgcgatattgccgatatgtgccttcgggaggttggtggtggacgagccactcgccaaccgggtcaggtccggaaggaagcagccctaacgagccaggcacgggtcatcgtgccagcctcccacccttctctccatcctttgcccgaagagttcgggcgttaagcagggcgatgagcgacaccgagcgacaatcaccagatgccgcctcgacgggcaccggataccgggtgctggcacgcaaataccgccccaaggatttcacggatctgatggtcggccaggagccgatggtccagaccctgaccaacgcgtttgagaccggccgcatcgcgcaggcctacatgctgaccggcgtccgcggggtcggcaagacgacgaccgcccgcatcctggcgcgcgcgctgaattacaagaccgccgagatcgacaagccgacgatcgacctgcgcatccccggcgagcattgccaggcgatcatggaaggccgtcatgtcgatgtcatcgagatggacgccgcctcgcataccggtattgacgatatccgcgagatcatcgagcaggtgcgctaccgtccggtttcggcgcgctacaaggtctacatcatcgacgaagtgcacatgctctcgacgcaggccttcaacggcctgttgaagacgctcgaggagccgccggagcatgtgaagttcatcttcgccacgactgaaatccgcaaggtgccgatcacggtgctgtcgcgctgccagcgcttcgacctgcgccgcatcagtgcgtccgatctcgtcggcctgttcaccacgatcgcatcgaaggaaggcatcgaggccgagcccgatgcgctggccatgatcgcccgcgccgccgaaggttcggcgcgcgacggcctgtcgctgctcgaccaggcgattgcccatggcggcggcgcggtgctggccgaatcggtgcgtgggatgctcggtctcgccgaccgcgcccgcatcgtcgatctcttccagcacgtcatcaagggtgacgtggccgcggctctcggcgaattcgagagccagtacgaggccggcgcaaatccggtggcggtgctcaccgatcttgccgatttcactcatctggtgacgcgtttgaaatacgtgccggatgccgcaaacgacccatcgctcagcgaaatcgagcgcaccaagggcgcggagttctcgcaaggcgtcgccgtcacggcgctgtcgcgcatctggcagatgctgttgaagggcattccggaggtggaggcatcctcgcgcccgtcgggtgccgccgagatggtgctgatccgcctggcgcacgccgcccaccttcccgctcccgaggacgcggcccgccggcttgcggaattctccgaaaacaacggcggcgcacgttcgccctcatcgtcgggcaatggcggtggaaatggcggcgcgacggtcagctaccagggcaatgtcatggcccgcgccgccgaagcaacagcgccacgtccgcagccagctggcccgaccgccatgctgcgcgtcgtcccgaacgccgatccgcagacgatggccgtcgggcgcaccgaggccaaacccgccgatgcgccgaaaccattggtctcggtcaattcggtcggcgatatcgccaatctggccggcgaaaaacgcgatgtgaagatcaaggcgctggtgcgcaatttcgtgcgaccggtgcgcgtccagcccggcatcctggatgtcaacctggccgaaggcgcgccgggaacgctgctgaacgagcttgcgctcaagctcaaggaatggaccggcattcactggatcgtcagcctcagccgcgaggccggccaaccgaccatggtggaagccgaggccaacgccaaggcgcagcaggtgagcgacgccaggcaggaccccgacgtggcggccatcctctcgcagtttccgggcgccaagatcatcgacgttcgcgtccgcgcgccggaaccggaagaagaggaaggtcccgtgcaggcgccggccaccgccgaatccgaagagggcgatatcctgcccggcgacgacatagaattctgagacaccaagaaggagcaagacgatgcgcgacatcatgggcatgatgggcaaagtcaaggaaatgcaggccaagatggagcagatgcaggcggagatcgcctcgctcacggccgaaggcaagtctggcggcggcctcgtgaccgtcgtcgtcaccggcaagggcgagatgcagagcctgaagatcgatccgtcgctcttcaaggaagacgacgtcgaaattctcgaagacctgatcgtcgccgcccacaaggatgccaaggaaaaggccgacgcggttgccgccgaaaagaccaaggcgttgacggcaggcctcccgatcccgcccggcttcaagatgccgttctgatcattcgctcgaatgtggatttgcaagcgccggcaccctcgggtggccggcgcttgtcgtttgcgcgggtgaaagcgggggaagacgaaacccgcgtcccgtccgctcacggtgccgcatcgagactgtcgcgcagcttgtagtggatcggcgcggccagatagcgggcacggtcttcggacgaaagccgcttgccgaatgtcgccatcatctccggcatcgtcacccgcgcaccctcgaatggctgccagtccacccgctctcctgttgtcaccgtgcccggagcgatcacccggcaatagatgccggggcgcccggcgcgggtgtagcgcttgacgaacgagggatcgcccatgcgcgccgcgaaggtggcgcagggaatgcgcgccgaggtgacctcgagaacaagatcgccggctatgaaccgatcgccgaccgccaccatggtgttgtcgagcccgtcgatgacgaggttttcgccgaaggcgccgggttcgatcgtgcggccgagctccgccgaccaccagtcgagcgtcagtgatccctcgacatagacggcctgatcgacgccgccatggtgcttgcggttgcagatcgcgtcgcccagcagtccctccgcgtccaccagcacgccgccgctgatggcgtgcttgttgatgccggtcttgtagctcttgcccggcagtctttccgcgttgccgatgcagacggcgaggattttcatggcgagcgcttttctgtccgtttccgttttcgagacatatgggctaagaacccgatatggcaaagcgagtcaccggccccgaaatcgaaaaactcatccagctgctggcgaaggtgccgggcctcggcccacgctccgcgcgccgcgccgcgcttcatctgatcaagaagaaggatcagctgctcgggccgctggcaagcgcgatgggcgaggcgcacgacaaggtcaagatctgctcgcgctgcggcaatgtcgatacctccgacccctgcaccgtctgcaccgacgaccgccgcgaccagtccgtcatcatcgtcgtcgaggatgtctccgatctctgggcgctggagcgcgcggcggcgctcaatgccgcctatcacgtgctcggcggcacgctttcgccgctcgatggcgtcggcccggatgatctcaacatcaagggcctgatcgagcgcgtcacggccggcggcatcaaggaactgatcatcgccgtcaacgccaccgtcgaggggcagacgacagcacactatataaccgaccagctggctgggctcgatgtgaagatcacgcgactggcgcatggcgtgcctgtcggcggcgagctcgattatctcgacgagggcacgctgacggcggcgcttcgggcgcggacgacgatatgaggggagatgaggtgaggggaaatttgatgccgtccgagatccgccatacccccctctgccctgccgggcatctcccccacaaggggggagatcagctgggcgcaatcgctcgttccaccttcattggttggctgagagcaagcaacgattcgatctccccccttgtgggggagatgcccggcagggcagaggggggtatcgcacggcacgcccttgccgcgctctgcttcctcctcgcaacctcgaatgcagcccacgcagccccctcgaaagccgaagttgaagcccagttccagcgctgggtacaaaccgacctctggccggaagcgcaaaagggcggcatatccgaaaagaccttcaaggccgcattctcaggcgtcacgctcgactggtcgctgaacgacctcgctcctcccggcttcccgccgccgaaggagcagaagcagacgcaggccgagttctcctcgccggcgccctatttcaacgatgaccggctgaagcgcctcgccgtcaccggccgcactttccagacgcaatacgcctcgacgctgaagaagatcgagaagacctatggcgtgcccggctcgatcgtgctcgccatctggggtcgcgagaccggcttcggcgccgccaagattccgaattcgggcatcgaggtactggccaccaaggccttcatgtccacccgcaaggaaatgttccgcaccgaactgatcgccggcctgcacattatcgatggcggcgacgtcacggcggccgatttcaagggatcgtcggcgggcgcgctcggccagccgcagttcatgccgaccagctacctcaaatacgccgtcgatatcgatggcgacggtcaccgcaacatctggacctcggttcccgatacgctggcctcgatcgccaattttctggtcaagaagggctggcagcgcgatcgcggctggggctacgaggtgacgatccccgaaaacgtctcctgcgcgcaggagggccccgatctcggcaggccgatcgcccagtgggccgcgctcggcatcagcggcacatccggcaaggccttcccgtccagggagatgaacgccaagggcatgatgatggtgccggccggccgcgacggcccggaattcctggtgacgccgaatttctacgtcatcaaggaatacaacaattccgatctctacgcgctctacatcggcaacctcgccgatcggattgcctatggggccggcgcattccagggtgcctggggcgatgtcggcaagatgctgcgctccgatgtcgccaccatgcagagggcgctggagaagaagggctacgacgtcggcggttccgatggcctgcccggctacaagacgcgccgctccatcggccagtggcaggaaaagagcggcatgaagccgacctgctatcccgaggcgcaaatgatcggcaagctcaactaagcatcaatgatgcaggtcgatatgcgccttgaagaacaggtcgtcgctcggcggaatggcctgccgctcgatcatccggtgcacatgcggtcccgcctcgccacgatgcagcgcccttagccggtcggtgttttcgccgtccacctgtgttcgtcgctggttgtggcggatatattcgacccaggtcggcgtgtggtaggtctcggtccatgagccgggcttctccaggtcgcgcatcagcgcccagttgcgtgcgccgtcgcggatgcggatgcgccgccgctcgcccatcagcatcaggaattccggcacgtcgctgtcgtcgatctcgtaatcgacctggatgacgacgggcccgctgcgtggcgtgatgtcgagcccgagcgagggctccgtgaagcggttgagcggatcgaggttgagcgaggcgaaggccggcatggcgaatttcagcccgatgacgataccgaacagcatgacgccggccgacaggagcagcgcgttggcgacgccgtaattgtctgccgcgatgccccagatccagcttccgccggcaatcccgccgaaggtcacggtctggtagagcgatagcgcccggccgaccacccagcgcggcgtcgaaagctgcacgatggtgttgaacagcgacagcgccagaacccaacaggcgcccgagatcaccaatcccaagcaggtgaccgccgaaatcgggctgaaggcggcaatcgcggcgctgagcgcgaagccggcaaacgacaggcgcacgatcgtctcgctggagaagcgctcgcgcagccttgcgttcagcaccgcgccgccgatggcgccgatgccgaaggagccgagcatcaggccgtaggtgaggggaccgccgaccaccagctccagcgccacgatcggcagcagcgcgaggatcgagctggcgctgatgccgaagatcagcccgcgcagcatgactttctgcaggttgggcgacatcgagatgtagcgcagcccggcgaagatggcgctgccgagcgcctcgcgcggcagtgtcgtcgcggggtaggtcggcttccagcgcaacagcgcgtagatcagcgcgaagtagctcatcgtgttgacggcaaacgccgctgccgcacctgccgccgcgacgatgatgccgccgatcgccggcccgacgctgcgggtgatgttgaagccgacgctgttcagcgtcaccgcgccgggaagatcggcgcgcggaaccatgtctcccaccgaggcctgccaggagggattgttgagcgccgtgccgcagccgagcaggaaggtgaagaacaggagcagccagggagagaggatcccgaagaaggcgaagacgctgagcagcgccgagaccgccagcatgaaacactgcgccgtcagcatcacccgccgtctgtcgaaactgtcggccagcgcgcccgagaccagcgagaagagcatgataggaagcgccgtggaggtctgcaccagcgccaccatgtcgcccgaggcggtgatcatggtcatcatccatgcggcacccaccgcctggatcaacccgccgaaattggaggcgatgctggcgaaccagatggtgcggtaggtctcgtgcctgagcggtgccagtgtcgatgatgtataggccacgattcctccgtcgaatgccatgcgctgcggcaagctatataagcgaacaggcgatcaaggccaccgcccgcccgccacgaccgcgccgcgccgccgatggagcttgcaatttcgcggaaacgggcctatatggctctcaaatcttgatcgcattgatgaggagtgggccgcaaggacccgctcttttttattaccgcgatcgcccgaaaatatcgcttaggagcgcatcgcttgtcggattcgacgaacgcagacaatgaacttgagccgcggctgatcaccgagactggcctcgaccagcgcctcgccgccatcatcgagcccgtcctcatcgacctcggctatcgcctgatccgcgtgcgcatgctcaaccagaacggcgccaccatgcagatcatggccgagcgcaacgatggaaccatggacgtcgaaggctgcgaggaggtctcggtggccgtttctccggttctcgatgtggaagatccgatcgataaagagtatcatctggaagtgtcgtcgcccggcatcgatcgcccgatggtgcgaaagtccgatttcgtgcgctggcagggccatctgctgaagtgcgagacctcgatcatcgtcggtggtcgcaagcgcttccgcggcaagatcgtttccagcgacgtcgatggcttcacgctcgagcgtgacgaggctccggccggcgaggaaaaggcgatcgtcattccgttcacggcgcttgccgatgcgaaactcattctgaccgacgatctgatccgtgatgccctgcgcgccgacaagctggcgaaggcagaggccgcgaaccagaacgaagcggaagacgaagaataaaccgatcaacttgtggcgccgggcaagggaaagcctggacgcctagacggagacaaaacacatggcagtcagtgcgaaccggctcgaacttctgcagatcgcagatgcagtcgcccgcgaaaaggtcatcgaccgcgagatcgtgctcgccgcgatggcggacgcgatccagaaggcggcgcgctcgcgctacggcactgaatccaacatccgcgccgacatcaacccgaagaccggcgaaatccgcctgcagcgtcttctcgaggttgtcgaggctgccgaggactactccacgcagatcccgctcgaactggcgcgcgaccgcaacccggacgcagcccttggcgacttcatcgccgatccgctgccgccgatggatttcggccgtatcgccgcccagtccgccaagcaggtcatcgtccagaaggttcgcgaagccgagcgtgatcgccagttcgacgaattcaaggatcgcgtcggcgaaatcgtcaacggcaccgtcaagcgcgtcgaatacggcaacgtcatcgtcgacctcggccgtggcgaaggcatcatccgtcgcgacgaaatgatcccgcgcgaaaacgtccgctatggcgatcgcgtccgtgcatacgtatatgacgttcgtcgcgaacagcgcggcccgcagatcttcctgtcgcgcacgcatccgcagttcatggtcaagctcttcaccatggaagtgcctgaaatctacgacggcatcatccaagtgaagtcggttgcccgcgatccgggttcgcgcgccaagatcgccgtcatctcgaacgacagttcgatcgatcctgttggtgcctgcgtcggtatgcgtggttcgcgcgttcaggccgttgtcggcgagctccagggcgaaaagatcgacatcattccgtggagccaggacccggcgaccttcgtcgtcaacgccctgcagccggccgaagtcgccaaggtcgttctcgatgaggatgccgagcgcatcgaagtcgtggttccggacgagcagctgtcgctggccatcggccgccgcggccagaacgttcgcctcgcttcgcagctgaccggctgggatatcgacatcatgacggaagccgaggaatcggaacgccgtcagaaggaattcaacgagcgcaccaacctgttcatggattcgctcgacgtcgacgaaatggtcggccaggttctggcctccgaaggcttcgccgccgttgaggaactggcttacgtcgaactcgacgaaatcgcctcgatcgatggcttcgacgaagacaccgcgcaggaaatccagacccgcgcccgcgaatatctcgaaaagctcgaagccgagatggacgagaagcgcaaggcgctcggcgtatccgacgaactgcgtggcatcgacggcatgaccgcccagatgatggttgccctcggtgaggacggcatcaagacgatggaagacttcgccggctgcgcagccgacgatctcgtcggctggagcgagcgcaagaacggcgagaccaagaagttcgagggcctgttctcgaagttcgacgtttcgcgcgtcgaagccgaacagatggtcgttcaggcccgcctcgcggctggctggatcaccgaggaggaccttgcgaaggaagcggaagctgaagaagctcccgaggccgagcaggaagtttaatgtctgcgcgtgagcctaccgtttctcctgaggacgacgatcttgcaggttatgacgtgaatggtcgcatgtgcatcgtgacgcgcgaaagcggatcgccggatgagctgatccgcttcgtcgccgctcccgatgggacggtggtggccgacctgaagcgtcagcttccgggtcgcggctgctgggtgaagatcgaccgcactctggtcgacaaggcggtggcgaagaaatccttcgcccgcgccctgaaaacggatgtgaaggcggccgccgatctcggtgaaaccgtcgacaagctgctgatgcagcaactgatgcagatgatgaacatggcccgcaaggccggacagttcatcaccggcgcctcgaaggtggatgccgcgatccgcagtggcgcggcccttgccgtgttccatgcaacggacgcggcggccgatggcgtgagaaagatcgaccaggctcgcaaggcctggcacctcggaatggagaccgaggaggaaataccttcctaccgactcttctcggagagcgaaatggaaggcctgatgggtcagaacgcttttatccatgctgcagtgcttgcagggcaggcgggtgagggtgtagtgaagcgcgcaaagatgctcgaacagtaccgcaacggcggtcagtcccgggcagcgggcggcgctggccggcaaaaacaatgatacggtcaccggacttgtccggacccggtatcattgatcgacattacttgattgacagggcctgatgacgtcatcgctccctgtccgaaggaacgggaacgaatgaccgatagcaatgacgacaagacactgaacggcccgggcaagaagactctgaccctgaaaccgtcgggcgtaagccagggcaccgtgcgccaggatatgggccgcggtcgcaccaaggcggtcgttgtcgaaacccgcaagcggcgcccgatgcgcccggaagacgaacagcgcccgatcaccccggtgacggcaccggcagcgcccgcccgcgccgccgagcccgcctccgcgcctgccgcacagtcggcggcgcctgcgcccgcgccggcgcctgtccaggcccgtccgacgcagccccagcagccgcagcgctacaaccagccgagcggccagcagtataaccgtccgcagcagccttcgcaggcgccgcgccagcaggatcgtccgcgtccggtggttctgaaccatctgtcgccggaagagatggacgcgcgccgccgtgcgctcgccatggcccaggttcgcgatgccgaggatgcggttcgccgcgccgaggaagaaaagcgccgcgccgccgaagagatcgtccgccaggccgctgccgccgaggaagccaagcgccttgccgcagaggaagccgcacgcgccgctgaagccgccgccgctccgccggcacccgccgccccagccgctgccgaagctccgcgcccgcaggccgccgcaccggccgtacgccgcaccgacgcaccgtcggctgcccgcccggctccaggcgctgcacccgccggcgctcccggcgtccgtcgccgcgagaatgaagacgatgatcgcggtgcgccgcgtggtggcgctccggcgcgtggccgcgtcgtgcgtccggaaccggcaaagccggttaccgcgcgtccgaagggcgacgatggtcgccgccagggcaagcttacgatcacggctgccagcacggatgacgacggcaacaaccgtggccgctcgatggccgccatgcgccgtcgccaggaaaagttccgccgcagccagatccaggaaacccgcgaaaaggttgtccgcgaagtcatcctgcctgagaccatcaccattcaggaactgtcgcagcgcatgtccgaacgcgccgtcgacgtcatcaagtacctgatgaaggaaggccagatgatgaagccgggcgacgtcatcgacgccgacctcgctgaactcatcgccggcgaattcggccacaccgtcaagcgcgtttcggaatccgacgtcgaagaaggcatcttcgaccgggccgacgatgccggcgaaatggtatcgcgtcccccggtcgtcaccatcatgggtcacgtcgaccacggcaagacctcgctgctcgacgccatccgtcaggcaaacgtcgtctcgggcgaggccggtggcatcacccagcacatcggtgcctatcaggtcgaacagaacggccagaagatcaccttcatcgacacccccggccacgccgccttcacggccatgcgtgcccgtggtgcgcaggcaaccgacatcgcgatcctcgtggtcgcggccgacgacagcgtcatgccgcagacgatcgaatccatcagccacgccaaggcggccggtgttccgatcatcgtggcgatcaacaagatcgacaagcacgaagccaacccggacaaggtccgtcagcagcttctgcagcacgaagtcttcgttgaatcgctcggcggtgaagtgctcgacgtcgaagtgtcggcgaagaacaagaccaacctcgacaagctgctcgaagccgtcctcctgcaggccgaaatcctcgacctcaaggccgacccgacacgtactgccgaaggtatcgtcatcgaagcccagctcgatcgcggtcgtggtgcggttgcgaccgtcctcgtccagaagggcacgctgaagcccggccagatcatcgttgccggcgatcagtggggccgcgttcgcgcgctcgtcaccgacaagggcgaccatgtcaaggaagcgggtccggccatgccggtcgaagtgctcggcctgtccggcacgcctgctgccggtgacaagttcgccgtcgtcgaaaacgagagccgtgctcgcgagatttccgaatatcgccagcgtttggcccgcgacaaggcggttgcccgccagaccggtcagcgcggttcgctcgaacagatgatgagcaagctgcagaacaccggcttcaaggaattcccgctgctcatcaagggcgacgtgcagggttccatcgaagcgatcatcggtgctctcgacaagctcggcaccgacgaagtgcgggcccgtatcgtccattcgggcgccggtgccatcacggaatcggatctggcgcttgccgaatcctccgacgccgcgatcatcggctttaacgtccgtgccaacgcacaggcacgtgtcgccgctgaacgcgcaggcatcgagatccgctactacaacatcatctacgatctggtggatgacgttaaggcagcgatgtcgggtctgctcacgccggagcgccgcgaaaccttcctcggcaatgccgagatcctcgaggtgttcaacatcaccaagaccggcaaggtcgcgggttgccgcgtcaccgaaggcaaggtcgaacgtggtgctggcgtccgcctcatccgcgacaacgtcgtcatccacgaaggcaagctcaagacgctcaagcgcttcaaggacgaagtatcggaagttcctgtcggtcaggaatgcggtatggccttcgagaactacgaagacatccgcgcgggcgatgtcatcgagtgcttccgcgtcgagcatatcacccgtacgctctgatcgtgcgagactagaattgtggacgggcgccggatcatatgaggccggcgcccgaaccttttgaggccccggacttttgtggccccagatttttgaggcaaagaacaatggcaacaaaaacctcgacagcacagtcgcagcgcatgctgcgcgtcggcgagcaggtccgcgccgcgatcacccaggtcctgcagcgcggtgaagtgcgcgacgacctcctggaaaagaccgtcatctccgtgtccgaagtgcgcatgtcgaccgacctcaaggtcgcgaccgccttcatcacgccgctcggcgtatcggatcacgagacggtcatcacggcgctcaaccgccacgccaaattcatccgcggccgtctcggcccgcatctccggcagatgaaattcatgcccgagatccgcttccgcgacgatacgagcttcgacaactacaagaagatcgacgagctgctgcgctcgcccgaggtcatgcgcgacctcgaggacggcgataccgacgaaaagtaacagaagagccttatgtccaaaccacgcaagcccaaaggccgcccgatttcgggctggcttatccttgacaagcccgtcgactttggctcgaccgaagccgtctccaagatcaagtggctgttcaaggcgcagaaatgcggccatgccggcacgctcgatccgctggcttcaggcatgctgccgatcgcgctcggcgatgcgaccaagaccgttccctacgttatggacggccgcaagatttacgaattcaccgtgacctggggcgaacaacgctcgaccgatgatctcgagggcgaggtcatcgagagctccgacaagcgtccgaccgaagacgagatactggcgctgctgccgaactacaccggcgtcatcagccaggtcccgccgcagttctccgccatcaagatcgcaggcgagcgcgcctatgacctcgcccgtgagggtgagacggtggagatcccgtcgcgtgaggtcgagatctaccgcctgacgctgctcgaatgcgagaacgaaagcaccgcgcatttcgaggtcgagtgcggcaagggcacctatgtccgtgcgctcgcccgcgatttcggccgcgatctcggctgcttcggccatatctccggcctgcgccgcagcttcgtggcaccgtttgccgaggagacgatgatcccgctcgccgaactcgttgcgctggaaaaaattcaggatgacgaggaacggctggcagcactcgacgcgcttctgatcgataccagcgaggcgttgtcctcgctgccgcatctgatcgtcaacgacgaccaggcccaccgcctgaagatgggcaacccgatcctggtgcgcggccgcgatgcgccggtggaagaaagcgaagcctatgccacggcccgcggcaagctgatcgccatcggcgaaatcggccagggcgagttccgccccaagcgcgtcttcggataaagcatgtcgcgcaaaagtgtgcagcggttttgcggtatcgacatgcgataaaacaaaggctctaatgctcaatgcgcgcggcctgaaccgcgcgcatctctcgtaatcagatcaggccttcggccttcatggtcgcctggaccgacgggcgggcggcaacgcgcgcgacgtaatccttcagcttcggccacgcgtccagcgaaacgcccgtgggcttcgtccagctggtcacgacgaatgcgtaggcgtcggctacggtgaagctcgggccggtcagatagtcgcgaccgtcggcgaggagcgattccagccacgcgaacttcttctgtagcacctcgcgcgccgcgtccttttccgcatcggtcttgccgggatggaagagcgggctgaacgacttgtgcaattccgagccgacgtagctcagcatttcctgaacgcgggcgcgggccagcgtgccggtcggcggggcgagctcggtggcgccgttggcatcggcgacatattgcaggatcgccggaccttcggtcaggacctcgccgttgtcgagctggagcgctggtaccgcgcccttggggttgatcgcaaagaagtcgccgccgctttccatgaccttcgtcttggtgctgaccttctcgatctcgaaaggcttgccgatttcatgaaggacgatgtgggatgccatggagcaggcgccgggggcataaaagagtttcacgcaaattcctttctggaaacagacttggctggcgcaggtgatagtcgatcgctctgcccgcgcaaccaggattttgcgtgatcctgtctttttgatcgcggctccggattggtaaggcggcggttaaaactccgctcttcccttcacccgtgggatattgtataggcagcgccagcatcaggctttgcttgaatgccttcgcggccaaagctggacgacatcccggcttttggcgaccttatctcctctcatcgaaaggaacatccgatgtcgattactgctgagcgcaagacggcacttatcaaggaatacgcaacgttcgaaggcgacaccggttcgcccgaagtgcaggttgcgatcctcaccgagcgcatcaacaacctcacggaacacttcaagggccacaagaaggataaccattcccgccgtggcctgctgacgatggtttcgagccgccgctcgcttcttgactacctcaagaagaagaacgaaggccgttacaccaagctgatcaccagcctgggtatccgccgctaaggcttttcggcgggcgctccttgtggacgcccgccgcatttgtttccggggaacgttttctccaaaccgcaatccgccataggcgtttgcgggactgcccgcggacccggatgggccggatccgcaaaaccaaccgttgacctgtcatggggcaggattgccggatgctttcggccaaggcgcacaccttggcccggctctttctccgagagagccgacgatgcaaagcctcccgttgtcttgcccatgatgcgtcatcaacaattgcggtcgtctgcgccgtgccccagggccaatggcgcgcctccgcattgaaggacaagacatatgttcgacactcattccgtggaaatcgagtgggcaggccgcccgctgaagctcgaaaccggcaagatcgcccgtcaggctgacggcgccgttctcgcgacctacggcgaaaccgtggttctcgccaccgtcgtttccgccaaggcgccgaagccgggccaggacttctttccgctgaccgtcaactaccaggaaaagacctatgcggccggcaagatccccggcggctacttcaagcgcgaaggccgcccgtcggaaaacgaaacgctggtttcgcgcctgatcgaccgcccgatccgcccgcttttccctgaaggctacaagaacgacacgcaggtcgtcgtcacggttatccagcacgacctggaaaacaaccccgacgttctgtcgatggttgccgcttctgctgccctgacactctccggcgttcccttcatgggcccggtcggcggcgcgcgcgtcggctacatcaacggcgaatacgtcctgaacccgcatctcgacgagatggacgagtcgatcctcgacctcgtcgtcgccggtacgcacgacgccgttctgatggttgaatccgaagccaaggaactgaacgaagaagtcatgctcggcgccgtcatgttcggccatcgtggtttccagccggttctcgacgcgatcatcaagctcgccgaagtggctgccaaggagccgcgcgacttccagccggaagacttctccgaactcgaagccgaaatgctgaagcacttcgaagccgagctgcgcaccgcctacaagaacacgcagaaggccgagcgctacgctgccgtcgacgccgtcaaggccaaggtcaaggcccgcttcttcccggaaggcgaagagccgaagtacaccgccgaagtcatcggcgcgatcttcaagcacctgcaggccaagatcgttcgctggaacatcctcgacaccaagagccgcatcgacggccgcgacctcgagaccgttcgcccgatcgtatcggaagttggcctcctgccgcgcacccacggttccgcgctcttcacccgcggtgaaacgcaggcgatcgtcgttgccacgctcggcaccggcgaagacgaacagtacgtcgacagcctgacgggcatgtacaaggagcgcttcctgctccattacaacttccctccctactccgttggcgaaaccggccgcatgggctctccgggccgtcgcgaaatcggtcacggcaagctcgcttggcgcgccatccgtccgatgcttccctcggctgagcagttcccctacacgctgcgcgtcgtctccgagatcaccgagtccaacggctcgtcctcgatggcaaccgtctgcggcacctcgctcgctctgatggacgccggcgttcctttggctaagccggttgccggtatcgccatgggcctgatcctcgaaggtgaccgctttgccgttctctccgacatcctcggagacgaagaccacctcggcgacatggacttcaaggttgcaggtaccgccgacggcatcacctcgctgcagatggacatcaagatcgccggtatcaccgaagagatcatgaaggtcgctctcggccaggcacagggtggtcgcacgcacatcctcggcgaaatgtcgaaggcgatctccgaaggccgttcgcagctcggcgaattcgctccgcgcatcgaagtcatgaacatcccggtcgacaagatccgtgaagtcatcggctccggcggcaaggtcatccgcgaaatcgtcgaaaagaccggcgccaagatcaacatcgaagacgacggcaccgtgaagatcgcctcttcctcgggcaaggaaatcgaagcggcccgcaagtggatccactcgatcgttgccgagcctgaaatcggcgtgatctacgaaggcacggtcgtcaagaccgccgacttcggcgccttcgtcaacttcttcggcgcccgcgacggcctcgtccacatctcgcagctcgcttcagagcgtgttgccaagacccaggacgtcgtcaaggaaggccagaaggtttgggtcaagctcctcggcttcgacgagcgcggcaaggtccgcctgtcgatgaaggttgtcgaccaggcgaccggccaggaaatccctgccgacaagaagaaggaagaagcagccgagtaagctgcgccttccctagacttcatgggcgcggggtaatttccgcgccctttttgtattcaagcacgagatagagccatgagcagcgagacgctgaagacactgttccacccctttgtaagcggcaccgtcgaggcgcccggcgagggcgagcgcgtgctcttcctcggcgccgaggcgggcttcgcccttcctcagggctttgccgccgcgctgagcgccgtacagggcttccggccgttgtaccggcagctgctcgcccagcgcatcgaaaccacgcctgaggtcgaaggcgaggactacgatgccgttctggttctctgcaacaagcacaagggcgagaacgaggcgaatatcgccgaggcactcacccgcgtgaagatgggcggtctcgtcgttgtcgccggcggcaaggaagacggcatccagccgctgcgcaagcgcatggaagccttcggcctggcgctcgaacatatgccgaagtaccacggcgtcgccttctggttcggcgcgcccgccgatccgtccgaaatcatcgccaagttcgccaagccaccggtgcgcgtcgacggccgcttcgaggccgccgccggcatgttctcgcacgatcgcatcgacgacggctccgagctgctcgcctcgcgcctgcctaccgatttcaccggcgacgtcgccgatttcggcgccggctggggctatctctccgtcgaaatggcggaacgctcgccgggcgtcagccgcctcgacctctacgaggcgaattacgccgcgctggaggccgccaaggccaacatcgaggagaactgcccaaatgtaccggcgcgcttcttctggcacgatctggcgggcgaacaggtcagggacaagtacgacctcgtcatcatgaacccgcccttccacgaaagccacgccgccgagccggcgctcggccaggcgatgatcaagacggcggcagcttcgctccgctccggcggtcgcctgcttctggtcgccaaccgcggcctgccctacgagccggtactggctgcgagcttccgcgaaagcggcgaaacctgccgcaacgcccgcttcaaggtcttgtgggcgaagaaataagcggctcaggccgcttctatttccttgcgggcggcgctcgcaaggaaagccgagcgcgtgagaccgcgctccttggccgccgcgtcgatcgcgtcgagcatgcccttgtcgaaggtgacattggcgcaaacggtccgtgtcgtatcctcgataaacggaatccgtgtcaggatggcgcctgacgcaagctcgctccgcacctcgggacgcgcgctgatctcgtcgaaggatgacggtgtcggcaaaacctcatcttccgcccacagccgcagggcttcgatcgcattggcggtcaggtcgtcctcgacgtcggctgcggagaatagggacggcagatcggggaagctgacgccgaagacgctgtccggttccttgtgcacaagcgcgaagaaatatctcatcatcgctttccctaagaccatcagtctggaagacagcgcatatcggcgcctacgtgagatagtatctgaaacaaaaaggccatgcgcaatataatgcgcatggccttgtattcggttgtggccggctgccgcttactcggcgtcggccttgcgcagcgcatcgagcgcaggcatcgaggtaatgttgaagccggcgtcgacgaagtggatttcgccggtgacgcccgccgccatgtcggagagcaggtagagggccgagttgccgacgtgatcgatcgtcacggtcttgcgcagcggcgagttctgctggttccacgacaggatggcgcgggcatccgaaatgccggcgccggcgagcgtgcggatcgggccggcggagatcgcgttgacgcgaatgccgcgcgggccgtaatcagccgccagatagcgcacggaggcctcgagtgccgccttggcgacgcccatgacgttgtagttcggaatgacgcgcgtcgagccgttgtaggtcagcgtcagcatcgagccgccttcggtcatcaacggcgccaggcgcttggcgatctcggtgaacgagaagcaggaaatcaccatcgtgcggctgaaattgtcgcgcgtggtgtcggcgtaaaggcccttgagctcgttcttgtcggagaagccgatggcgtgcacgacgaagtcgagcgtgccccagcgttccttgatcgcatccaccgtagcgtcgacggaagcgatatcctcgacgtcgcagggcagcacgaaatcggagccgacttcggcggcaagcggtttcacgcgcttgccgagtgcgtcgccctggtaagtgaaggcaagttccgcgccctgtgccgccagcgccttggaaatgccccaggcgatggagtggttgttcgcgacacccatgataagcccgcgcttaccctgcatgattcccgtcatggtgttatccgttgtagcgctggaagacgagcgtggcgttggtgccgccgaagccgaaggagttggaaagcgcgatgtcgatcttggcatcgtcgatgcgcttgcgcacgatcggcacgccgtcgaactcagggtcgagctcggtgatgtgagcgctttcgccgatgaagccggcctgcatcatcaggagcgaatagatcgattcctgcacgccggcggcgcccagcgaatggccggtcagcgacttggtggactggatgtgcgggatcttgttgccgaacacttcgcggatcgcaccgatttccttgctgtcgccgacaggcgtcgaagtgccgtgcgtgttgacgtagtcgacatcgcccttcaccgtcgagagcgcctgacgcatgcagcggatggcgccttcgccggaaggcgcgaccatgtcgtagccgtcggaggtggcgccatagccgacgatttcggcgtagatcttggcgccgcgcgccttggcgtgttccagctcctcgagaaccagaacgccggcgccgccggcaatcacgaagccgtcgcgggttgcgtcataggcgcgcgatgcggtctcgggcgtgtcgttgtacttcgaggacatggcgcccatggcgtcgaacaggttcgacatcgtccagtcgagatcctcgtggccgccggcgaacatgatgtcctgcttgccccactggatcatctcggcggcgttgccgatgcaatgcgccgaggtcgagcaggccgacgagatcgagtagttgacgccgtggatcttgaaccaggtcgcgagcgtggccgaggcggtggacgacatggccttcggcacggcgaacgggccgatgcgcttcgggctgttgttcttgatggtgatctcggcggcttcgatcagcgtgcgcgtcgaaggaccgcccgagcccatgatgatgccggtgcgctcgttttcgctgtagtccttttcctcgaggccggaatcggccagcgcctgcttcatcgcgacatggttccaggcgccgccctgcgacaggaagcgcatggcgcggcgatcgaccagatccgtcggatcgagcgagggacgaccccagacctggcacttgaagccgtgctcggcgaagtcgttggaaaaggaaatgccggacttggcatcgcgcagcgacgcagtgacctcggcggcatcattgccgatcgaggaaacgacgcccagacccgtgacaactacccgtctcatgtgtttcgaccttttcgttttttctaacttgggaaccgggcagcgatgcccggtgcaatcaggcgtctttgtccttggacaggccgacgcgcaggtcggtggcctggtagatggtttcgccatcggccttcagccagccgtcggcggtgccgagcaccaggcggccgcgcatgacgcgcttgaagtcgatgccgtattcgagcagcttcgtggtcgggcggatcatgcccttgaacttcacttcgccggttgacagcgccatgccgcggccgggctcgccgagccagccgaggaagaagcccgtcagctgccacatgccgtcgaggccgaggcagccgggcatgatcgggttgccctggaagtggcaggggaaataccaatcgtcaggcttcacgtcgtactcggcgcggatatagcccttgtcgaaggcaccgccggtctcggagatgtcggtgatgcggtgaaccatgagcattggcggcagaggaagctgcgcgttgccggggccgaaaagctcgccacggccgcaggccaggatttcctcatagttgaagctggattgtttcgtcgccatgaaaactctaattcccccgcaactaagctgatggatgtgaacgtttagtccaagttcggcggaaaatgaagcataagcatgactgagcttcacccacgtccaaggaccggctgcgcgccttatttggtggtcgcatacaggaaggccaagccccgggccagcactaattatgcgaaaagcccgattttgcggcgctttgacacgccttgtccccattgaaactattgaaagccattcgtgcaaaagttatatggcttaagagaaacatgattgcgggacgctagattagctggagttgttgatggcggctgaagcccctcttaccattgaagcaaggttgcggggcgctggcctcaggccgacgcgccagcgcgtcgcgctcggcgacctgctctttgcgaagggcgatcggcatctgaccgtcgaggaactgcacgaagaggcggtcgtcgccggcgtgccggtatcgctcgccaccgtctacaacaccctgcaccagttcaccgaggccggcatgatccgcgttctcgcggtcgaaagcgccaagacctacttcgacaccaacatctccgatcaccaccacttcttcgtggaaggcgacaacgacgtgctcgatattccggtgagcaatctcacgatcgacaatctgccggagccgcccgaaggcatggagatcgcccatgtcgacgtggtgatccgcctgcgtcccaagcgcgtctgatcaacgcgcccgacctccatcacatctacatgacgtcgtcgggatgccggccgggctttgccttgtaggtcggaaacgtccatccatagtaaagcgccccgccgcgcacagcgaaggccgcgagcacgccggcggccgatgccgcgtagagcggtagcccgaattcggtggcgccggtgaagatcgccgcgcccaccagcgcggcggtgatgtagatctccggcctcagcagcaccgagggttcgttggccaacagatcgcgcaggacgccgccgaaggtcgccgtcagcgtgcccgtcacgatcgcgatggtcggcgagccggtggcggccagtcccttggcggcacccatggcgcaataggccgacagcccgacagcgtcgagccagatcagcagccggtagcgcgattccaccagatgcgcggtgaagaacacgatgacgcccgccgcgcagcagatgaggatataggtggggttcaggacccagaataccggcacccggcccaaaacgatatcgcgcaccgtgccgccgcctgtgccggtgatgaccgcgaagaacagaaagccgatcagatcgagctgcttgcgcgaggcggcaagcgcgccggtcgccgcgaacagggcaacgccggcatagtcgagatagacgaatggcgacattgcgtgctccaatggcgatctttccttcgaataatcatggccgcaagggcggcgcaaggcgcatcagccaaactcgctagccaatcacgtccttatccgacgaaaagagaacccgtgaaaaagctgctgatcgccttgaatctcgttgcggccctggccgtatccacggccgcccaggcccagcagtcgctgcttcccgacccggaggtctacgagaaggattacttcaagaagcaatgcgccgaggtctctttttccgacggcttcgccactcgccaggacatcaacaatgacgggctcgtcgacgtggtcgtcaacgagggactaatgacctgcgacggcagcagcaacaccaagtgcgacgaggacggctgcgtcaacaacttctatctccaggttgccgagggcggttatttcatgatcgccaccgccaagacctacggctacgatgtcgagcagcgctacggcaacaaggttctggcgatgaagatgcatccacgcttctgcgaccggcccaacgccgatccgaagaccgatccctgcgtcatcaccacccgcgtgcgcggcaccaagttcgtcacgattttcaagaaatagcgcgccgggacaaggccgggctcatcgcggatagagctccgaggtgcgtccggcgaaataatatccgacgaggccgaaccattcgcggaccgccgtcgccatgttctgcgcgttccggctcggctgggtgaaatcgagcgccagccgctcgcgaccgtcggtcctatagtccgtcggccagggcgtgacgtcgatgccgagcttgcggaaaatcccgaccgaacgcggcatgtgatagcccgaggtgatcagcaggcagttggaaagtccctggcttgcgaggagatccttggtgttgacggcgttctcgaaggtggttcgcgaggtcgtctcctgcaccagccgctccttcgccacgccgaacagcgggaagaaccgttcggccatggccgcgtcgccctcgtagacaccagacatcgatccgtcgccaccggagacgaggatgcgcgactgcggatatttctgcgccagccgcagcgtctcgatgaaccggtcgccgccggcattcatctcgatcccctgcctggatgtattgacctcgttctcgaacccgccgccgagcacgatcatgcatgtaagcgcggccgggtcctgcggcttggcgaagcgatcttccagaccctgcagcagataattgcccacggtcgtgtagagcgtgaggaagagcacgaggccggcgcaggcggtcgatagcaggctgatgatcctaaagcggaccaaccccgcgatcaacgcgacgacgacgaggaggaaggccagcgacagcggctgcccgaaaatccagacgagttttgagaagataaacacgtgggccgctccgctgctgcatcggttctggaacgacgtctagctgattcgcgaacgggatagtgcaacgatcacttcgcgcgctggatcgacgcgcgcggggtggtctggttgaaccgccgctgtagcggcttcgggatcaggagagcggccagcgcgaccagcatggcgaaggcggcgaccacccacagcgcggcggcacccgctgcctgtgtcagcagcgcgcccgctatggcgccgagcagcatgccgagccagggaacgatctggatcgtccagtcgagccgccgttcgccgatcagaaagcggccgatgccacgtccgaaacgcgacagcgccccggtcacataggtcagcccgatcggcagcccctcgatatgctcgacggcggcgttcaccatccccatggaggcgacgatcaggtagaagcggggcagtgcaaggccgggatcgctcatcagcgaggcgcccgccagcatcaacccgacgcagccgagcaccacgaacacccgccgctcggcgaaatgggcaaccacgatcccggcggcattgccgagcacgaagacggtgatcgccgcgatcagcacggccgcatgcccgaagtttccggctccgagcgacagcgccgcccgcgtcgtattcccggtcatgaatgacacgaaatcgccgctcaaaaccaacccggtcgcatccgtcatccccgccagaaacgaaatcgcccccgcgagcacaagcccggtcgccgtccggcgtgtgtgaatgatgcggcgtcgtctctgtcgtgtcatgggtgggatcccggacgctgaaatggtgccgaagaccgggtggagcctcgcggcgtgaaaaggaatgattgaaaactgcaggtcgagcatacgcccgagatggcgggaaacgcaattcgggtggtcggatgatttagtcgagaattacacgagaattacaggggaaaaaatttggtggagctaagcgggatcgaaccgctgacctcttgcatgccatgcaagcgctctcccagctgagctatagccccatcagggtggaccggtctgtgccgggcctgggatgcttcgcgaagcgcttgtcctcgggaagtggcggcttaatacgtgcggttttcgcagatggcaagcctaaaaaatcggcccggtgaatttttctcgcccgggccgatccttgttcgaaatcagacgtcttcttcgtcgccggtcacgccgatgatgtcgctcatgtcgtcatcgtcgtcgtcttcgtcggcttccaggaaggtatcgtcgtcgtcatcgccttcgatttcgacgtcgtcgtcgcccatgtcggggatatcgtcgccggatgcatcgccgtcagcatcctcgagcgagaccagttcgacttccgtgctttcggtatcgacttcggccacttcttcctcttcctgcgcggcttctgcagcggcggcggccgagctttcgacgaagaaggagagcgggtaggtcttgcccgtgtaaggagaaacgatcgggttccggttcaggtcgtagaatttcttgccggtttccggatcggtacgcttggttccaagttcagctttcgccactgttgagcctcgtgatcgtgagaatggccgaacctgagttcggcaaatgccgttgaaaccggcgttctgttcggaatttataagccggtccccataatcgttgcgggccgccatgtcaaagcctaacttcatgtgccgccacgacaagcgcgcaccgcgcggcggatgaccgggccaatggtttgtgctagtgagccgcgaatagtcgatgggtaacgtgacgccggcaggttccggcagcaagacggatgggcgacatgtatcagccaccgcatttcagggaagacgatcttggcgtccagcacgcgctgatcagggcgcatccgctcggcctcttgatcagcatgggcgcctccggcctgatggccaactcggtgccctttcatctcgatgcggcggcgtccgagaagggaacgcttcggctgcatctggcgagagccaatccgcaatggcgcgatctcgcggatggcgccgagctgcttgtcgtcttccagggcgccgacagctatgtcacgccctcctggtacgagaccaagcgcgagaccggcaaggtggtgccgacatggaactatgccgtggtgcaggtgcgcggcgccgcccgcgtcatcgaggacgcggattggctgctcgcgcagatcaccgccttgaccacgcagcacgagacgccgcgtgaaaagccatgggccgtcagcgacgcgccggaggcctatgtgaaggcgcagatgaagggcatcgtcggcgtcgagatcgagatcgccgccatcgagggcaagtggaaggtcagccagaaccggccggtcgccgaccgtgcgagtgtcgcggcggggctcggcgaaacggcgggccaggacgagatgacggatctcgtgcgccgctatggcggtttgccagaagcgggcgaagaggccgacaaagagcgttgagacaccggccgatccatatcggccgacggaaaaggcccggaagtatcgggcgggatagaaagaccagcatgccgaccagttcagaccattttgtcatcgccatcgatggaccggccgccgccggcaagggcacgctgtcgcgccgcatcgccgagacctatggcttccaccatctcgacaccgggctaacctatcgcgccaccgccaaggcgctgctcgacgccggcctgccgctcgatgatgagcctacggcggaaaaaatcgcccgcgaggttgaactcgccggcctcgatcgcgatatcctgtcgaaacacgagataggtgaagccgcctcgaagatcgccgtgatgccgtcggtgcgccgcgcgctggtcgaggcgcagcgcaagttttcggagcgtacgccgggcacggtgctcgacgggcgcgacatcggaacggtggtctgccccgaggcaccggtgaagctttatgtgacggcatcggcgcaagtgcgcgcgaggcgccgtttcgacgagatcaaggcaaaggggatcgccgccgatttcgcggcgattttcgaagacgtcaagcggcgcgacgaacgcgacatgggacgggccgacagccctttgaaaccagccgaagacgcgcacttgcttgatacgtcggaaatgagtatagaagccgcgtttcaagccgcgaaatcggtcatcgatgccgccttgaaccgaaactaggatttgaggcgttccgccaggctttgcccggagtgcctcgaacaacagcctgaaattccgtccaagcgccggattgccttcgaagagagggcggacggggatcaggctcattcaacacgaaccaaccggcgcatacgtgtccaaagattcggacacgcaggagatttcatgtcagtagctactccctctcgcgaagatttcgcggcccttctggaagaatcctttgccaagaacgatctggctgaaggctatgtaaccaagggtatcgtaacggcaatcgagaaggactccgccgttgtcgacgttggcctcaaggtcgaaggtcgcattctgctcaaggaattcggcgccaaggccaaggacggcacgctcaaggtcggcgacgaagtcgaagtttacgttgagcgcatcgaaaacgctctcggcgaagctgttctgtcgcgcgaaaaggctcgccgcgaagagagctgggtcaagctcgaagccaagttcgaagctggtgagcgcgttgaaggcgttatcttcaaccaggtcaagggcggcttcacggttgacctcgacggtgccatcgccttcctgccgcgttcgcaggtcgacatccgtccgatccgcgacgttaccccgctgatgcacaacccgcagcccttcgaaatcctcaagatggacaagcgtcgcggcaacatcgtcgtatcgcgtcgtacggttctggaagaatcccgtgccgagcagcgttctgaaatcgttcagaacctcgaagaaggccaggttgttgacggcgtcgtcaagaacatcaccgactacggtgcgttcgttgacctcggcggcatcgacggcctgctgcacgtcaccgacatggcatggcgccgtgtgaaccatccgtcggaaatcctgtccattggccagcaggtcaaggttcagatcatccgcatcaaccaggaaacccaccgcatctcgctcggcatgaagcagctcgagtcggatccgtgggatggcatccaggccaagtatccggaaggcaagaagatctccggtaccgtcacgaacatcaccgactacggtgcgttcgtcgagctggagccgggcatcgaaggcctgatccacatctcggaaatgtcctggaccaagaagaacgtacaccccggcaagatcctgtccacgagccaggaagtcgaagtcgtcgttctcgaagtcgatccgtccaagcgtcgtatttcgctcggcctcaagcagaccctggaaaacccgtgggcggcattcgctcgcaaccatccggccggcactgaagtcgaaggcgaagtcaagaacaagaccgaattcggcctgttcatcggcctcgacggcgatgttgacggcatggtgcacctctccgacctcgactggaaccgtccgggcgaacaggtcatcgaggaatacaacaagggcgacgtcgttaaggctgtcgttctcgatgtagacgtcgaaaaggagcgcatctcgctcggcatcaagcagctcggcaaggatgcggtcggcgaagcagccgcttccggcgacctgcgcaagaacgctgttgtttcggctgaagtcatcgccgtcaacgacggtggcatcgaagtgaagctcgtcgaccacgaagacatcacctcgttcatccgccgcgctgacctcgctcgcgatcgcgacgaccagcgtccggagcgcttctcggttggccagacggttgacgctcgcgtcaccaacttctcgaagaaggaccgcaaggtcatgctttcgatcaaggctctggaaatcgctgaagagaaggaagccgttgctcagttcggttcgtccgactctggcgcttcgctcggcgacatcctcggcgcggctctgaagaaccgcggcgaataatcgccagccgtcaggcttgaagaataagagaacccgccggagcgatccggcgggttctttcgttttcggtcccttgggaggaggtcgaaagccggtctattcccagccgaccatgcgccggtagcgcgcataggcttcgtcgctcgccggcgccatcggcaggccgggacccggcagcatcaggatgggcgcgccctcttcgtcaaggaccggtgccgctatcgcggattgctgcgcggccatgaatgccgcttcgtcgctgtcgtcaccggccgccaaagcctgctcttcgggcgtctccgcctcgtccgcgccgtcctggtcgtcgcttttcccgtcgccctggtcgatgttgccgttgtggtcctggcggttcatctcgcgcgaaccggcgtcatcagtctcgtccttggcgaagttgtagggctgcggcgcatagggcacgccctcgacgatcttcatcagaacgggcgcgtaggttgcttcgatcatctgccgcgccgctgatgatggcgcgttgccatccgtctcttcgggctgtctcgccgccgcctgtgccgccgcggcctccagcgccgagggcgcggtctgcgccgccaccggcttggcgagcccgttcgccagcaacatttgctcggcggggcgcttcagattgtcggggatgtcggcgatcagcgtatcgtcgagcagcgcgtcgatatcgaccgccggctccacctcggtcgcctcgatcagaacctccgtctgctgatcgcggatgatgacgacgatcatgtcggtctcgtccttcgacagcgaagccggaatgccgacccagttcttcgggatgatcggatcggccttggtgtcgcccgtgactgccggttccgccataacctcgcctgtctcggcttcgggtacgggagccgatgtatccgcttcagtggctgcaacaggcgcttccacggcttcttccgtcgagcgcgcgacgcttgcggcggccatcgccgctttcggctccgcgcgctcggctggcgaggccggggcggcctcgtcggcgacggtggcctgcgcggttacttcgctcttgctgtcggcggcctcgcctgccgccggcatcgccgtattcctcgttccgcctgcctccgaagccgctgtcgtcgcgcggggcgccggcgacgtgaccgtatcgcgatgcaggcttatctccggccgctgttcggcgcgcgtcggcgagccgtcgttctggctgtaggatttgagaacggcgcgcgtcgcgagatcgcgatccctggagccgatcgtttcgagataggcggcaatgcgcgtcgcggccggtccggccgggttttgcagggcctcggcaagcaggcgcagcggtatcgtgtatcccttggccgccagctggcgctcgatgatctcgatcttcgcggccggcagcttctggatcgcttcggccagccgcgatgcgaagacgagatccggctcgtcggcgtcgcgcggctgggacatcgcctgtcccgtggcggtcagcacgttgagcaatgcttcgaccatgcgggcccggacggcaagcagcaggatgttgagcttggcggtggcgccggacgtcaggtccgggctctcgacctggttgacgggcacgatcgcggtcgaaccgcgcacgatgtcgctggcaccgagcgccgatggcgacccctgcgagggaaagcttgaacttgatgctgcacgaacgggagtcaacatggcatgcttcctctttcgtaaaatgcgataaagcaggttacaagaaagccgcgttcatcgggctgttggcattctccgcccgactgacgggacccggaggacgctccatcgcgccacggaatgcttagaagttaatgcgtatcctagtgattcaccgttaacgaatcactaatcattcggtgcgtgccggggcatgacggcttccgtcgcggaaaactggaaagcacgcctcagctgtgcgcgaaaatatccgtctcttcccagccgagaagatcgagcttggcgcgggttggcaggaattcgaagcaggccgtcgcgtgctcgaagcggccgtcgcggataaggcggtgcgtgagcttgtcgcgcagcgcatgcagatggagcacatccgaggccgcatattcgagctgcgcctgcgacagcgtctcggcaccccagtcggaggattgttgcgtcttggagacgtcgacctcgagcatctccttgagattgtccttcagcccatggcggtcggtataggtgcggcagaggcgcgaggcgatcttggtgcagaacaccggctgcgtcgtcacgccgaatgtgtggaagagaaccgcgatgtcgaaccgaccgtaatggaatatcttctggtgcgtcggatcggccagaagcgccaccaggttcggcgcttcggtctgcccggcggcgatgcggatgacatcggccgtgccgtctcccgatgaaagctgaacgacgcacagccggtcgcggcgcggcaccagccccagcgtttcggtgtcgatcgcgacggcgccggtgtaacgggcggcggccgccgccggaatatcgccttcgtggtaacggatcgtcgcggccatgctgtcgtctttcgctgagcaatgatgttctggcgctatatagacccgaaaaccgcaatcgcaaaccgcgccatttggcgccgcatgaagacgatcagccgcgcatcgcgtcaggcgtcttcccctgccagtccggcagcgggaagatccggtcgtaggcccagttgaagacgaaggtgtagaccagatagaagagcgcgaaggacacgtccatcaggaaggcctccagaaggctgacgtcgagataccaggcgataagcggcaggagcgccagaagcaggccaccctcgaacaggacggcatgcaggacgcgaacggcaaggctcttcctcgtgccgccggtcaggcgctgcatcgcatggtcgaagccgagattgtagagatagttccagcccgtcgcgatcgtggcgccggcaacgccgaccacgccgacatcggcgagaggcatgccgaacgccagcgcgccgagtggcgtgacgagggcaaggccgatgatttcgaaactgatggcgtgacggatacggtcggatgtggatcgcatggataacccctgtgggataggtcgggtcgtcccgagtttttgcccagaagggggaggtcgtcctctcaagctccgatatagggatttcgcccgcgaagggcaagatggcgacaatcagtaatgcggcggccttgtgatcgacggcgcttccagcgactgttcttcgagcgagagaaagcgctcggtcagccggtccagcttggcgcgcgtctgctcgaccaccttccactgttccgtcagctggtcggacagttcttcgatcgtcttggcctgatgggcgacggtttcctcgagttgggtgatacgatcggtctgatccggcatcgggttctccttgccacgaccggccatgtgaaccggtcatgtgattgcgctctccaaagcggaaataggccgcaaggtcaatcgtttcgagaggcaccgtcgccgattcacaaagtgaaccgtttggttactaaaagcccttgccgcatctttttttgtgcgctaggccggtggagacttgggaggaatactgatggatgttggcaatggatttctgcatccggaccggctctttcccgccgatccggcaacgcgatcaatcgcgcgcgagctttacgagagcgtaagcgctctcccgatcgtcagcccgcacgggcacaccgaacccgcctggttcgccgacgacaggccgttcgaggatgccgcctcgctgctcgtcattccggatcactatctcttccggatgctgcacagcgtcggcgtcaagctcgacgatctcggcgttccccgcctcgacggcaagcccgtctcgtccggccgcgccatctggcgcaccttcgcgacgcactatcatctcttccggggaaccccgtcgagcctctgggtcgatcacgccatgtcggccgtgctcggctgtgaggagccgctgacatcagggaatgccgacgcgctctacgaccacatcaacgcgcaactggccctgccggaattccgtccgcgcgcgctccacaagcgcttcggcatcgagaccatcgccaccaccgagggcgcgctcgaccagctcccgcaccaccggaagatggccgaggatggctggatcggccgtgtccgcaccacctatcgccccgatagcgtcaccgatcccgatgccgtcggcttccgcgaaaacctcgtgaagctcggcgagctcaccggttgcgacgtcgcgagctgggatggcctgatcgacgcacaccgcaagcgccgcgcctatttccgccagttcggcgccaccgccaccgaccacggcgtccccaccgccttcaccgccgacctgccgcattccgacaagcagcggctgctcgaccgggcgcacaggggcacgctcgaggctggcgaggccgagcttttccgtggccagatgctgacggaaatggccggcctttcggcggaagacggcatggtcatgcagatccacgccggctcgcgccgcaataccgaccgcgaactcttccagacgcgcgggccgaacatgggggccgatatcccgacgccgaccgactgggtcggcggcctctcggcgcttctggcgaaatacggccatgcgccgggtctgcgcgtgctgctcttcacgctcgacgaaaccacctacgcccgcgaactggcgccgatggctggccactggccctgcctgatgatcggcccgccctggtggttccacgacagcccggccggcattcgccgctatctcgaccaggtggtcgagacggcaggcttcgccaacatggccggcttcaacgacgacacgcgcgcgctgctctccatccccgcccgccacgacgtctggcgccgcgaggtttgcggcttcctggcgacgcttgcggccgagcaccgcatttcgcgcaaggatgcggcgatcgccgccgccgatctctcctacggcaacgccaagaaggcctacaagctgtgaccgaacgattgacgcgcctcaccggcctggcaccatccgccaagcttcccgccttcaaccgggacaagctgaagccgggcatcctgcatctcggccccggcgccttcttccgcgcccacttcgcgccctataccgatgcggcgctggcgctcgccggtggcgattgggggatcgaggtggcaagcctgcgcaccgccgatgtcgccgatcacctgaacgagcagaacggcctctacaccatgctggtgcgcgacacggaaggcacggtcgcgcatgtcatcggtccgatcctcaaggcgcatgtcgcgacccgcgacccgggtgaactgctggcgcggctggaagaccccgccatccgcatcgtcagcctgacggtgaccgaaaaggcctatggcttcgatgcagcgaccggcggtctcgatctcaagcatgccgatatcatcgccgaccttgcgaaccgccacgccccgcgcggcgtcatcggctatctcgtcgagggcctggcgcgccgccgcgccaggggcatcgcgccgttcaccccgctcagctgtgacaatctcccgagcaacggcgcggtgttgaagcgcctcgtgctcgatttcgccggccgcgtcgatcccgagctcaaggcctggatcgagcgtgaagttccgttcccctcgaccatggtcgaccgcatcacgcccgccagcaccgatgccacctatcgtgacgccgaaacgctcaccggccgcgtcgaccttgcggcgatcgagaccgaacccttcacgcagtgggtcatcgaggacagcttcgccaacggccgcccgcaatgggaaaaggccggcgcgctgatggtcgaggatgtctcggcctacgagaagatgaagctgcgcatgttgaacggcgcgcattcgctgctcgcctatctcggttatatcggcggctatgaattcatccgcgacgtcatgggcgatagcggcctgtcggcccttgcacgccgccatatgaacgccgccgccagcacgctcgacccggtccccggcatcgatctggacacctatgccgacgaattgatagcccgctttgcgaacaaggcgatcgctcaccgcacctaccagatcgccatggacggcacccagaagctgccgcagcgcctgctggagccggcggtggaagccttggccgggggcagccaggcggaaacctacgccatcgccgtcgccgcctggatgcggtacgcgctgggcatcgaccgcaacggcaagagctacgagttgcgcgacccccgcgccaacgagatcgccgcattgctggtggatgtcccccgcaacggccccaccgtggccgcggcgctgttcacactgcccggcctcttcccggccgcgctcaccgggaacgccgcatgggccgaggacgtgatcaacaagctcgacatcctgatccaggacagcaagctgccgctgttctgattggggctgggagggctttagactaagccttcacccgcgccatctcgggatcgtaaagcggcgtcagcgacacctggcacggcacccgcacccgcgcgacgtcgagctcgtatcggcccgacagcacgaaaccttccgtcacgccctcggcgttgcgcacgtagccgtagccgatcggtttgcccacggtgtagccgaagccgcctgacgagagccagccgacgcgcttgccgtcgcggtagatcgtctcgcggccgagcagcactacgtcgggatcatcgggcacgaagcaggcgagcatcttcttgacgcccgaggccagctgccgttcgatcgcctcgcggccgcggaacggcgtggtcttcttcgtcttcaccgcccagccgaggcctgcttcgatcggcgtatgatccggcccgatgtccgagccccaggcgcgatagcccttttccagccggcagctttcgatcgcccgatagccggcattgacgagatgcagcggagcaccggccgtcatcagcgcgtcgtagacggtcgtggcgtattcaatcggcacatgcagctcatagccgagttcgccgacataggtgatgcgcagcgcgcgcaccgggcagccggcgatgccgatggtcttgacgcggccgaaggggaaggcggcgttggagatgtcgctgcccgtgaccttttccagcaccgcgcgtgcattcggccccatcagcgccagcacgcaataggcggacgtcacgtcgaccagctctgcgtgtagatcgtctggaatattgcgggcgatccagtcgaagtcgtgtgtcgcgaagcccgtgccggtgacgatgtaatattcgtcctcggcgatgcgcgcgcaggtgaggtcacactcgatgccgccctcgtcgttcagcatctgcgtgtagacgagcgaacccacgggcttggcgacgttgttggctgatatccacgagagtgccttttccgcgtcgcggcccttcagcgtgaatttggcgaacgaggtctggtcgaagatgaccgccgcctcgcgcaccgctttgtgctcgcggcccaccgcctcaaaccagttctgcctctcgtagctgtagacgtccttcggctcctcgttggcgaagagatcggcgaaccagttgggccgctcccagccgagcttttcgccgaagcatgcgccctgcgccttcagccggtcgtagagcggcgatttgcggcatgggcgaccgctggaatattcctcgaaggggaaggccagcgtgtagtgcttgccataggcctccagcgtgcgggtgcgcacccagtcggtgtcgaaatgcgggcggccgaagcggcggatatcgacaggccagagatcgtagggtggttcgcccttggagacccactccgccagtgccatccccgcgccgccggccgatgcgatgccgaaggcgttgaagccggcgccgacaaagaagttcttgagctccggcgcctcgccgagaatgaagttgccgtcaggcgtaaagctctccggcccgttcaggagctgcttgacgccgacattctcaagcgccggcacgcggccgagcgcctgctccatgatctgctcgaaatggtcgaaattgctgtcgagcagcgtgtagtgaaagccctcggggatacccgacgttgcccaggggatcgggttcggctcgtagccgcccatgacgatgccgccaacctcttccttgtaataggtcagccggtcgggatcgcgcagcgtcggcaggttggagggcacgccgaaggattcggtgatgatatactggtgctcgaccgagaccagtggcacgttgacgccgaagcgcgccgcgaaactgcgcgtccattgcccggcgcaaacgacgacgcgctcgcattcgatgcggccatgcccggtgatcacggcgcggatgcggcccttgtcgatctcgaggtcgatcacctcggtatcctcgaagatcgaaacgccggccatgcgcgcgcccttggcgagcgcctgcgtgatgtcggagggattggcctggccgtcggtcggcaggtaggcggcgccgatcaggtcgtctgtcgtcatcagcggccagaggtcgaaggcttcccgcggcgtcagaagctgcatgtcgagcccgaaggattgcgccgtggtcgcctgccgcttcacctcggtccagcgttcttcgttacaggcaagccgcagcccgccgttcatcttccagccggtgccaagcccggtctcggcctccagtcgcttgtagagatcgacggaatagccgagcagctgggtgatgttggcgctggtcctgagctggccgacgaggcctgcggcatggaaggtggtgcccgaggtcagcttcttgcgttccaacagcacggtatccgtcaagccgagcttgccgagatgataggccgtcgagcagccgatgatgccgccgccgatgacgacaaccttggcggttctgggcaattccttcgtcatgtcattgatcctgttcggcataggcgcgctcgaagcgcgcacggttttcggcggtataggcggcgtagtcgaaatcgatggtcgagtggatttccgagaccatgctccacagcatctcgcgcaagagagaggcgcatttcatcgcttggtagcgccgccagagatccggtgtcagcggcgcttggtaataggcctccagcatcgcccgctcggcatcctcggaaaactcgttgttggaggcgaggccgccgagatcgaagagcggcgtgttgaagccggcatagtcccaatcgatcagccagagccttttgccgtcgtcgagaaaattggcggccagcatgtcgttatggccgaaggcgatctcgaaaggccccgccgcctgctccagccgctccgccttgatcaggagataggaaaacagctgatgataggtgctgccggcggcctcgagcgtcgcgatatagtcgcgcacaacgtgaaacacccagaatatcgtggccgcgccgcgaaattcgcgtgcgatatcgtgatggcaggcgcgcaccagcggaatcacgcgctccagggtcccggcgtcgcgcagatcctccggcgttagcgctcgtgcatcgatgtagtcgagcaccagcacgcccggcgcatggtggatcaccgccggcgagagccccgccgcatgcgccgccttgctcgccgccagctcgttcgatcggctgatgtgatggacggggatgtcgtcgcccagccgcacgacccgcttcagcgtgccgtcgcggaccagatagttgcggttggtgatgcctcccgtgatcgccgagatatcgaccggaccattccatatgccaagcgcacgtatccggtcttcaggcgtcacgctgtcccccctcgcggcctatcctatgacgagactagcaacccgtcatcatctacccagatgatagcagggatactgtagaagtagactgttagttcagggtcgttttcatcatctacgtggatgggccactgagcggaaagcgaagccacgatttcctctgaggttgcgcgccaatgcgcttcgctgtcttgtattgtcaatttcggagatggatttgctggagatatataacaatcagctcccggagcaatgaacttgatcttcccggcgtctagcaactgattgatcgcgtcaaagaaagcccactttttctcctgtaaagagagcaagtcgtcggggtcgatagcgctgaaaagcgtgtaggcggaaaggccaaacacttttcgaacaatctcagagatttcatctatattactcatggattgtcttcgttcaggacctttatctcaagactatacgttattcatgccaaccgcgcctgccggcatgtcaattgtcgatgtgggcccggtttgtccagatgaagtcgatgcgccaggaagtgaaattgcgtccagtagtgctgacagccagaccgggctgtcaagcgtggcaaatgggcggggctaaatggtgctgcccgcaccgtcgaagatatgacagcgcgccgggtcgaaataggcggtgacgttggccccgcgctccaccttctgctgcccgtcgagcgcgatcgtcagctgctgcctgtcgggcgtcgtcgtgtagagcatcgtcgcgccgccgaggttttccaagaggtcgatgttgacggacgagagcgcgatgccgcccttgtcgatcagcgacagatgctccggacggatgccgaaggtcacgctctctcccgcctgcgccgccacccggcgcggcagccgcacgccgttgccgcagacgttgatcgttgtctcgctctcgccgacggcttcgatcttgccctgcaggaagttcatcttcgggctgccgatgaagccggcgacgaagcggttggcggggttgttgtagaggtcgagcggcgcgcccacctgctcgatgcggccggaattcagcaccacgatcttgtcggccatggtcatggcttccacctgatcgtgggtgacgtagatcatcgtattgccaaggctgcggtgcagccgcgagatctccacgcgcatctgcacgcgcagttccgcgtcgaggttggagagcggctcgtcgaacaggaagatgcgcggttcgcgcacgatggcgcggccgatcgcgacgcgctgccgctgcccgcccgaaagcgccttcggcttgcgctgcaatagcttctcgatctgcaggatctgcgccgcgcgctgcaccctgggctcgatctcggccttcttgtagccggctgtctccagcccgaaggcgaggttcttgtagacggacatgtgcgggtagagcgcgtaggactggaacaccatggcgatcccgcgcttggccggcgccacctcgttcatccgctcgttgtcgagcatcaaggcgccgccggagatttcctccaggccggcgatcatacgaagcagcgtggacttgccgcagccggacgggccgacgaaaacgacgaattcgccgggatcgatcgccagatcgatgccgtggatgacgtcaagcgcgccatagcgtttctcgaccttctgaagaacgacgctcgttgccatctcttgggtttccttgtctggtctttgtctggtccgttaccgggttcttgcgcgccagtcggcgtatttcgggctgtcgggtccgacgggcagggcgatgtcctggccgctgtccgacgattgatagatggcggtcaccagttccagcgcccgccgcgcatcctgcgtgctgacgggcagcggacccttgccttcgagatgggcgtggaaatgcgccatctgcgtggtgaagcgcggcgccaccggctgccagtcgccgatcacggcgtcgatccggcgctgcacctcgtcattggcggcaaggatcgtccatgggtccttgcccggcgaataggcctcatggttgctctcgaaggtgacgttctcgaaatgcagcctcagccggctgatttccctttgcgagccgagcgtgcaggagagcgaaacgaaagcgccgctttccatttgcaggctcgccgaggcgcagtcttcaacctcgatgtcgttgacgcgtgtcgcgacgcggccgaagacgcgtgtcgccggccccatcaggtgcagcagcatgtcgtgcaggtgcagcgcatgcgtcaccagcacgccgccgagctcggttgcccacttgccgcgccagggaacggcgtaataggcgggtgtgcgcagccagaaggtctcgaccgaacccatgtagggcttgcccgcgatccccgcctcgatgatccgtttcgccttctccacgccgtcgccgtagcgatactggaagatcggcatcagcacgcccttggcggtcttttcgacgcgcatgatctcgtcgacgcctgatagcgatccggtgagcggcttctcgcagatcacgtgcttgcccgcctgaagggccgccaccacctgctcgagatgaatgccgggtggcgtgcagatgtcgacgatgtcgatgctgtcgtcggcgagaacctctgcaaacgaggtggtgcgaccgatgatgccgaactcgtctgccacttcggcgagcctggcttcgttgaggtcgcagagaaaagccacttcgaacttgtcgggatgcggcaggtagccttcgacgatatgcgagcggccgatgccgcagccgatgatcgctactctcttgatactcatgggataggtctctctggcatgtgcattgcggccggtctcaacgcttcatgccggtcgtggcgatgccgtcgatcaggagccgctggaagaacaggaagaagaagaacaccggcaccagcgtcagcgtcgacatggcgaacagaccgccccagtccgatgaactgctcgaatcgacgaacgtgcgcaggccgagctggatcgtgtaggtgttcatgtcgttgaggtagatcagcggtccgaagaagtcgtcccaggtccagatgaaggagaagatcgccgccgtcgccagcaccggcagcgagagcggcagcatgatcttccaatagatccgccaggcgctgcacccgtccatcatcgccgcctcgtcgagttcgcgcgggatgccccggaagaactgcaccatcaggaaaatgaagaaggcgtcgctggcgagaaacttcggcacgaccagcggcaggatggtgttcacccagccgaggttgagaaacagcacatattgcgggatcagcgtcacgtgataggggatcatcagcgtgccgagcatgatcgcaaaccagaagttccgcccggcgaagcgcagccgcgcgaaggcataggcggccagcgagcaggccaccacgttgccggtcacggtcagaagcgaaatcaccagcgaattccagaagaagcgcccgaaggtgatgtcgaggccactccagccacgcacataggatgtgaaatcgatcgacgacgggatgagcgaggtcgacgagaagatctcgttttccggtcgcaccgacgccgacaccatccacaagagcggatatagcatcagcagcgaggcgatgatcagcagcgtgtgaacgacgatcgaggccggcaggctgcgcttggtgatgtcggatggcggcgcggcgaccgctgtcgtgatcccgttagtcatcgtaatgcacccagtagcgtgaggacaggaacgagaaggcggtgaacacggcgatgatcagcaccaggatccatgcaagagcggaagcatagcccatgcggaagttgccgaacgcctcctgatagagatagagcgtgtagaacagcgtcgaattgatcggcccgcccgacccgccggagatgatgaaggcaggcgtgaacgccttgaaggcgtcgatcgtctgcaccacggcgttgaagaagatgacgggcgtcaaaagcggcagggtgatcttgtagaactgccggaacttcgaggccccgtcgaggctggccgcctcgtacatgtcggtcgggatctggcggagaccggcgagaaagatgatcatcggcgagccgaactgccagacgctgagcgccaccagcgtatagatcgaatagctcggatgcgagatccagctcggtccctggatgccgatctgcgacagcgcggcgttgacgaggccgtcgccggcaaacagctgccgccagagcacggcgattgccacgctgccgccaagcagcgacggcaggtagaagacggcgcggtagacggtcagcccccgcacccccttgttgagcgccatcgccaccagaagcgcgaagaccagcttgaacggcaccgacagcaccacataggtcagcgtcaccttcatcgccgccgcgaacttcgggtccgcggtggtgatgcgcacatagttcgcggcccccacccattcaggcgagcggatcatgtcgaaatccgtgaacgacaggtagagcgataccagcgccggcccgagcgtcagccccaaaaagccgatgagccatggaagaagaaagagatatccaggtccgttggcggcaaggaggcgtcgccaacggctgtcggcgaccactccctgatattgctccgccgtcgcggcccggtcagccgtcgcgcgcatcgcattgctcatgtcggtcaaccccgcgcgagaaggcgcgtgatctcgtcgacaagctgtttgccggcatcggctggcgtgacctgaccgaaggcgacctgctcggcaagctggcgcagaacggtctggccttcgccggcacctgagggaggcggcggcggcagcggcccggcgagatcgccgagattggccacatagttcagcgggatcttgccgacatcgtcgagcatgccggccacgacatcacgcatcgccttggattccgggatgccgcgctcgacatcgagcaccttggcggcttcaggatccttgacgaagaagttgacgtagtcgaccgcctgttcgagcgccttggactgcgcagagaccgagaagaacatcgacggcttgcggtagtggccgcccttcgaatccgccttgatcagcggatagttgctgagcgtcagcttgtccttgaccacggcctggaagccgacgaactggttgctgtgcgcatagtcgatcgcggccttgccgagcgtcagcggcgcggtgtcgatcgtgtccttgtagagcgcctgcacgtcgggcggcacgcaggcctgcgcctcgcggaacttggcccacatgtcgaaccactcggatgcgtcgtcggcgccgaaggcgatcttcgaatccgccgtgtagagcgccttgccgcgttggcgcacgtagttttcgaagagcggttccgcgccgctgccgtcggcgaagccgaaaaagcccttgcgcttgcccgccttggtgatctcggcgcccatcttgccgagctcttcccaggtggtcttgttcgtcggcgcctcgatgccggcttcctgcagcgccaccgtgttgatgacggttgccgccgaattggcgccgaggctgacgccgtagagacggccgtcgaccttgccgccctcgacctgcgccggatcgaaatcgtcgagattgagcttcgatggcatgtaggattcaagcggggcgagcgcgccgcgccgcgcatattcgacgatatagcggtaatccatctggatcacgtcgggcgcgttgcgaccggcgacctgggttgccaggcgcggccagtaatcgctccatcccaggaactcgccggtgatcgacgtgcctgaattcttggccttgtagagttcggaaaccttgttggtgcggtcggcgcgcggctgcgagccccaccacaggagccgcagtcgggcgtcggcggcaaaagcccctggccccagtgcggacatcgaaagaagggctgcccctcccgcaacgaaattgcgtctgctcacacgaaacgtcatctgtttttcctcctcccttggggagcgcctccacacgctcccggctggtttctcttgcaacaaataactatttggttacaagctatgaagaagcaccgggactgtcaagcgacatgtggtggcgggatcgtcgggctttgttttttacaatctgttcataaacgactatgagcgcgaggtttacgggaaagggcagcaacggatggatggcggagagaagaagacggtcaagcggcgctcgcaagagcgcgtcctgcagcgcgatccggagcggacgcgcgccgccattctcgaagccgcgacccgggaattcgctgaaaacggcatgggcggcgcccgtgtcgatgccattgccgagcgtgccggcaccaacaagcgcatgctctatcactatttcggcgataaggagcagctctatctgcatgtgctcgaggaagcctatgtcggcatccgcaccgccgagcgcgaactgcatatcggcgaccgaagcccggaggaggggatcgccgaactggcgctgttcacctggcgctatttcctcaagcatcccgaattcctgagcctgctcggcaccgagaacctgcaccgcgcccgctggctgcgccagtcggtacggctgaaggaactgcattcgcatctgatcgtcgaactgaccgaggtgctcgatcgcggcaagaaggcgggcgtcttcatcgcggccgccgatccgctgaacgtctatctgaccatcgcctcgctcggctatttctacatttccaaccagtacacgctctcgaccatcttcggccgcgaccttcaggagaaggacaatctcgacgcctgggagcgccatatcgtccacgtcacgcttgcgtccatcaaggcctgatcgctgaaatttgacctcggctattgacagcgccgcttctcctctgccatcaagtaactgtttggttactggccgggaggagccgcgcggcatcgcgcgtccggcatttgcaagaaagtttgtaagacattttgcagggaggcagacatggcgcgtctagggataattctgcacggcgtaacgggccggatgggctacaatcagcacctcgtccgctcgatactggcgatctgcgatcagggtggcctgacgctgaaatccggcgaaaagctcgagatcgaccccatcatcgtcggccgcaacgccgccaagatggaggaactggccaagcgccacggcatcaggcgctggtcgaccgatctcgacgctgccctcaaaaatccagatgaccagatcttcttcgacgccggcacaacgctgatgcgcgccgagcttctgtcccgggcgctcgatgccggcaagcacgtctattgcgaaaagccgatctccgacgacctcgaggtcgccatcgcgctcgcccgcaaggcgcgcggctcgggcctcaaacatggcgtcgtgcaggacaagctcttcctgcccggcctgcgcaagctggcgctgctgcgcgattctggcttcttcggcaagatcctctccgtgcgcggcgagttcggctattgggtcttcgagggcgattggggcgtgccggcgcagcgcccgtcctggaattaccgcaaggccgatggcggcggcatcattctcgacatgctctgccactggcgctacgtgctcgacaatctcttcggcgaggtcaaatcggtctcctgcctcggcgccacccacatcggcacccgcatcgacgaacagggcaagccctatgattgcgataccgatgacgccgcctatgccaccttcgagcttgaaggcggggtgatcgcccatatcaattcgtcctgggcggtgcgcgtgcgccgcgacgatctcgtcacattccaggtcgacggtactcacggttcggccgtggccgggctgacgaaatgctggacccagcaccgcgtcaatacgcccaagcccgtctggaatccggaccagccgcagacgattgatttctacaggacctgggacgaggtgcccgacacgcagatgttcgacaacggcttcaaggcgcagtgggagatgttcctgcgccatgtcgccgaggacgcgccctggccctatggtctcgaggccggcgccaagggcgtgcagctcgccgaactcgggctgaagtcctgggccgaacgccgctggctcgatgtgcccgcgctggagttctgagccatgcaaagcatcgtacactatgtacccgtggtcgcccctgttgccccgcatgaaagcggggcacggcaagcatggtagacggtctctccatcaacctcgcgacgatacgagagcaatgcggcttcgccgaagcggtcgatctctgcctcaagcacggcatcacctcaatcgccccctggcgcgatcaggtcgccaggatcgggatcgacgaggcggcgcgcatcatccgccagaacggcatcaagctcaccggcctctgccgtggcggcttctttccggcggcgagcgccgcggaccgtcagtcggcgatcgacgacaacaggcgcgccatcgacgaggcggctgcattgggcgccgattgcctcgtgctcgtggtcggcgggcttgccggcggatcgaagaatatcgaggacgcccgcgagatggtccgcgatggcatcgccgccacgctgccgcatgcccgcgcgagcggcgtgccgctggcgatcgagcctctgcatcccatgtatgccgccgaccgctcctgcgtgaacacgctcggccaggcgctcgacatgtgcgagacgctgggcgagggggtgggcgtcgcgatcgacgtctaccatgtctggtgggaccccgatctggcgcgccagatcgcccgcgccgggcgcgagcggcgcattctcgcgcatcacatctgcgattggctggtgccgaccagggacatgctgaccgaccgcggcatgatgggcgatggcgtcatcgacctgaagggcataagacggatggtggaggacgctggctttcacggcgcgcaggaggtcgagatattctcggcggagaactggtggaaacgcccggccgacgaggtgatccgcacctgcgtcgagcgcttccacgactgctgccggatctgagccggcacggaccagaggcagaccaacacattcgtttccgcacgcatgaaggaggatcattcgatggagaaacgccgcttcgcactgataggcaccggaaatcgcggaacgaccatgtggggcaaggaattgctggccggctggcgcgagcatgtggatctggtggcgatcgtcgacaccaattcgctgcgcgccgaacgcgcccgcaccatgatcggcagcaatgccccgatctatgagaacatcgacgccatgctcgccgagcatgaggtcgacatggtcatcgtctgcacgcccgactacacccatgacgacatcgtcgtgcgcgcgctggaagccggcatcgacgtcatcaccgaaaagccgatgacgacagccgtcgacaagatccgccgcatcctcgatgccgaaaagcgcagcggcaagcgcgtcgacgtctccttcaactatcgctacgcgccgaccgccgccaggatcaaggagctgctctcctcgggcgagatcggacgcgtcacctccgtcgatttccactggtatctcgataccaggcacggcgccgattacttccgccgctggcacgcctatacggaaaactccggcagcctcttcgtccacaaggccacccaccatttcgatctcctgaactggtatctcgacagcgaccccgaagccgtctcctctttcgccgacctgcagaattacggccgcaagggtccgttccgtggcccgcgctgcaagctctgtccgcattcgggggagtgcgattactacctcgatctcgaggccgatcccttcctcgacgcgctctacgaagacccctccgagatcgacggctatttccgcgacggctgcgtctatcgcgaggatatcgatatccccgacaccatggtcgtcagcctgcgctaccgcaacaacgtccacgtctcctattcgctgaacaccttccagccgatcgaaggccaccacatcgccttcaacggcaccgaggggcggatcgagttgcgccagttcgaaaagcagccgtgggaaacgccggacgaggatacgatcctcttgatccgcaactttccgaaggacagggcgccggtcgagcgcatcgtcgtgccgcattcttccggcggtcactatggcggcgacaaccgcatgcgcaacatgatcttcaagcccggcatggaagaccgcctcggccagcgcgccggcacccgcgccggcgccatgtcggtgctgacgggcatcgcagccctgtcaagcgcacgcagcggcaaggtcgtgaagatcgccgacctgatgccggagctcatcggcggcgatgcaagtccgggcctcaaggccggctgatacatgctggccgatgcaagccggctgaataaggccggctgacgaaagccggcggatcgttgccggcgctcgcgcctcctcaggcgccgacggcgaccggttccttcgtcgtcgcgacctcgatcatcgcgacccagttgcgcgcgatcgcaagaccgctggcatcggccgcggcgccatccaccggggcgagatcggggtggcgctgcagccagccgggttccatccgctcgatcgtcgcctcgaagcccgtcgtccagccctcgaccaccgcgcggctggcctcgaaatgaaactgcgtgccataggtggcgcggccaagccggaaggcctggttgcgcacgagcgggctggtcgcgagcaggcaggcgccctgaggcagcgtgaacgtatcgctgtgccactcgaaggtgatgaaatcggcctcgaggcccgacagcagcggatcggccttaccctcttccgtcttctcgacgggtttccagccgaattccagctgccggccgagatggttttccgcgccataggcacgcgccaggatctgcgaccccaggcagatgcccatcaccgccttgcccgcctcgcaaaagcgctgcatcagccgcgccagagcgggcagatagggatagttcgcatcatcgagcgcgtcctgctcgccaccaagcacgacaagcgcgtcatgctcgaagatgctctgtggcagccggccgtcgagatagggctggtagatgtcgagctcggcattggcttcggcaagcgcgatgccgagcgagcccagcggcgtgttcttcatgttctcgaccacggcaacccgcatcggcaactcctgtcttcctgtcgcttcaggaagaacaccaagccatcgcgcattgcaatatccgttgcgtcacacccggccacttcgtaagtttggcgcaactgcaacgatatgcccgaagccggacagaaagcccccatgaccgagaaaaaagcccgcgtgaccattctctactgcacccagtgcaactggctgctgcgcgccggctggatggcgcaggaactgctgcagacgttcaccgacagcctcggtgaggtggcgctcatccccggcaccggcggcaatttcgagatccgcgtcgatgatgagcttatctgggagcgcaagcgcgacggcggctttcccggccccaaggaactgaagcagcgcatccgcgatatcatcgatcccgaccgcgatctcggccacaccgaccggacgtcgaaggaaagctagcccgaccaggcggcgatccagacgctcggtctgctccaccgcacgaaacgcctagtcgtagggcgagttgcaggtcttgtagatcccctcataggtcacgaagcgatcggtgttcggattgtagctgcgatactggttgcggcaccagttgacgtgaaagttgcggtcgggcgcattcggccgcgcggtccgtgcgggtgtctgcggcggctggtagcggcccggcggttgcgtgttgtagtatttcggcgcaggccccatcgcgcgcgggcgataataggtcggcccggtcgcggttggcggcctgtagttcggctgcacgtaggatggcgtgaacgactgcgtcttgccgaaggtgaagcagccgcgaaaatcgcacatggtctgcacgcggacgatgtcgctgctgcccgctacctccgcaagcggcgtcctcggcatggcccaaacctggccaagcggcaccacggacagaatcacaacagcggacaatttctgaaaaacggtcatcgcaacatccttttccatggatcatatatagtgcgcccggcgtttcttggcaccgcccgaaatcccggatcgtccaaaaacccacctttcccggtcttgcccgaagacttttttgcgtggtgtcagaaaaacttcaaaaaccctgttgacaccaaccggccacccccgtacatggctctccgtcgcccagatggcggaattggtagacgcgccagcttcaggtgctggtacccgaaagggtgtggaggttcgagtcctcttctgggcaccattccattttgagaaacgtggatttctcaatgatcgcaagatcataggtgtttcgcaaaacctcgatggaggttcagtgacgaaacaccgaaaactctcccaaagacctgattgctgatgtctcgcgtttcgacgggtgtgctcgcggcgcattgcgcacgccaggaaaacgcagctcctggcgaggccagcggcctcttctttactgcccttcgcaagtgccggaacgaatgtttccattttcgtcggcggaagcatgttttcatgcaactatcacaagtattgatgcgcgatcggtccatcgacaagtctcggtctctttccattcgctgcgaatgatgcttagctcgttgccctgggagatgggcaatattcgatagtattcgagggaccgggtgctgcatgacgaacgcgacgtcttcttcttccaccgtcaataagggtcgtggccttacgctgagggtcgatctgacgggcgtgcttgcctgcctgctcatggtcctgatcgtcgcctgcgtcgtcatgagctatggcacgaaaagccgcatcgacggcgtggcgcagccggtcggaccgaaggcggcgctgcaacaggctgtcgacggcgatgccgggggcaacggctgacgccacggcgcgtatccgcgctgtcactgccgctggttgatcatcaccatctgagatagcgacggccgagcacggcgccgatggcggtcacggcggtgatcgatatcgtgtaccaggtggcgacgaagagcgggctgtcgtcgatgcaatgccaggcgtagagcgccgaggcgatggcgccggccgcaagcccggcggcggcaccggcaagagccggtcgccgtggcgcgccggctcgaagcgccaggatgaaacccgcaagcggagcgatcgacaaaagcgggatgagcgtcaggcaataggccgcgttgtgtcccatcagctgctgcccccatagctccggcggcagcaccaggagttcgatgccgacggcggcggcaagcaggcccgccggcacgatgagcgcccatccgccggcgcgcagcgaaagttcggggcggccgatgcgaaacacgatcgacgatgcgaggatggcgagccccagcatgaggctcaccttgaagagcacgcgcgtggtttccacggcgctggagacgtcgcggcgaatgccgatcgcgaacaccaggatcagcgccgaaacgacgacgcccgcgacaagcgcggtcttgagcgcggggccgagccggttccgcacaggggcatcctcggccagcaggctgatcagctcattcgtcttcaccacgcccactccgatattcttcgccgcgataaagggcggcaagcttcttcagcgcccgatgcagcgcgacgcgcaccgctccctcgctcattttcagccgctccgccgtttcgcgtatgcccgcgccgccgatcgagatcgagcgtacgatgtcgcgttgcgggtccttcagccgctccagaaggttcatggcgtcaaggcggttcatggcgtcctcagcctcatcgtcgcttgcaaccgtttccatcacatcctcgatcggcacatccacatgccgtccgcgccggcgcaggctgtcgatcagcttgttgcgcacgatcgccgacagccacggaccgatcgggcgcgtcgtgtcccaggtgccgcgcttcaggtgcaccgcgagcagaacttcctgcacgacgtcttccgcctcgcttgccggcgcgccgaactgttcgcagcgccgccgggccatcgcccgcaaatgcggggtcacggcgagaagaaaacgctgataggcctgcccgtcgccatcaagcgcccggcgcatccattccgcccattcctcttcacgcgccgaagtgttcacccgacatcatcctctacgaacgggcacatgcagttgttaccggaccttggaaatatttgcagcacgccgcaaggccgcatcgcttgaaaagcgtcgcgagagtgtcgatgccaaatgaacagggggaggcgggtggtcagcggacgggttggtagcggccgcgcagcggaacctggctgccggaggaaatcacgccgtcgcggtcgcatacatagaccgtcatcggcatgccgccggagcggaaaatctcgtcatggcgccggcgtatatactgcgtctcggtccggcaggtcagtttcggctccagcgacggatcggtgggcgccttgacgccgggaaggttggcatagggataggtcggcggcacccggccttgtccggcgcgcgcccagtcggtcgaaaacgccggcgccggaagaacgccggctgaaagcgccagcgtcacgagaacgattttcttgaaattaccgagccgcatcaagtccctccggccgctcgccggtctctctgtcaatgccgtcgatgtaagcatgccattcccacgcatcaagcggcagcatgcgccgctcccgcaatcgtgacttcggcgcctgcacaggccctacgccgacttgcggaaatagccccggaccgtcggatgggcaaccaggctggcgaggatggcgaagccggcgccggcgaggaagcccgcgagcaggccgccgatgacgccggcgatcaaaagtgccgtcctgcccggcccgttggccttcagcggcggctcggcctcggagatcacgcggacattgctgcgcgacaggctctgctcttcgctggtctgtccggagcgcttcagcacggtctcgtagatattgcgcgccgcggtcgccttgcgctgcaattcgttgagttcgacctgcttgtcggaggtgttgacctgcagcgccttttgcaccgacagttccttggagacggcctcctcggccttcttcgcctgctggtattcgccctgtgcggtgctcgccagccgctgcaattcgccgcggatctggtcggatatgctcttcagcgaggagcgcgccgcctgcaggcgcggatggcgcgtgcccatctggctctcgaggctgctgaccatggcggcctgcgtcgaatattgctggcgcagcgttgcaagggccgtcgaaacgccgctctgcgatgtgccgccgaccacgtcctccaagcgcaggttggcggcggcatccgcccgagccttggcctggatcgtcttgtcctgcgccgtcaccaggagcgtgttcaaggatgcgagccgctggtcggagatcaatccgttctgcgtcgaggccatgtcgttgtcggcgcggtaggtctccaccgcctgctcggcctcctgaaccctctggcgaaggtcggtcaggcgcttgtcgagcgtggtcgaggtattctcgtagagaccggagctggcgccgtcttcctcctgcaggaaggacgccacgacctggttggcgagacgcgcggatttctcggcgttcttcgtggtcacctccatggaaaccacgtaggtggaactctgcctggtgatcaccagcgccttctgcagcgcgctgacgacggcggcgctgtcggcccggccggcgttgaattcggggtcctggtcgagcttcatcgcgtcggcgacgcggcgcatgacattgccggagctcaggatctgcacctggctgtcgatcatcgccgagatcatctcgggcgaggggccgttggcctgcgtgctgggatcgttgaggccgatctgtctgggatcgaagtagagcgtcgtgctggcggtgaatttctgcgtcgacagcggcagcacgatggcgccggcaaccgcgccgagcacgctaaggccgaggatcaggagccgcttgttccagatcgcctcgatcgccgagcgggtgtcgagcagcggtccgccgcgctccggcgcgtgcaccacggcgggcgcgaccacgggtgcggcgacgggcgctggcggttcatcgcgcgcgacagtgcccgcggacgagggcggggcatcggcgttccgctcaacctgcggcgcccgctcgggtgcgcggggcgcctcgctcgctggcggcgcggatgccgtgcccgattggcttggaggggcggggttctcaggagaggcgtccgtgatcagggaagcgggcgcgggcttggcgggcacgaagtcggacgggcgcagcacgggtccgggcgcgccggtccggttgggctcggtgttcggcggctcatagctgcgccattgtggcagcctgccaaccttgttcctgtcaaactggttcatgcgcgcgctcgttgctcgcctgtaaaatgccggcgacgtgggttcgactttagaaatccttagctaacggaccgttaagatgccgagacagcactgagacgaacgatcagccgaacccggaagcggtatcaatgagcgacaaattctccccccggcggcgcctagcggcggccgtgctggcaacgatgctgctccaggccggcgcggccggtgcgcagggcacctgcctgcagggcatcaatctctccggtgccgagttcggcgagcgcggcggcgaggtgttcaaggcctatgcctatccctccgaggaaacgatcgcctatttcgcccagaagggcttcaacagcgtgcgccttccctttctctgggagcgcctgcaacccgagctcggcaagccgctcgacgaagccgagctgaagcggctgaaggacacggtcgagcttttgcgcaagaagcgcctgaccgtcattctcgatccgcacaactacgcgcaatacgacaaggtgatgatcggcaagccgccggtcaccgacaccgccttcgccgagttctgggcgcggctggcgattgaattctccaatcaggaggatgtgatcttcggcctgatgaacgagccctacgacatcggcgccgatgcctggctgaaggccgccaacgccgcgatccgcaccatccgggcgacgggagccaacaatctgatcctggttccgggcacccgcttcaccggcgcccattcctggcaggcggatgggccgggcggcgccaacggcacggtcatgctgggcgtgcgcgatccgcgcaagaactacgcctacgaggtgcatcagtatttcgatcaggattcgtcgggcatgaacgccgaatgcagcggcagcgacagcgcgctcaaggcggtgaccgatatgaccgactgggcgaggaagaacaatacgcgggtcttcctcggcgaattcggcgtgtcgcaggacaaggcctgcgtggcggcgctcggccgcgtgctcgaccagatgcaggccaaccccgacgtctggctcggctggacctactgggtggcgggcgactggtggccggaaacggagacgctgaacgtgcagccgcgcggcggcaaggatcgccagcagatgacggcgctggaaaacgcgctgaagacaccggccgccgacaagtccaagtgcaagacgctggtggattgaggatatggcaagcaaggtcaaagccgccggtgatgcgatcgaaaaggagccgatcgactacagcatcctggccgtcagcgtgctcggcgtgacctacaacgccattcttgccttcatcaatcacaacatcatgccgctgacgtcaaccgccgtcgtggcgagcgagatcctgatcctcgcctacagcttcggctacatcctgaagaagggcctctacgaggaagatatcgtgccgctcggctatctcctcgcgaccgtcgcgctgacggtctatgtgatggtcatcaacaaggccggctatatcgaccatcttcgcaacgtcctgatcatcttcgccttcacggtgctcggacgctggagcaatgaacgaacgctgcggcttgccttcaagatctgctgccttgcggttctcgcggcgctcctttgcgagatcatctcgacgcccgcctatgtggcgctcttccatccggccgagtatttccagaacacccgcggcgttccccctgccacctacagcgattccggcctgtttcgcggcgcgctcggcttcgaggggcggttctccttcggcctcatcgatcaccgctcctcctcgatcttcctcgagcaggtgtcgctcgccaatttctgcggcgtcatggtcatctatctcgtcagcttcgccaaccgcatcacgctcttcgaccggctgatcttcatggcgacgatcgtgctcatcctggtgacgaacgacacccgcacgatgctgatcttcaccatcgtcagcgtcgccggctatgtcatctatcccctgatcccgaagatcttcagctttctgatgatgccggcgatcgtcatggtcggcttcatcatccatgccttcaagcctaacgcccgtgacgacgatttcgtcggccgcatcagcggcacggtacgaaacatcatcgccatggatctgccggcgacgatggggctcgagctcgacaaggccaccaccttcgtcgacagcggctatgtctatatcacctacggcgccaccatcttcggcctcatcctgttctggctgttcgtctccttctatccggccggccagacgcccaaccagaagcgcctttgccattcgctgtcgctcttcatgttcctgaacctgatgatcggctcgacagcgatcttttcgatgaagaccgccggcctcggctggcttctcgtcggctttctcaaattcaacgagggcgccacggcgagaatacgcggttccacgacgcaaagtgaacggactccggcaggaactgccgtaagctgagggccgatgagatgcgccggccgcaagcgccgcccgtctcgacaaacctggtgcagcggcgcgcgtgtcgtgcttgatcggccatgtcgctttgatctaagcaggctcgacggtcgccccagaccaacgcttaaaaggccgatgcctaaacaaggccgacgcttgaacaaggaatatgacgcatgacgcaatatgtactgacggtagcctgcaaatcgacgcgcggcatcgtggcggcgatttcgacctatctggccggacagggctgcaacatcatcgacagctcgcagttcgacgatctctccaccggcatgttcttcacccgcgtcagcttcatctccgaagagggtgctacactggcggctatccgcgaaggcttccagccgatcgccgaaaaattcgagatgacatcggaaatccacgacggtgaccagcgcatgaaggtgctgttgatggtttcgcgcttcggccattgtctgaacgacctgctctatcgctggaagatcggcgcgctgccgatcgacatcgtcggcgtcgtctccaaccacttcgattaccagaaggtcgtcgtcaaccacgacattcccttccaccacatcaaggtgacgaaggaaaacaagccgcaggccgaagcccagctcctgcagctgctcgaaagctccggcaccgagctcgttgtgcttgcccgctacatgcaggtgctctcggacgccatgtgcaagaagatgtcggggcgcatcatcaacatccaccactccttcctgccgtcgttcaagggcgcgaacccctacaagcaggcctatgagcgtggcgtgaagctgatcggcgccaccgcgcactacgtcaccgccgacctcgacgaaggcccgatcatcgagcaggacacggcgcgcatcacccatgcgcagtcggccgacgattacgtctcgatcggccgcgatgtcgagagccaggtgcttgcccgcgccatccacgcccacattcaccaccgcgtgttcctgaacggcaaccgcaccgtggtcttcccggcaagcccgggcagctatgcttccgaacgcatgggctaagtcattggtatcgggcgtccgctgattccttggccggtaattgccgggccagtaattcccaggcccgtaattcctagggatgacgcccgatcctcgcttgccgatagcaagctgtcgattatctgcttattgtgcaggatcgaatcgcgcggtgggggaatgccatgaccgatgaaacgctcgctcggcgtctcgagcttccgcgtcccgacgtgacggccgaggaagccggagagatcctgcagtcgcgctatggcttgtcgggcacgctgagtgagctcggaagccagcaggaccgcaactaccgcgtcgataccggcgagcaggcttacgtcctgaagatctgccacatggtctacgagacgatcgagctcgaggcgcagaatgccgcgatgcgtcacctcgccggcatcgagggcgcgccgcgcgtgccacgcgtggtcgcttccaccgatggccaggacatcatcgccgtcgtcgtccgcgaccagacctatcaggtccggctgctggaatatctcgaaggcgaggggttgagcggccccgcgcatcttcccgggcaatccgtggcggcgctgggtgcgctctgcgccaatctcgccagatcgcttgccgatttcgatcatcccggcctcgaccgcaacctgcaatgggacctgcgccgcgccggcccggtcgccgtccagctcctgtcggcgatcaccgatggcgccgcgcgcgaccgtatcgccaagaacatggtcgccgccgtccgccgcgtacagcccttcgcgccggcgctgcgcctgcaggccgtccaccatgatgtcaccggcgacaatgtcgtcagccgccgcgacgaaaagggacgcctcattcccgatggcgtcatcgatttcggcgatatcatccgtggctggctggtcggcgatctcgccgtcacctgcgcttcgctgctgcatcaggccgatggcgaccccttcttcgtgctgcccgccgtcaaggcctatcacgaaatctatccgctgaaggaagaagagctcagggcgctgtggccgttggttgttgcccgtgccgtcatcctggtggcgagcagcgaacagcagatctccatcgatcccgaaaacgaatatgtccgcgccaacctcgtgcttgagcagcgcatcttcgatacggccatcgccgttcccttcgatctcatggaaacggccatcctgaagacggcgggcgtcgaactccccactgttgcgaccgagcattggcacccgctgctgcccgatctcgaccttcaaaacatgctctatgtcgacctcggcgtcgaaagccagcacttcgccgccggcaactggggccagggcgacatggactggcggctgcttgcccgcgccgcctccgaggccgatgccgccgccacccgctacggcgaatacagattgtcgcgcgcccgcctgctgagcgccaaaccgtccgccacctacgccctgcacgccgatatctgcctggccgccggcagcgcgatcgcggcgcccttttcgggacgcatcagctggcagaaccaccatctcgtcctcgagggcgccgatatcagcctccatctcgacggtatcgatccctcggtcgaggacggcgccgagctcgaatcaggccaggcgatcggcgcagtctcgggcgaacagggctcgctcggcggcttgcgcgtgcagctctcgacactgaagggcgccgagccgccgctcttctgcacgcccgccgaggtctttgcctggtcggcgctttgcccgtcgccggcagcgttactcggccatggcgtagaagcgccgaagcctgtcgatgcggaaatccttgccgtgcgcacggcccatttcgcggccgcccagaagcactactacgagaccccgccgcgcatcgagcgcggctggaaggagcacatgttcgatgtcgagggccgcgcctatctcgacatggtcaacaacgtcaccattctcggccacggccacccgcgccttgccgatgccgtgggcgagcaatggctgcggctgaacaccaattcacgctttcactatgccgccgtcgccgatctctccgaacggctggcggctctggcacctgaagggctcgacaccgtcttcctggtcaactccggttcggaggccaacgatctggcgctgcggcttgcctgggcccacaccggcgcgcgcaacatgctgaccctgctcgaggcctatcacggctggtctgtggcaagcgatgccgtctccacctcgatcgccgacaatccccgggcgctgacgacgcggcccgattgggttcatcccgttgccgcgcccaatacctatcgcggcgagttccgtggaccggattcgaccggcgactatctgcaaagcgttcttgccgcgctggaactgatcgacggaagcggcgagcggctggcgggcttcatcgccgagccggtatacggcaacgccggcggcatagcgctgccggatggctatctcgccgccgtctatggccaggtgcgcgcccgtggcggcgtctgcatcgccgacgaggtacaggtcggctatggccggctcggccatcatttctggggcttcgagcagcagcaggtggtgcccgatatcatcacggtcgccaagggcatgggcaacggccacccgctcggcgccgtcatcaccacgcgcgccatcgccgattcgctggagaaggagggctatttcttctcctcgtcgggcggcagcccggtcagttccgtcgtcggcatcaccgtgctcgacatcatggccgacgaggcgctgcagcagaatgcccgcgagatcggcgatcggctgaagggccggctggtggcgctgatggatcaccatccgctcgtcggcgccgtgcatggcatggggctttatctcggcgtcgagttcgtccgcgaccgcgcgacgctggagccggcgaccgccgagacggcggcgatctgcgcgcggctgctcgacctcggcgtcatcatgcagccgaccggcgatcacctgaacgtgttgaagatcaagccgccgctctgcctgacggccgaaagcgccgatttcttcgccgacatgctggaaaaggtgctctcggaagggtggtgaccgctatccggggaagcttctcgaagggagagcgcgatggcagttcgtatcgatctcatggtctcgctggatggtttcgccacgaccacggaccagacgccggaagtcccgttcggcgaggactggccacggctcgtgggcgcttacatggccacgcggacgttccgcgagcgggtgttcaaggacaccagcggcagcggcaccaccggcctcgacgacgactacgcgcgggcatatttcgagaatatcggtgccgagatcatgggcgccggcatgttcggcctgcataattttcccgacgatccggactggcgcggatggtggggcgacgagccgcccttcggctgcccggtcttcgtgctcacgcacaaggagcgcccgtcggtcgagatggccggcggcaccacgttccatttcctgagcgccacgcccgtggaagcgctcgagcgggcgatgaaggcggctagcggcaaggatgtgcgcgtcggcggcgggccgacggtggcgcgcgattttctgaaagccgggctggtcgatcggcttcatgtcgcgatcacgccgatccttctcgggcgcggcatccgcctgtgggacgatttgcgtggcctggaagcggtttacacggtcacatcggaaaccgcgccaagcggcacgatccacctgactttcaggcgctaacaggcctctgacgcccgttaaccatttcggtcatttcgaggcttaccgtcttttaataaaaagccccattgccggaatcagatgcactccctatctctggctgcgagcgacggagagttccgtatcgtcataccaagtgcacaaagacctgctaatggtcttctcgtgaattcggctttggcggaatgatattttcctaatcgccgacattttgacacgtttcggaatatgtttccgactgttcgttatgtattctctacaaataaagtagattatacagaacaccaccgccggtcccggcatgcccggggcccgaagcaagcacgacgcagaagaaaggaatgagacatgaacgacttcgatattcttgccacgctcctggtgcgccgcgtgcttggcaatgaccgtccgggcgctctctcccgcccgaactgtcgaatgtgaccttcgtccccccttaaacggtaaaagacaagtcaattcgccatcgccgacgcactccgcgcggcaggagttctatgcatgaaaaaagaagttatcgaatacgcaggcgtgcccgttggtatcgtcattccggatgaaaaccggctgaaattcatcgccgtgaagtatcacgtccacgatctcgacgagcagcacttcagttcgccggccgaggtcaagcacgcgatccacgacctgatgacccgccgtcatcccaaacccatccatgcctgaaggcatggttcgatcccggcttgaaaagcccgggcgaaaacaattcgagaatatccgaccggtcccgcccaaggcggggccggtcttgttttttggccgcccatatcgtcctatcgcctgctgctgatcggtatcgagacaaaggacgccgcgcttgctcaatctgctcaccgatatcgaaggcctctccgtcggccacgccacggatcttggcctcggctccggcgtcaccgccatcgtcttcgatcggcctgcggtcgcctccggcgtcgtgctgggcggtgcgcccggcggccgtgacaccgcgctgctcgatcccgccatgacggtcaccgaggtcgatgccttcgtgctctccggcggctccgccttcggcctcgatgccgccggaggcgtccaggccggcctgcgcgccatgggtcgcggctttcccgttggaaaccagcgcgtccccatcgtcccgcaggcgatcctcatggacctcctgaatggcggcgacaaggattggggcctgcaatcgccctatcgcgatctcggctatgaagccttccgcgccgccgcgaagggatctttcgcgctcggaaccgtgggcgccggcaccggcgccaccaccgccaccgtcaagggcggcctcggctccgccagcgcccgctcgtcaacaggccacaccatagccgccatcgtcgccgttaacgcgctcggttccgccacgatgggcgaggggccgcatttctggtcggcgcctttcgaacaggacaatgaattcggcggtctcggcctgccggagatgatcgacgcgcgcgacaccgccatgcgcctcaagggcatgaacaccaccgccacgaccatcggcgccatcgtcacggacgcggtgctgacgaaggcgcaagcccatcggctcgccgtcatgggccatgacggcttcgcgcgcgccttgctgccggcgcatctgccgctcgatggcgacaccatcttctccgctgccaccggcgccagagcgctcggcggcctgcccgaatttctggaactctgccaccttgccacgcttgtgatggcccgcgccattgcccgcggtgtctatgaggcgacggcacttgccgtggaaggcgcccagccggcatggcgggaccgctttgccgatcgcctgtgatcatttagagaagggcatggtccgattgcggagacggtgagatgcagatacgcgccctgatgtatttcgacgagctggtccgcaccaattcgatgcgccaggccgccgagaacctgaacgtcgcgccgacagcgatcagccggcagatcgagaacctcgaatatcatttcggcgcgccgctggtggagcgcagttcgcgcggcgtcaagctgacggcggcaggcgagctgctggccgcccgagccggccgcaccctgcgcgagctcgatcacgtcggccagctgatcgaggatctgaaaggcctgcaggccggccgcgtcgccatccacgccaatggcgccactgtcgccaatctgctggccccagccctggccgcgttcagcctcaaatatcccaagctgcatttcgaggtcaccatctccagcgcccgccaggccgtcgaggcggtcaatggcggcgaggccgatatcgccgtcaccctcttcgcgccgccggtatcgggcaccaagatccgcctgcgctccgagatatcctatgatctgatcgtcgcgacagcccatccggcggccgaacggcaggaggtcagcctcaaggatatagccgactatccattggcactgcccgatcagtccttcggcttccgccaggccttcgatgcgctgttcgaaaaggcggggctgagcttcgatgccgtcttcgtcaccagctcgctggaaatgctgaaggagctggtgctgagcggcgccgccgccaccctgcttccggcgctgacggtgcgccgcgagatcgaggcgggtcagctgcgtgccgtgccgttggcgccgagaagcgccatccgcacccatgtcgatctctgcgtggcgcccgatcgccagctgtccttcgccgcctccaagcttctcgatttcatcgagcgtttcatgcgcgagcgcgccggcgggcctgtcggcaaggaatgagggaatgcgagggtcgccggtggacggctctgggcttgcatcgggcggaaaattcctgtgtagctctttcggctacactgagcacacaaaatcgtcattgtgtgtgcacaggcgcaatgacactctatcggcaatcggccagttgcagcaagcggcggccatgaaggggacatgatgatcaagctttcgctcgcgccctccgcgcgcctcgttcgtcgtctttcgcttggggtcgccgtctcggcaggcctggtgatgctcagcctgacgccggccgaagccgccaagaccacgctcagcctcggcatgaccatcgagccgacgggtctcgacccgacgatcgccgcccccgtcgccatcggccaggtcacctggcagaacgtcttcgagggtctggtgaccatcgacgaggccggcaaggtgcagccgcagctggcgaaaagctgggagatctcgccggatggactgacctatacgttcaagctgcgcgaaggcgtcaccttccatgacgggcaggccttcgattccgcctccgccaagttcgcgctcgaccgcgcccgtggcaaggattcggtcaatccgcagaagcgcttcttcgcctccatcgcctcgatcgacacccccgatgccgccaccctggtgctgcgcctctccgagcccaccggcagcctgctctactggctgggctggccggcctccgtcatggtcgctccgaactcgtccgccgacgacaagaccaagcccgtcggcaccggcccgttcaagtttgtcagctgggccaagggcgacaaggtcgagctggaaaagaacgccggctattggaacaaggacgtgtcagtcacgctcgacaaggtcaccttccgcttcatcgccgatccgcaggcgcaggcagccgcgctgaaatccggcgacgtcgatgccatccccgaattcgccgcccccgagctgatggcctccttcgacggcgacgccaggctgatgaccaagatcggcaacaccgagttaaaggtcgtggccggcatgaacaatgccgaaaagcccttcgacgacaagcgcgtgcgccaggcattgatgatggcgatcgaccgcaagacggtgatcgagggcgcctggtccggcctcggcaccccgatcggcagccactacacgccgaacgaccctggatatgtcgacctgacggccaagctgccctacgatcccgaaaaggccaaggcgcttctcgccgaagccggctaccccgatggcttcgccttcaccatcaaggccccgcaaatggcctatgcgccgcgcagcgccgaggtcatgcaggccatgctcgccgaaatcggcgtgacgatgaccatcgaacccaccgaattcccggccaagtgggtccaggacgtgatgaaggaccgatcctaccagatgaccatcgtcgcccatgccgaaccgatggacatcgacatctattcccgcgatccctactacttcaactacaagaaccctgatttcaacgcgctgatgaagaaggtccaggaaaccaccgatccggctgcgcaggccaagatctacgccgaggcgcaaaccatcctcgccgacgacgtccccgcgcttttcctcttcgtcatgccaaagcttggtgtctgggacaagaagctgaaaggcctctgggaaaacgagccgatcccgtccaatgtgctgaccaacgtctcctgggacgaataggtggcgggagggtttgtgttggtgggagagggagaggttagggtaagcgcaaggctgattgcagccatcgagcctgcggccccctcatccgcctgccggcaccttctccccgttggggcgaagggacgtgtggcaggccgctcgctccatcttcccttctcccccgcggggagaaggtggcccgaagggtcggatgaggggggcacgcgcgctgagtcccccacttacggccccgccaagattacccccctctgccctgccgggcatctcccccacaaggggggagattggctcgcctcacccactcgctccgacctgaacgttcagcaatgccatcgcaacgattcgatctccccccttgtgggggagatgtccggcaggacagaggggggtatcgcgcccaccgagcctgcggccccctcatccggctgccgccaccttctccccgctggggagaagagactcgtagcgggccgctcgctccatcttcccttctccccgacgggggtccgaaggacgggtcgagaccagcggctcgaccccggtcagtggcccgaagggtcggatgagggggccacatgcgctggcgtcaccatcagtcgccccgcaagaaccccgagaaccgccgcatgatcgccctcgtgctccgtcgcgtcgccggcctcgtcgtcacgctgctggtggtctcgctgctgatcttcgccgtcatggacatgctgcccggcgacccggcctcgatcatgctcggtacctcggcctcgccggaaaccctggcggcgctgcgtcaggagctcggcctcgaccggccgctcatggtgcgctacgccgagtggctggcaggcgtctttaccggcgatctcgggcgttcctacacgtatggcgtccccgtcgccggcctcatcctcgagcgtctcgccgtcaccctgccgctcgccctcatcgccatcctgctctcggtcgccatcgccatccccctcggcgtcaccgccgcctccaggcgcggcggcatcgtcgatgcggtcgccgccgtcttctcgcaggtcagtatcgccgtgcccgccttctgggtggcgctgctgctgatcatcctgttttcgaccacgctggggctgatgcccgcgggtggcttccccggctggagcgccggtgtctggccggcgctgaaggccctgctgatgccggccgtggcgttggcgctgccgcaggcgggcgtgctcactcgcgtcacccgctcggcggtgctggacacgctgcacgaggatttcacccgcaccgcccgcgccaagggcctgtcatcaggcaaagtgctctggcgccattcggtgcccaatgcgctggtgccgatcctcaccatcctcggcctgcaagccaccttcctggtcgccggcgcagtcctggtcgagaatgtcttcaatcttcccggcctcggccgtctcgcctatcaggcgctgtcgcagcgcgatatcgtcgtcatgcaggatgtggtgctgttcttcgccggcctcgtcatcctcatgaacttcctggtcgatctctcctatctcgcgatcgacccgcgtctgagaaaggggatctgagatggcccccctggtctcgaccgaaacgaatatcggccgccgccgcatgcgcggcatcaagcgcgtcaacctcatcatcggcgccgcgatcgtcgcctgccttgtcgccaccgcgctgctgtcgctggtgtggacgccgctgccgccggcgaagatgcagatcatccacaagctgcagccgcccttcggcttcggccttctcggcaccgatcagttcggccgcgacgtgctctccatgctgatggtcggctgctggaactcgctgtcaacagccgtcgtcgccgtcgccatcggcggcacgctcggcaccatcgccggcctcgcggcggccgcctttcgcggcatcttcgaaacgcttctgatgcgcgtctgcgacgtcatcttcgcgctcccgcccatcctctcggccatgatgctcggcgccttcctcggcggcggccggctgacggcgatcgccgccatcgccaccttcctcattccggtctttgcccgtgttgcgctggcaagcgcgctgcaggcctggagccgcgattacgtgctcgccgcccgcgcgctcggaaatacgcggctggcgatctcgctccgccacgtgctgcccaatatcatgagccagctcatcgtccaggtcaccatccagcttggcctcgcggtgctcaccgaagcgggcctcagcttcctcggtctcggcctcgccccgccggcgccgagctgggggcggatgcttgccgatgcgcagaccttcctcggtctcgccccctggcttgccattctccccggcctcgccatcgcgcttgccgtcctcggcttcaacatgctgggcgacggcctgcgtgacctgctcgacccccgcgagggaacaagtcgctgatttgaagatatcgttttgaaagaccgcgccatgaccgagatcgacctgagcatccgcgaactgaagcggcgctttgcgaagaaaagcctgtctccgctggaatactggctggcgctggagccgcatatcgccgcctgggagccgcacatcgccgcgctctatctctacgaccccggcgccgcccgcgctcaggccaaagcctcgaccgaacgctgggcgaagggagaaaccctgggcccgctcgacggcatcccggtgacgttgaaggagctgatatcaaccaagggccagcccgtccctctcggcacccgggccgtggagctgacgccggcgctcgacgatgcccccatcgccgcccgcatgcgtgaggacggcgcgatcatcttcgccaagaccacatgccctgactacggcatgctctcgtccggcctctcgagcttccacccgctcagccgcaatccctgggatgtcagccagaacccgggcggttccagcgccggcgcctcggcggcggcggcggccggctacggcccgctccatatcggcaccgatatcggcggctccgtgcggctcccggccggctggaccggtatcttcggcttcaagcccagccacggccgcatcccggttgacccctattatgtcggccgctgcgccgggccgatgacgcgcacggtcgaggacgcggcactcgccatggccacgctctcgcggccggactggcgcgacggcaccagcctcccgcccaacgatatcgactgggcggatctcgatatcgacctctcgggcatgcgcatcggcctcatgctcgacgccggctgcggcctcgatgccgaggacgaggtgaggacggccgtcgtcgcggcggcgaaacagttcgagaaagccggcgccgtcatcgtgccggtcggcccgctgctgtcgcgggcgatgctcgatggtctcgacaatttctggcgcgcccgcttctggggcgatatcgaggggctgagcgaggagcgccgggagagcatccttccctatatctacggctgggccaagggcggggccgatgttagcggcgtcgccgccgtcaagggcttcaaccagacgatcgagatgcgcaaggcctgcggcgcgctgttcgaggaggtcgacgccgtgctatcgccgaccaatccgatcgtttcctacccggccgaatgggcctcgccgaccaacgatccggcccgtcccttcgagcacatcgccttcaccgttccctggaacatgtcggagcaaccggcctcgtcgatcaattgcggcttctcaaaatccggcatgccgatcggcctgcagatcgtcggtccccgcttcgacgacatgcgcgtcctgaggctgtcgaaagcgttcgaaacctggtccggcggcgtcaccgcatggccaaagccgccggtcagttgatcgggcgacgatagccgttgggctgctcgtagagccagccgatacgctgaacggcctcttcgaaattctcgcgcgtcacggtcatcgtgtggccggtcgcgtgcaggatcgtttccgcatcctccatgatcgccacatgccccttccagaacaccaggtcgccgcgtcgcagttcatcacgcgcaatcggcgtgccaagcgctgacgcctgcatgtcggtatcgcgcggcgcggcgtggccggccatcagcatggaaagctgcaccaggccggagcagtcgatcccgagcccggagcggccgccccagagatagggcgtttcgatgaagcggccggcgatctcgacatagtccgcgccatcaagcgcgccgatgggctgcacatgcttggcgaaaatggcagtcccgtcttcaagcgtcacatagtggttgccgcgcgcctccgcggtgccggcaacggcgacgcggctgcccatcgaaagaatgcttgtatagggtttgcgcagttccggctcgcgatagaggaaggtgcgctgaacggtgacgatatgggtcggagcgggcgatgcctcgctcaccgtgctctcgggtagatagccgacgtaattgtccgaccgcgccttgatccagcaccatccgtcggcgcggtcgagcacggtcacgtcttcgccgaacaagagttcggtatcgataccgatggtcgcgtccggccgcggccgcaggcccacgaccgggaccgcgatgcgcgccggcgtcccgtcggtaaagcgccgggccgtgacctgtccttccagtccgcgctcggcgagatcgtccctgaaggcgtgcaggcggcggtcgagcgtggtcatggtcttgtcctcaaggtcacagccggcgcccgtgctcgcgcacgcggtcgcccagtttttcgagataaagcgcgccgcccacggtgcgcttgatcagcacgttgcgccggtcgcggtcatcgcgcacccggtccaccagccccatctcgcccatcgtatcgagcgcccgggtgatgacgggcttggtgacgttgagttcggcggccaggccgcgcacggtatgcggcggcggcacgagatagatatgcagcaggatcgccatctggcgcaatgtcaaatcgcggtcgtcgtggcgaacctggtcgagcgacacgccgtgccagagccccagcgcctgcgatgcggtcaattcgatcggcacggcccctcccgcattcgttacgcctgcgttccattttccggcacgcacccccgcaacgcaatggggcggctgatctgccgccccacagggtgaataaaattttaacgaacgctctcgcggatgtggtggtaaagcgcccggatcgcctgcgcctcgccgccaccgggcgaatgcggtcgctccgaaggcgcccagccgtaaatgtcgaaatgcgcccagctcctggcatggctgacgaagcgcttgaggaacagcgccgccgtgatcgcgcccgccatgccgcctgccggcgcattggtgatatcggcgaacttggcgcggatgtccttttcgtagccggcgtagagcggcagccgccacattggatcgtcggtctcgaggctcgattccatcaggtcgcgcgccagatccgcgtcgtcggtgaagaagggcggcaggtcgggtccgagcgccacgcgcgcagccccggtcagcgtcgccatgtcgatcatcaggtcgggctcttcctcgtcggcataggagagcgcgtcggcgaggatcaggcgaccctcggcgtcggtgttgtcgatctggacggtcaggcccttgcggctcttgtagatgtcgccggggcggaaggcgttcgacgagatcgagttctcgaccacgggaatgacgacgcgcaggtcgaccttcagcttggcgtccatgatcatcagtgccaggcccatcacgttggccgcaccccccatatccttcttcatcagaagcatcgaggaggcgggcttgatgtcgaggccgccggtgtcgaagcacacgcccttgccgaccagcgtgatcttgcgatggcccttcttgccccagcgcagctccatcagccgcggcgcgtcggcgctggcgcggccgaccgtgtgcaccagcgggaaattgtgcctgaggtcgtcgcccgagattaccgagatctcggccttgtagtgcgcggcaagcccgcggaacgccgcttccagctcgttcgggcccatgtcgttggtgggcgtgttgatcaggtcgcgggcaaggaacacgccggccagctgccgcttgatatcggcggcatcggcatcgcgcgggatcatcaacgtgccggccggctgcttttcggacttgtagcggtcgaaacggtagctcccgaggccgaagccgagcgccagccggttggccgtcagcggtgccgtctcgatatgccagtcgcccgccggcagcgcgcgcgccagcttgccggtgatatagggctgttccgaagggttggagccgagaccgaacagcgccccgccgagatggccatccgatgtcgggatcaggagcagcgagccgctctcggccttgtagcccgccttcttcgcccaatcgagcgcgatcggatcgatcgtcccggtttcgatatgcgccggcgtgacggcgaagatcggcaaggtctggccgcccttggtgttgaagggggtcggtctttcgatgaactggaacgggggcattgtttatccttcaggggcgtccaaagcgcggcgcgatccttcggattcgcttcttgcgctttagatctttgttttatcgcatgtcgttatcgcaaaaccgcttcacacttttgcgcgacatgctccaagaatcgcattttaacgttccgttagggttaacagactattgcttgagcgtagattgcgtcaaaacctttccctgttccgcttctaggtcaggcgccgatttctgatttcaggaaaccgccatggctgctttggtcgatacctctttgaaaacccgtcttttccagtgcacggcgaccgcgatgctggccctgatgctggccggctgcaacaccaccagggacaagatgaccacgggctcgatcccggtcgcgctgaacaagccggtcgagacgatgaacgaccaggaagtgcgctccgccaccgatcgcgtcggccaggcctatgaaaagaacccgcgcgatccggtaaacggcgtcaactacgccaacctcctgcgcatgcagggcagggacgcccaggcgctcgccgtcatgcagcaggtggcgatcgccaatccgcaggatcgcaacgtgctcgccgcctatggcaaggcgcaggccgccgccggccaattgcagcaggcgctcgacaccatcggccgcgcccagacggcggaccgtccggactggaaactcgtctccgccgagggcgccattctcgatcagctcggccgctcgaccgaggcccgccagcgttaccgcgacgcgctcgacctgcagccgggcgagccgtcgatcctgtccaatctcggcatgtcctacgtgctgacaggcgatctcaagagcgccgaaacctatctgcgccaggcagccggccagccgacggccgacagccgcgtgcgccagaacctggcgctcgtcgtcggcctgcagggccgcttccccgaggccgagcagatcgcaaggcgcgagctctcgccgcaacaggccgatgccaacctcgcctatatccgctcgatgatgtcgcaacagaattcctggcagaagctcgccaccagggatgccggggcggcggcgggaagcaccaactagcgcccgctcaggcctgacacaacgagctgcaggccgagccccgccatcacagctccggccgcgcggtcgatccacttcttcgccgccagatagatcaggcgcgggtggcgggccgagaatgccagcgccacgatcgtgtaccatccggcctcgacaagaaagacgccgagcgggatcgccacgaacaattccagcggaatggtcttcggcaagagcgccgcgaagatgctggcgtagacgacgatggtcttcggattgctgacctgcgtcaggaaagcggtcatgaagctgcggccgatggcccggttggccgccgccgtctcgccgatcacaagtggctcgccggcgccgcgccagatcctgtaggcgatataggcgagataaagcccgcccatgatcttcagcgccagatagagccatccgaactgcgacaaaagcgcggtcagcccggccaacgccaggatgctgaacaacactccgcccagccccatgccgacagccgcggcaagcccgtcgatgcgcgagcgcgacacggcgatcctggagacgagcacgaagctcggcccggggctcatggcgccgatcgaaagcgttgcgaggatgctgaggaggacgctgagcgacgacatggcgatggtccgtggttgggggtgacgtcgtcgaatgtcacacggccccgcgcggcggtccatcccaaaaatcggcggctcttagaaccggtcggcgacctggatgccggccggcccgagaatgacggcgaccagaaccggcaggaagaacaggatcatcggcacggtgagcttcggcggcagcgcggcggccttcttctccgcctcgttcatgcgctcgtcacggccttcctgggcaagcacgcgcagcgcctgcgaaaccggcgtgccgtagcggtcggcctgcatcagcgcctgaacgacggactgcacgatcgggatctgcgtgcgcgtgccgaggttttcgagcgccacgcggcgatccggcaggaaggagagctcggccgtcgtcagcaccatttcttccgcgagcgccggagaagcctcgccgagctcctcggagacgcggcgcatcgcggcttcgatcgagataccggattccacgcagatcagcatcaggtccagcgcgtccggccaggcgcgcttgatcgaatgctgccgcttcttcatcttgttggagatgaagatgttcggtgcgtagaagccgacataggcgaagcagagcgtcgcgaggaagcggatcggcgtcggcttgtcgacgaggttgtcgaggccgaacacccagaagatcgccagcgcgaagaagcagaagggcagcaggaagcgcgccaccaggaacatgttcagcgcgttttccgagcgatagcccgccgcgcgcagcttgttcatcgtgttttcgtcgaccagcgcctcgcgcaggttgaagcgctcgacgatctggcgaaccgagcggttgttctgcgtgcgcagcgacgccttgctgccggtcgactcggcgttcatccgcgcgcgttcgcgggcccgcatctgctcgcgttccgtcgataccgccttcatgcgctggttgagatcgccgcgctcgaagaacgggatggcgagcgtgtaaagcgtcgcgaacaccgccagcgccaccagcaccgcgatcagcatcgagggatccgtcagggaactcgcaagatcggacgacatcgcatttcctctgttagatatcgaaattgaccatgttgcgcatgacgaagatgccgatcgacatccagaccgccgaaacgcccatgatcaggtgaccgcgcgggtcggtgaagaggaccatcatgtactgcggcgacgtcaggtagacgagcgtggcgacgatgaacggcagcgcgccgatgatgacggccgaagccttggcttccatcgaaagcgctttcaccttggccttcatcttcttgcgctcgcgcagcaccttcgagaggttgccgatcgcttccgacaggttgccgcccgcctgcgattgaatggcgatgacgatcgaaaagaagttcacttcctgcagcggcatgtggttgaccatgcgcgtgcaggcatcggggacgctgagccccacctgctgggattcgaccacgcgccggaactcgcccttgacaggctccttgccctcgttggcgatcagccggatcgcgtcgttcagcggaagaccggatttgatcgatcgcacgatgacgtcgagcgcgttcggaaactcctcgaggaacttgttctgccggcgcttgatgagaaagccgaggatccagcgcggcaggccgagaccggcgacgatcggcaggccgaggacgaccatggtgggcgcgccgaacaggaatgcggcgaacatcagcacgaagccgaaaatgccgctgaacatgtagaatcggccgggcgtgatcgtgaggcccgcctgcgtcaggcgcgacttcagcgtcagcttcttcttggcgttttcctgctgacgcttctcgaggtccttgaggttgtcctgcatcgacttgcgacgcttggacatttcctggacacggtcgcgcgcggccttgacgttctgcttgtcgagctcggcggatgcgacccggctgacccggctcgccgccttcttctcggtttccatccgtgaaaacagcaggccgtagcagaccgcaccggccgaaacggccacgagcagcacgatacccagcaccagcggatcgaaaccgaacataatcttaatccttcgacttctcttccatctcgtcgagcgccgcggcgagccgcttctcttcgttgtagtagcgggcgcggtcccagaaattcggcttgccgataccggtcgacttgtgccggccgatgatctttccggccgcgtcttcgccctcgatctcgtagcgcatcagatcctgggtgatgatcacgtcgccttccatgccgatcacctcggtgatctgcgtgatgcggcgcgaaccgtcgcgcaggcgcgcggcctggacgacgatgtcgacggagcttgaaatgatctcgcgaacggtcttggccggcagcgaatagccgcccatggcgatcatcgattcgatacggctgaggcactcgcgcggcgagttggagtggatcgtgcccatcgaaccgtcgtggccggtgttcatcgcctgcaggaggtcgaagacctcgggtccgcgcacttcgccgacgatgatgcgttcggggcgcatacgcaggcagttcttgacgagatcgcgcatggtgatctcgccttcgccttcgatattgggcgggcgggtttcgaggcgcacgacatgcggctgctgcagctgcagttcggccgtgtcctcgcaggtgatgacgcgctcgtcgcggtcaatgtagttggtaaggcagttcagaagcgtcgtcttgcccgagccggtaccgccggagatgacgatgttgcagcggacgcggccgatgatctgcaacagcgtcgcgccctcgggcgtgatcgccccgaagcgcaccagctggtcgagcgtcagcttgtccttcttgaacttacgaatggtgagagccggcccgtcgatggcgagcggcggcgcgatgacgttgacgcgcgagccgtcgggcaggcgggcgtcgcagatcgggctcgattcgtcgacgcggcggccgacctggctgacgatgcgctggcagatcgacaggagctgggcgttgtcgcggaaccgcacttccgattccagcgtcttgccgccgacttcgatgaaggtcttgcccgagccgttgaccatgatgtcggcgatgtcgtcgcgtgccagaagcggctccagcggaccatagccgagaacgtcgttgcagatgtcgtcgagcagctcttcctgctcggagatcgacatcgcgaagttcttgatcgtgatgatatcgttgacgatgtcgcgaatttcctcgcgcgcgctttcgccgtcgagcttggcgagctgcgacaggtcgatcgtgtcgatcagcgccgagaagacctgcgccttggtgtcgtaatattcttccgtgcgggcagggcgcttgcgctgcggcgtctgcatcggcggcggcgccacctgctggcgggtctgctcgcgctgtggctcgacgaagacggcgggcgccgacgacggggaaggcgcggcaacgggcggcggtggcgcgatcgtgccgcccgccttgccagatccttcgtttccgcgttttccgaacattacttgttccactcctggtgggctatttgcgcttcaggaggctgagaagactgctcttcttcgccttcttgatcgcgatccgcccggtaacgatgtgcgacagctgcgagaaggtctcggccgtcggtgatttcgggtccatctccgagatcatccggccgctgttggccgccgttccgaacaggttgctgtcgaacgggatgatggcgacgggctcgcattccagcggctcgcagaaatccgaaggactgatctccggacgcttcggcatgcccacctggttgagaacgaggtgaggcggcttgtcgttcggtcgcatcttgcgcagcgcgtcgatcaggttcttggtgttgcgcaggttggcgaggtcgggagaggcgcagatcacaacctcgtcggccgcacccagcaccgagcgcgtccattccgaccaagtgtgcggcacatcgagcaccgtcaccggcgcgctgcgctgcagcacatccatgaccggctggaaggcgtgaccgtcgaaatcgtaggcccggtcgagaagcgagggcgccgccagcagcgacaggtgctcggagcacttcgtcagcaggcggtcgaggaacatctcgtccaggcgctccggggcatagaccgcctcggcgatcccctgcgtcgggtcctggtcgaagtcgatattggcggttccgtagggcaggtcgagatcggcgaggatcgtttcggtcgaaaacaggcgcgagatgccgaaggcgcagttgtgggcgatggtggaggcgccgacgccgcccttggcgccgatgaaggcgatgctgcgtccgagcggctcggcatccggatcgacgaagatcgtcgccatcgccgtcatgatgtcgggcatgccgacgggctggacgatatattcggaaatgccgttgcggatcagctcgcgatagagcgcgatatcgttgtgatagccgacgatgatgaccttggtcgacgggtcgcagacggcggcgagcggcgccagctcgttgagcaggctcgcgctgctgccccgggtctcgagaatgatcaggttcggcgtcggcgcgctggcgaacatgttggctgccgccgcgatgccgccgctggtgatccgcaggctgaccttcgacaggcggcggtcgctgccgcagcgttccatcacccgctgcagctcctcgctttcgcagaaggcgtgcaccgagatgcgcggaagcgggcgcatgttttccagctcgcccatgcgcaccgcctcttcggcctgctgcaggtcggctgtgtgcttgatgtcgtattcaaccgtgctcatcgtcaatcctggcttgatcagaagctgttggcggaactgccgctcatttcttcgaggttcgatgtgcgttcgcgatattccttgatggcggcgttgcggcgcgtcgcgtcgatcggggtcatgccgcgcggcgcgacgagatcctcgggattggcgatctgcgccgcgaggttgttctgtgtcgcgcagccgaaattatagtagttctggttgctgaagtcgttgatcatgtccttcggccactggccgcactgcgacgtcatcgcggtcgtgccgacgaaggtgaggcggatcggcgccgcgtccttggcctcgatcgtcacataggagctgttgacgatcttcgaggcggcgatcccgcgcgcggcaagctcggcgcgcacctggccgcgcagctgccgggcggcgttcgagttcggcgatccctccggcgtcagcaggtagatcgggccggtggcgcgcgcgctgtagttctgcgcgaagccgcggatcatgtcgcgctgcgctgtgttgagccggcgatcggtcgaggcgacggggatgtccaccgattgctcggcttccgtcaccacgatcgggtggcgctgccggtaatcgtcgggaatgccgcccgtcgtcaggtcgtcgcgcgaggcgcaaccggaaagcagggcggtcgcgatggacgcggcgacgatcagcggagtcgaaaagccgcggtaacgggagtcggtcttgatctgggccatcggcgtgtctctgtgttgtgccattgctgatcccgcttcgctcatttgtagatgaacccgattgagccgtggaactgggtgtccgcgaccggcgtcttgccgccgtagaccttgttcacgcggttgaggaagaatgcggcgccgtcgttggtcgggctgaaattgtcgtcgggacggttcagctgattgcgggcgacaggacgcacgagatagggcgtcgcgatgatgacgagctcggtctcttcgcgctgcacggtgcgctggcgaaacagcgttcccagcagcgggatcttgttggcgccgggcgtgccgttcgatgtctgcgcgacgttgtcgcggatcaggcccgccagcgcgatcgagccgccggacggaagctcgacggaggtctcggccgaacggcgctggtaggtcggtgccgaaccgctgacggaaggtgccggttccgacacgttggtcttgatctccaggctgatgcggcccgaggagagcacgacgggcttgaagcccaggctgataccataattgtagggtgtgacggtgacgttgccgtcgttgtcggtcgtcgaatagagcacctgaccgccggagttgaaggtcgccgcctggccggaaatcgccgtcagcgtcggctcggccagggtcttgacgaccttcgcctgttccagtgcgctcagataggtcgagatgtcgtatttgccgatcgagttcttgaacagcgccgccagtccgccgccgagcgtcgaggtcgcggcgctggcattgggtgcgccaagctgcgcgacggtcatgccgctggagttggaaaccagattgtcgaagccgatctgcttcaggatttcgcggcgaacctcggcgatggtcaccttcagcgtgacctggtcctcgccttcgatctgcagcaggttgatcacctgcgactgctggcggttttccgcgaacagcgccaccgatccgtcgccgccgccctggctgctggccgtttccgtgcgcgtggtcgcctcgccgcccttcaggaagacaccggcgagatcggcggcctgcgccgcatcctgcggcgtgcgcaccgtgcctgtcagcacgatgttgtccgagacgatctcgacgttgatgttggaatcgggaatgaagcggcgcaggttgttctgcaatccgctgacgtcgcgttcgatcgcgatgtcgagactgacgatctgctggccgtcggcgccgaagatgaagatgttggtctgcccgaccgtcttgccgaagagatagatgcgccgcgaggagcgcgtcaccgcgtcggccatgctcggatcggaaacgaggatatcgctcgcatcgaccgggaggtcgatcacgatcgccttcttcaggccgagcttgaggctgcgatgcgcgccctggcccgtctgggtgatgctcaccatgccgtcggaagcggcctgcgccgcgccgacaccgatgacgggatcgagaaagcccggcgcgacgccggtgaagccgatcgtcagcgacaggcagcctgccatcagatgtttcatgcgccgtgttgagttgcccatgtccgtctcctctactcggctttctgaggcgcgctgtcgttgacgatggcgcctgacttgatgacctgaacgatggagctgccattgtcgccgctgagcagatagtccgcggccttggtgtccggctcgcgggcgtcggcgaccgagcgcagcgccagcgaaagccgatccgccatctgctgcgcgacggcgagcaccttggtctggtcgggggtcagttccagcgtcgcggtcgtgccgacaacggccttggagccgtcgtccttctcctgaacctgctggtcgatcgccagcacccgcacattgttgagcaccgtttcggtcagatacttgtcgccgttcttttccttgcggaccatgatcacgtcgacgcggtcgttcggcaggatgaagccgccggcgccggtcgcgaccgagatttcggttgcgacggcgcgcttgcccgaaggcagcagcgacgacatgatacggctgttggaatcggcgatcttttcggcccggatcggctcgccctcgaagatcggcatgcgcacgacggcgccctgcagttccttgatcgcttcgggcttgtccgtttccgtgatgaagccctgcaccaccccgccctgcggccaggccatccagtgcgcggacttgtcgtcgagccgtgcgccgacgggaagattggcgctggagacgagcacgttgacggttggttccttctcgaccacctgctggacctgggtcaccaccgatccgccacgaccggcaaggttcatcgccagaacgccggccagaccggcggcgacgacggccactccaaggatcaaaatgcgggcgggcttcatcaggcgttccccagggaatcgaaatattcgttccggagaattggctccaattggtgtaattatagttaacgaaagacttcgatcttaggttaacgagcgcttaagcgcctttacttcaggccttgcagcgcggtcatgaacagcggcgaggacggaaatgccagaaagccgccgatcgcgatggcgatgccgtaggggatcttcttggccatgagaatggagttcggaaccggtaggccgatcgcgagaatcgtgtcggcttgggtccggatgataacgatcgccagagtaattatgccgccaataacaccgacatagcccagaaattccacgatcgccgggttgaggccgaaccagagtgccgacgccgtcaaaagtttggcgtcgccgccgcccatcgtattggtggcgaaaagaatgaagcagacgacgaagacggccagcgcgccggcggcatggctgccgacctgggcaagcggcatgccggtcaaaagcgcgatggcgaagaaagacgcgatgaggatgatggagatcctgttcgggatcgtcatcgtgaacagatcggaaaatgccgcgactgcgaggcacagcgggaatatcacaaagacggaagctgcgatcattctgctatcgatccttaagacaaaaggcccactgttcgagtgagcccatgtttagcgccagacccgttaaggtctggcgtatatcgtgtcgccgaaggcgatatcaggtcggggtcttggaagagattgtgttgcccaggttgctgaacatggtgttcagtttgctgccgagcgtggaagcgcccgtgatgagcgctacggaaatgagcgctgcgatcaggccgtattcaattgcggtcgcgccggattcgtctttcagaaaacggcttacaagcttggtcatgataactcctaactccagttgatgttcagcacgtccgccaactgttcgccgttgatcggatgagcacaacctaacgtaccgctctttcgatcggcttaaaaaaatgggttactaatatgttaacaggaagcagtcgacggtcatggtaagtaaccgtttcagtagttccatagaaatttaaatatcatgcggaagtcactactgaataagggatttctgattggccggcgccatgattcattacctgaccggccaagcgggaagccgactgtatcgtttcggtaccgatgacgcggcgttaacgtctcgttatgggcgggatcgctctcccattaaggtttcatgcaccatttttttctatgcttccggtaagttagcgtcgtgatcgtgagagaatccagatgtcatcgagcggcataaggccagtccttgccagtgttcttgctgccgccgcggcttgcgcaactgtcttcgccccggccttcgcccagcagcagcagatgctcagggtctatatggatcaggcgcgcgtgttgaagctcgatcgccccgtcagcaaggtcatcgtcggtaacgccaaggtggcggatgcgacggtcgccgacgccaagaccatcgtgctcaccggccgcagcttcggcagcaccaatctcgtcctgctcgacgccgacggcaacgccatcctcgatcagagcatcctcgtatccatcgacgaagccaacaccgtgcgcgtgtttcgccagacggagcgtacggttttgtcctgcacgcccaattgcgaacagcatagcgccaccacggccgctggcgcagccgccgcggcaccctgagcaaaacggggctcttttacttgttgttaaatttctgaaccggcttgaaacggaaaatcaacgttcggcacttaaaaatgcatgatcgaagctgtgtcggatgcaggccatgacggaattggatcaaacagcggaacggacggatcggcgccgatgcaggcggtggtggtccattgccgctttcacgcgctcgcgtgacggcgccgcggccatcgaattcgcgcttctcgccattccctatttcatggtcgtcttcgcgatcatcgagaccttcatcgcctttgccggtcaagagctcgtatccaacgccgtcgacacactgagccgcaagatccgcacgggccagataacggccgccaatacggatcgcaccgcgtttcgcaccgccttctgcaaggagatctcgatcctgatcacctgctcgacgacggaggcggcaacgccgagcaagcttttcgtcgatgtccggaacttctcgacattcggggccatcccgacgacgatcccgaagaagacgaccgccgcctattcggacctcgacagctccgcgctccaatacgcgcctggcggtgccggcaccatcaacatggtccgggcctattacaagtggcaggtgatcggtgacctcatccgcccctacatttccaatgtcaggccatccgacggctcctcggcctacttcctgattgtcgcgaccgcggcgttccagaacgagcagtacccgtgatgatgatccgcaacgcaatcgtcaggctacgggccgtgtctcgccgcttcgccggcgatcgcgatggcatgggcgcgatcgagttcgccattctttttccgatcctcgtgatgctctatgtcggcgcattcgagatcaccatgggtctcagcgtcagcaagcgcgcctcgcgcgccgccgccacggtggcggatatcgtcacccagcagcagagcgtgacgaaatcctggcttgccgacatgcccaatgcagccgcggcgatcttcgtcccctacaatgccggcaccacggtgagcttgaagatcaccggcatccagatcgacgcagccgccaacccgaccgtcaagtggtcctgggcgcaggacaacaaccgtccctacacggccaattcggcggtcacggttccggcggatctgaagaaggccaacagctttctcgtacgctcggaactgtcggtaccctacaagctgtttctcttcgcgcccaatctcatgccgaacaacagcaccctcaccatcagccgcacctattactaccggcagcgccagggcgacaacgtcctgtgcagcgattgctgagccggtcgcgttcgcgcccgcgcatttgccatactctcgtctccgttataaggcttgtggcccggcggccggcaatccggcgcgccagcttttgagtgtcgggtgaaacatgccgcgtgcctttctattcgtgatggattccttcggagtgggtggcgcgcccgatgcggccgcctatggcgacgaaggggcggatacgctcggccatatcgccgaattctgcgccgccggccttggcgatcgcgagggcctgcgttcggggccgctgcagctgccgaacctttcggctctcggcctcctgcacctcgccaaggcggcatccggcaagatcccggtgggcatgccgatggccgagaaagtctatgccagcttcggcgcggccagcgaggtctcgcgcggcaaggatacgccctccggccattgggaaatatcaggcacgcccgtcacattcgactggggctatttcccgaccgagggtgatgcctttacccccgaactgatcgaggcgctgtgcaacgccgccgaggttccgggcatcctcggcaattgccatgcctccggcaccgacatcatcgcccgccacggcgaggaacacatccgcaccggcaagccgatctgctacacctcgtcggactccgtcttccaggtcgccgcccacgagaagcatttcggcctcgaacggctgatgaccttctgcgccatcgcccgcgcccttctcgaccggcacaatatcggccgcgtcatcgcccgcccctttgtcggcgaagccaaggcgagcttcgagcgcaccggcaatcgccgcgatttctccgtgccgccgccggaaccgacactgctcgaccggctggtgaaggaaggccgcaccgtccatgccgtcggcaagatcggcgacatcttcgcccaccagggcgtctcgcgcgtcataaaggcaaacggcaacgcggcgctgatggatgcgacgctagacgccatggatgtcgccgaggatggcgatctcgtcttcaccaatttcgtcgatttcgacatgctctatggccatcgccgcgacgttccgggttatgcggcggcgctcgaggccttcgacgcgcgcctgtctgaggtcggcggcaagctgaagcccggcgatctcgtcatcatcaccgccgaccacggctgcgacccgacctggcgcggcaccgatcacacccgcgagcgggttcccatcatcgcctacggccccggccaccgcccgcgcaatctcggcattcgcaccagctacgccgatatcggcgagaccatcgcccagcatctgcgcatccccgccggcccgcacgggaggagcttcctatgaccgcgcatctgaagaaggtcgagctgcactgtcatctcgagggtgccgccccgccggcgctgacattggcgcaggcacgcaagtacaacatcgacatcagcgcccacctcagggacggcgcctatgtctggcatgatttcgcgagcttcctcgaatgctacgacaagatctccgaggtctacaagaccgacgaggactatgcgttgctcacggaaacctatctggccgaactcgccggtgtaggcacgatctatagcgagctcatcgtctcgcccgatcacggcaagcgcatcggcctcggtgccgatgcctatatcgaaggcgtgtgcgagggcatccgccgcgccagggcggcgtctggcatcgaggcgaggctgatcgtcaccggcgagcgccacttcggccccgacagtgtcatcggcgccgccgaatacgccgcgagcgctcgtaacccgctcatcaccggcttcaacctcgctggcgaggagcgcatgggccgcgtggcggactatgcgcgcgccttcgacatcgcccgcgacgccggcctcggcctcaccatccacgccggagaggtctgcggcgccttcagcgtcgctgatgcgctggatgccgttcgcccggcccgtatcggccatggcgtgcgcgcgatcgaggatgcggacctcgtcaggcggctggtcgatcagggcacggtgctggaggtctgcccgggctcgaacatcgcgctcgaggtcttcccggatttccagtcgcacccgctgcgggcgttgaaggaggccggcgtgcgcgtcaccatcagttccgacgatccgcccttcttccacacctcgctcaagcgggaatacgagctcgcttcctccgccttcggcttcagcgacgccgagatcgacgcgatcacccgcaccggcatcgaggccgccttcgtcgacgaggccacgcgtagcgagcttctggccaggctctgatccgtcccgatccggtgagactggatcgtgagattggggatcgccgtcgcaatttgcccgccgctcttgcggcggagacgaattccgtggaagaaacatgctataagaacagctaaggaaagggctcggccatggacggcgtaacggtcatcgatcatccgctcgtgcagcacaaactcaccatcatgcggcgcaaggaaacttcgacgggcagcttccgccgcctgttgcgcgagatttccacgctcctgtgttacgaggtgacgcgcgatctcgagctgacgatggaaaccatcgaaacgccgatgcagacgatgcagtcgccgatcctcgaaggcaagaagctggttttcgtgtcgatcctgcgcgccggcaacggcctgctcgaaggcatgctggagctggttccctccgcccgcgtctcgcatatcggcatgtaccgcgatcacgacacgctgcagccggtggaatactatttcaaggcgccggaagcgctcgacgagcgcctgatgatcgtcgtcgatccgatgctcgccaccggcaattcctcgatcgccgccattcacaagctgaaggaacgcggcgcgaccaacattcgcttcctctgcctgctggccgcccccgagggcatcagcaacttcaaggaagcccacccggatgtgaggatctacacggcctcgatcgacagccatctcaacgagaagggctatatcatgcccggcctcggcgatgccggcgaccgcatgtacggcaccaagtaattaacgatcggtttaccattcgaaatgttacatggggcctggactatgtttccaggccttatctccttccgtcattagcaacttttcagcaattgtggcttagctgctaaagatacggccgcgcatgatgcacggtttatacaggaaggatttctgtttccatgctcgtgcgtacagtcatattcgcaagcatcgccgcggtgcttgccacacaggccccttccttcctcggaagcgcgcctgcgcggccggaaggcccggtctctgccaatttcatctccggtgccgtcgatgccacgcccgccaccgccgtatcgggcaatggcggcggcatccgcctcaaggccaatgatcaaggccactacaccggcgacttccgcatcaatggcaaatcggtctccggcatgatcgacaccggcgcgacctatgtcgcgctgaacgagaccatggcccgccgtctcggctacaccgccaaccagctcgatttccgctattcggtcaacaccgccaatggccagaccaaggcgtcgcacatcatcctcgaccgtgtcgagatcggcggcataagggtgcgcgacgtcgaggctttcgtcctcaaggacgaggcgctgtcctcgacactggtcggcatgagcttcctgaagaagctcgcttcctattcggtggccgacggctcgctcagcctgaagcagtaggcgatcagaaacgcgatgaaatgacgggtggcagtgccggcgcgctgtcgccgatcgtgtagttcgcctgaagcgacgcggcggccgtgtccgccgcactttcgcttgcggcatgcaccaaggcgatcggatcgccgcgctcgacgcgcgtgcccagcgcaacgatatcgctgaaccccacccggtggtcgatccggtcatcgggatgccgtcgcccgccgccgagatcgatcagcttcatcccgatgtcccggctgtcgcaggccgcgagccagccgccgcggatcgccgtcactggccggatgacgggggcggtcgggagatggctgtccggcttctcgacgaggtcggaagggccaccaagcatatgcgccatgcgcccgaatatctccgccgccttgcccgatgacagcgcctctgtcgcccgcgcctcgccgtcttcacgcgagaccgcgacgcccgactggacgagcatctcggcggcaaaggcaagcaccacctgttccagccgtgtgccgctcttttcgcccttaaggaacgccagcgcgttgcggatctccagcgcgttgcccacggcatccgccagcggctggttcatgtcggtgatgacggccgaggtcttcagcccggcaccattggccacctcgaccagcgatcgcgccagctgctcggcttcgtcggacgaggccatgaaggcaccgttgccgaccttcacgtcgagcaccagcgtctccaacccggccgccagcttcttcgacaggatcgatgcggtgatcagcggaatggaatccaccgtcgccgtcacgtcgcgcaccgcgtagagcctgccgtcggccggcgccagcgccgccgtctggccgatgatggcgcagccggcctcgcgcaccaccttgcggaacagcgcggtgtcgggggtaaccgtatagcctggtatggattccagcttgtcgagcgtcccgccggtatggccgagcccgcgtcccgagatcatcggcaccaccagcccgcaggccgaagcgatcggcgccagcatcagcgagacgttgtcgccgacgccgccggtcgaatgcttgtcggcgatcggccggtccagatcgctccagtcgagcatatcgccggagcgggccatcgccatggtcagcgaaacggtctcctcgcggcgcatccccttgaaccataccgccatggcgaaggcgccgatctgcccctcggagagcttgcccgccgcgagcgccgcgatgaacgcctggatatcgtcgtcggacagcaccgcgccgtcgcgcttgcggcggatgatctcctgcgggatcatctcagtagctcgcggcggtcgccggtgccgattgcgtgccggaaagaaccgcaaggatatcgtcgagcacgccggaagcaccgaagcggaaggtcgagggcattgcccagtcgggcgtcatgatcgtctcggcgaggctgagataaagtgccgcatccgccaccgaggcgataccgccggcgggcttgaagccgaccttgcggccgctctggcggatggcccgaagcatgatgtcggcggcctccagcgtggcgttgacggacaccttgccggtcgaggtcttgatgaagtcggcgccggcctcgatcgccagttcggaggcgcggcggatcatcgccgcatccttgatctcgccggtctcgaggatcaccttcaaaagcaccgcgtcgccgcattcggcgcgcacggcggccaccatgtctgtgacggcccggccgctgccggcgatgaacttgcgataggggatgacgaggtcgatctcgtcggcgccatcggcgatcgcctcgcgcgtctccgccgccacgtcggcgacctccatgtcgccggaggggaagttgacgacggtggcgatcctgacgggatggccgctgccgaggatcgagcgcgcatgcgccacgaagcgcggccagatgcagatggcggcactgttgccgtagggcgtctgcgcccgcgcgcacagggcctcgatctgcgcctccgtgcagtcgtccttgagattggtgaggtcaagcagcgacagcgccaccgccgccgtttccttcagcgagtgattgctcatggtccatttcctccggccgcgatcatctctttcaggatggcggcaagacgggcaccgccgatgggcgccatctccttggtttcgtcgtggctcagttccgaaccggtcattcccgccccatagttggtgataacggaagcagccgcaaccctcatgtcgagcattcgggcgatgatcacctcgggtactgtcgacatgcccaccgcgtcggcgccgagaatgcgcgccatgcggatttccgccggcgtctcgaagctcgggcccgaaaaccacatgtagacgccctgcgaaaggtcggtgccggtcttctccgccgcccgccgcatcgcctccgcgagcccggcatcgtaggcgttggtcatgcccacgaaacggcggtcgctctcctcgccgatcagcgggttgatgccggaatagttgatgtggtcggtgatccgcatcaccgatccgggcgaaagatcctcgcgcagcgatcccgccgaattcgtcaggatcagcgcttcgacgccgagccccttcagcacctcgatcggcagccgcatggcactcgcgtcgcccttctcgtagaaatgcacgcgccccgacagcatgaccacgggcacgccgccaagcgtaccggcgaccacttcaccggcgtggcccgagacggcgctgacgggaaagcccggtatatcctgataggcgatcctgaccgcatccttgagctccgccaccagcgagccgagcccggagccgaggatgacgccgtagcgcggcgacagcccgccgagccgcgccttcagcaggtcgagcgccgcctgcatcagagttccgtctcgaagctgaagggaagcagttcgtccatggtcatggtcttctgcacgcctgcttcgtcgcagagatagatcctggtctccttggaggcgaattccgagatcttctggcggcagccgccgcagggcgggcagagcggcagcttctcggcgatcacggccatctcgacgatcttcttcgccccgcccatgatcatggcgctgatcgccgtcggctcggcgcaccagccttgagggaaggagaggttctcgatattggcgccggtatagaccttgccatcctcggcgcggatcgcagcaccgacggggaatttcgaatagggcgcgtgggcgaacgccatggcgccgcgggcggcttcgaagaggtcgtgggacatggtcttagcgctccttgacatagggtgtgccgccggccttcggcgggatggctttgccgatgaagcccgcgagcagcacgcaggtgaggatgtagggcagggcctggaagatctgcaccggaacctcgccgatcccggggatcggcttgccctgcatgaaattgccgagcgcgtcgaggaagccgaacagcaggcaggcgaacatgacgggcaccggcttccacttggcgaagacgagcgcggcgagcgcgatatagcccttgccggccgacatgtccttgatgaacgccgccgattgcgcgatcgccagataggtgccggcgaagccgcagagaatgccggcgcagacgacggcgcggtagcgcagccacgtcaccgagatgccggcggtatcgacggcaccaggattctcgccgacggcgcgcagacgaagaccgaagcgcgtgcggtagaggatccaccacgagagcggcaccgccaggaaggcgaggtaggtgaggatgttgttgccggagatgacgttggcatagagcggcccgatcaagggcacctcgcgcatgatgtcggcgcccggaagcgtgatcggcgtgaagcgggcgtcgcccgcaagctgcggcgtgcgtccgccctggccgaaccaggcctggccgaggacgatggtgatcccggccacgaagaagttgatcgcgacgccggagatgatctggttgccgcggttggtgatcgaggcgaagccgtgcacgaagctcaatgcgaccgagcagacgatgccggcgccgagccccagccacggcgagccggtgagataggcgacgcaggcggcggcgaaggccgagcccagcatcttgccctcgagcccgatgtcgaacacgccggcgcgctcggaaaacaggcctgccagcgccgtgaagatcagcgggatcgacaggcggatcgtggagctcagaacgctgatgaagatgtcgtaatattccatcgtcgctctccttaagcccgcttgaactgttggtagaggcgcaccatcgccggccggtacatgtattcgagcgcgcctgcgaacaggatcaccagaccctggatgacaaggatcatctcgcgggtgatgttgggcatctcgaacgagatccagtcaccaccctggtagaggatgccgaacaggatcgccgagagcacgatgccgacgggatggttgcgccccatcagcgacaccgcgatgccgacgaagccggcgccgccgacgaactcgacctgcaggcgggccgacgagcccatcacggggttgagcgccatcatgccggccagcgcgcccgaaagcagcatggcgatgatgacgatgcgcgcatagggaatgccggcgtaggccgcggcactcgggctgacgccgagcgtacgcatttcgaagccgagcttggtgcgccagatcagcagccagacgaaccaggccgccaccagcgcgatgatgaaggagacgttgaagggcgcagcccccagcttggcgccgaacatgtccatgatccagccgagcttcggcaactgtccgccttcgaggaaggtgcgggtttccggcgccatcttgcccggcacgatcagcacgtgcaccaagagatagaccatcagcgccgcgccgatatagttgaacatgatcgtggtgatgacgatatggctgccgcgcttggcctgcagccaggccggaatgaaggcccaggcggcgccgaacaggccggcgccgatcaccgcgaccggcatggtcacgtaccacggcacgaacttgtcgagcgacagcgccaccagcgcgcagccgagaccgccgagataggcctggccctcggagccgatgttgaacagcccggcatggatggcgaccgccaccgaaaggccggtgaagatgaagctggtggcgtagtacagcgtaaagccgatgccttcgccgctcccgagcgcgccttcgatcaagagctgcagcgcgccgagcgggctctcgccgatcagccagacgacgaagcctgatatcaggaaggcggtgacaaggttcaggatcggaatgaggccgtagttgatccagcggggaaggggaatggaagcagtgctcatcaaggcctcacgcggcaatgccggccatcatcaggccgagggtctgttcaccggcatcgggcgtcttctcaccgacgacatggccggcgaacatgacaaggatacggtctgaaagggcgcggatttcgtcgagctcgacggagacgagcaggatcgccttgcccgcgtcgcgcatctcgatgatccggcggtgaatgaattcgatggcgccgatgtcgacgccgcgcgtcggctggccgatgatcagcgccgtcggatcgcgctcgatttcgcgggcgacgacgatcttctgctggttgccgccggagaagttcgcggtcttcagccgtgggttcggcggccggatgtcgtatttctcgatcttctccatcgcgtccttgcggatcgcttcgagatcgagcagcgggcccttgctgtattcaggcttgcggtgatagccgagcaccgagttctcgtattcctcgaacttcagcaccaggcccatatgatggcggtcctcggggatatgcgccaggccgagttcgcgcagccgcgccgggtcggccttgtcgatcgtctcgccatcgagcaggatctcgcccgaatgcggcttgcggatgcccgcgatggcttcgagaagctccgactgcccgttgccggcgacaccggccacgccgacgatctcgccggcccgcacgtcgaacgacacgttgtcgaccatcacgacgccgcggtcgtccttcaccgtcagattgcgcaccgacaggatgaccttgccgggattggcctcgcccttctgcacgcgcagcagcacgcggcggccgaccatcagctccgccagttcctcgaccgtcgtctccgcggtcttgcggctggcgaccatctcgccacggcgcatcaccgacaccgtgtcggtgatcgccatgatctcgcgcagcttgtgggtgatgagaatgaccgtcttgccctggtcgcgcagcactttcaggatccggaacaggtggtcggcctcggccggcgtcagcacgcccgtgggctcgtcgaggatcaggatctcggcgccgcgatacatggccttcaggatttcgacgcgctgctgcaggccgacggggagctgctcgatcagcgcatccgggttgacctcgaggccgtattccttttccagccgcttcagctcggcgcgagcggacgccacgcctcttgcgagcagcgctccgccctcggcgccgagcatgatgttctcgagcaccgtgaaattgtcgaccagcatgaagtgctggtgcaccatgccgattcccgtcgagatcgccgtctggctgtccttgatcgtcacggcctggccgttgacccggatctcgccctggtcggcgtggtagaagccgtagatgatcgacatcagcgtcgattttccggctccgttttccccgatgatgccgtggatggaccccttggcgaccgtgaggttgatgtctttgttggcgtggacggcaccgaatttcttgtcgatgcccacaagttcgatagcgggcgtgtcagtcacagcaggctccagatacgaaaagggcgtatggcggaaatcacgtccgccatacgcccaatttcaggcgcggatcacttcgggcaggagttgtccgaggtgtaatcgtgaaccttgacggttcccgcgatgatatcagccttggccttttcgacggcggccagcatttcaggcgtgatcagcgccttgttgttgtcgtcgatggcggccgacacaccgtcttccttgacgccgagcgactgcacgccggcactgaacttgtcgttcttggtgtcggtgtaggcgttgtagacggcgaggtcgacgcgcttgaccatcgaggtcagcaccgagcccggatgcaggtagttctggttgctgtcgacgccgatcgagaacttcttgttgtcggcggccgtctgcagcacgccaagaccggtggcgccggctgccgcgtagatcacgtcggcaccctggtcgatctggttcttggtcagctcaccgccgcgaaccggatcgttccaggccgcacccgtcgtgccggtcatgttctggaacacctcgaccttggcattggcggcgcgcgcgccctgcgcgtagccacattcgaacttgcggatcagcggaatgtccatgccgccgacgaagccgaccttgccggtcttggatgccatgccggcgagaacgccgaccaggaaggagccttcttcttccttgtagacgaccgagcggacgttcggcttgtcgaccacggcgtcgacgatgatgaacttggtgtcggggaattcagccgcgaccttctcgatcgccgaggtccatgcaaacgagacggcgacaacggggttgaagccgcggcttgcgaaattgcggatggcctgttcgccctgggtgtcgccggtcggctcgaaatcgcggtaggcgataccggtttccttcttgaactgctcggcgccattgtaggcggcttcgttgaatgacttgtcgaactttccgccggtgccgtagaccagtgccggcttgacgtcggcagcaagcgccgtcgtggacatggcagccacggcgaggagagcgagaagggattttttcattgtgcagccctgttgttgctatttgttaggggtcctcccgcaagcccgttttcaggcatgtctgcggaaccgccgacctccccccggaggctggcttgccgcatccttgcatggcgtgaaaaaaaactcacgggaaatttttcgactggtaaaaatttgacgacactgcgtaaaaaccggccacggcaatctttttttgcgcaaaatcaacgccaaaatgcgatttttctagccagtcgagacgtcgccattcgctgccggtcacgccgggtccgccctggatatcgtgcgcgcattcccgcttaacggctgtcgccgccacgtcaggtagcaaaaaagcgggcaatggacgcctcgatcacgccgtcgcctatgccgcgaaacgccccgccaccggcggcttcttgtaccccgccatccacaggatcagcgacagcacgaggaataccgcgaaagccggctgcatcatcagccactggaagcccagcgtgtagacgcgcggatggatatagtaggcgacggtcgattgcagcgcctcgaaggacgatgcattcatgtcctgccaggcatcgcccatcggcgtgatgaccaccgaggatgccgccaccgactgtatgctgtcgatcgtcccggcgatcaccgcgactgccagcgcgatcaggctcgccaaacgcaaaaggaaacgcattactctctccgccaccgatccgccgggtttcacccggccagttgcgcccactctccacgacatcggacactagtgccccgccgccggaaccgcaatggaccgctttccggcacttttgctggaagaagtcaaaaaactgttagatttaggttgatccctgaaaattcctcggtatatatcgcgccgttccaacgatttgcgcccaagggtccaaatcaagcagcaggacaggtggccgagtggtttaaggcgcacgcctggaacgcgtgtgtacgtgaaagcgtaccgtgggttcgaatcccaccttgtccgccattttatttttttcgaatttttgacagaaattttagcctcgaaagagctgatttatgaatggaacggtcgcgcaattggctgcgctagcttgtcacggcaacgcgcatttaaagaatggtggcgttccgtcgttttttccctccaattcgacctgcaagttttgcgacgagataagtttcgtcgttttcaaaagaagtttctttggcaaggttaaagaaaaggaaattgcgtcgacccccgatgattggttcgaatacctcacgggcaagaatgccaaatcgctcaagttggcttactcgccgcaaagcagctcagctaccgatgatagaatgtctgccggcttcgttggcggcggtggacgttggggaatagaggttttgctgcccaacgataaaagcgagtattgggtagcgcgctggcaggtttggaatcaaaacgcgccggaacgaagaatttggcgggttacttacgcgatggtctcgactgggaagacacccagggatggggcgctgccaattcgcaatgtcacagatgctcttgagagaagcctagaggaaattcatagcttttccgaaagaaataactgcggtggatttacagaggcttttgcaaaagcactggacactttgcgttcggggaacaagcacggctatcatcaggacatatctcgagatggtttgctgtccaaagaagccgaattgatactagacgcgtgtcaaagtgcatcggtattcggcggtatgggatcatggaatgacatgggtttcgatggcgccgagcaggccgaatacgaacgcgtgtctgaccaactattctgctacataaacaatgcaattgttgcggcagtaaattcagcctgatcagcaatcatgcgcggcatgctgccttgcatccgcgccaatatcctgtaaacgcagcctcggaacgcgaccgccgttaacttaagaacggggtcgggcggcagattgacgtcacgtcgctgtcacgagatcacgtggccgttccctcgttccatacacatccgcagtaaaaatgcgtctcagaccagcacggcctgctcgaccagatcctcggtgccgaagaatttgaggtagcgctgcacctcttccggttcgcccgtggccttttgcggattgtcggagagcttgacggccgggcgcccgttggcgtcgctcaccttgcagacgatcgagatcgggttgaggccggagatctcggtcggcgcgcagccggcgaagtcgttggtgaggttggtgccccagccgaagctcatgcgcacgcggccctcgaaatgcttgtaggtgtcgatgatcgcatcgacatccatcccgtcggagaagatcagcatcttctgccggggatcgcgccccatcttcttccaccactcgatgatcttctcgccgccctcgatcggcggcgcgctgtcggggcgaaagccggtccagtcggccacccattccggcgcgtcgcgcaggaaggccgccgtgccgaaggcatcgggaagcacgatcagaaggttgccgccgtaaagcgtgttccagtcgcgcagcaccttgtagggcgcattgcgcagctcctcgtcggtctcggccaaggcggccgccaccatgggcagctcatgcgcgttggtgccgacggcctcgagatcgttgtccatggcgagcagaacgttgctggtgccggtgaagcccgggccgatgccttccttcaaggcctcgacgcaccagcgctgccagaggaagctatggcgccgccgcgtgccgaagtcggagatgcgcaggcccggcaattcccgcagccgctcgaccttctcccacatgcgcgccttggcgcgggcatagagcacgtcgagcgtgaacggcccgagcgcgcgcagcgccgagcgcgagcgcagttcgttgatgatcgcgagcgccgggatctcccacatcgtggtctccttccaggagccgtggaaatcgagccggtactgcccgtcgcgcttcgaaagctcgtattccggcagctggaaatgcgacagccaggccaggaattcgggctcgaagatctgcgcgcggccgtagaagctgttacccgccagccagatcatctctttcttggagagcctgagcgtgcgcgcatggtcgagctgcgcgcgcagttccccttcgtcgatctcctcggcaagcagcacgcgcttggtgcggttgatgacggtgaaggtggcgttgacctctggatagagcttccagatcatctgcagcatcaacagcttgtagaagtccgtgtcgatcaggctgcggacgatgggatcgagtttccaagcgtggttgtaaacgcgccgtgcaatatctgtcttcgccatcgaatccaccctatccaatccgggtgcgggcgccgaaaccggcgcaggacaaccggcctgtgctgtttcttatcgaaaactcggccggcaatgtccagaacaaatgcctgcgcggacggacacgcgcggacaaaagcaccctctcgcatggttttgcggagggtgccttccattggtacgttccagtgcgcgggcctactgcgcggtcgccggggctggcggctggctgcccggggtcgcgggtgtctccgtcggaacggcggtgccgttctgcagcgaaggcgagggcttggcgggcgccggctgctcggattgaagctgctggccgggctgctgcggcgccacgtcggttgcctgacgctggccccagatttccaccggaatccagaccagaaaggcgaggaccagcgccacgaccagaagcgtcaggatacgccggccggtgtggccctgctttgccttgacgggatcgatctgctgctcttcatgcagcgcgccatcggtctttacccattctcttcgcatctgctgcgccatgcgtgcctccttgccagatgtcgcatgctgccgggcatgctccaaaaccactggaaacaaacggttacccggcacgatggttccccggggggcgcattccgcttcagtagccgcggccgcggtcgaccacatattgcagcggttcgccgcgttcgaagcgggcgatctgccgctccacatgccgaaacagcgcgttctcctccgaactcgcggcatcatgcggcgtgatgaacacgtttggcagatcccagagcgggctttccgaaggcagcggctctacctcgaagacatcgagggaggcgccgccgagcacctcggtctcgatcgccgagacgatatcggcttcgacctggctcttgccgcgcccggcattgatgaacacgggcttttgcagcgcgccgccctggcgcagcctggaaaacagcgcggtgttgtagaacttcgttgtctccggcgtcagcggcagcaggccgacgaggatgtcggtcttcgaaagaaaggcatcgagcccgcccgcgtcgaaggtctcgatgccctcgatctgcttggctgtgcgcgaccagccgatgacgttgaagcccatgattttcagcttcttgacagcatcctgaccaagcacgcccagccccatgacgccgacagtcagttccgatgcctccggcgccacgtcgcggccccattcgcgccggcgctgcagccggtcgtgcttgctctgcccgcgttgatgcatcaggcactgcatgacaacccattcgctcatccgcgtcgtcaggctgtggtcgacgaagcggacgatcggcacgtcgggaaggccgggcaggttcatgaagctgtcgacgccggcgccgccggaaaagatcaccttcaggttcggcgcccgcgaaaacagatcggcatccggcttccacagaagcgcgtagtcgagaccggaaagatcccggctccttgtctcgggatcggcgacattgacgctgccgcgatcgagaaaggcggtcttcaggatgcgttcgacggtatcgggattgaacttgaggtcgacgagaatgggggctggcatggtgtccgggctctgatgtcgctagtgttgcactgcgggcgttggccgcgcctcgatgttgaaggccgccgccatcagcgccttggtgtaatcgtccttcggcgcgctgaagatatcggccgatggcccctgttcgacgaccttgccgaagcgcatcacgatcacctcgttggccagcgccttcaccaccttgagatcgtggctgatgaagagataggcgaggtcgtgcttctgctgcaggtcgcgcaggagatcgaccacctgcgcctgcacgctcatgtcgagcgccgatgtcggctcgtcgagcatcacgaaacgcggcttcagcaccatggcgcgggcgatcgcgatgcgctgccgctggccgccggagaattcatgcggatagcgccagcgggtggtgggatcgagccccacttcctccagcgcccagcagacgcgccggtcgcgctcctcgtaggaaagtccgcgctcatgcacctgcagtccctcggcgatgatgtcgcccaccgacatgcgcgggctgagcgagccgtacgggtcctgaaacaccacctgcagctggttgcgcagcggccgcatctcggtgaatgaatagctggctatatccttgccgacgaagctgatccgcccctgcgaggagatcagccgggtgagcgccagcccgagcgtcgtcttgccggagccggattcgccgacaacgcccagcgtctgcccggcgcgcagcgacaggtcgatcccgtcgaccgctttcacgtggtccaccaccttgcgcatcagccccgccttgatcgggaaccagaccttgatgtccgatccctgcatcacgatcggcttggagctgtcggcgagcggcggctcgccgcgcggctcggaggccagcagatggcgggtatactggtgctgcggattggtgaagacctcctcgaccgtcccggtctcgacgatcttgcccttggtcatcacgcagacccggtcggcgaacttgcgcacgatgccgaggtcatgggtgatgaacagcatcgacatcccatgctgacccttcagctgccgcaggagttcgaggatctgcgcctgcacggtgacgtcgagcgccgtcgtcggctcgtcggcgatcagcagttccggccggttggcgagcgccatggcgatcatcacgcgctgcctctgcccgcccgagagttcgtgcggataggccttcagccgcttttccggctcgcggatgccaacctggttgagcagctcgagcacccgcgtgcgcgccgcctgtcccttgatcccctggtgcaactccaagatctcggcgatctgcttctcgatattgtgcagcgggttgagcgaggtcatcggctcctggaagatcatcgtgatgtcgttgccgcgcacctcgcgcagcaccttgtcggatgccttgagcagatccttgcccttgaacaggatttcgccggagggatggctggccgaggggtagggcagcagccgcaggatcgaattggccgataccgatttccccgaaccggactctcccaccagcgccaacacctcgcccttgttgacgtcgaaggaaatgccatcgacagccacggaactcgcgccaccctggtggaaggcgacggaaagattgcggacggacagcaagggttcggacatcaggacaggctctcgatcagggaggtcagggtggcgtcgtcggggcggagaacaacaagaggagcagcggtcgcatcttctggcaagctgtacggcccgcggatgcccagatcggcgctcagaaaatgcgagcagccgatttgcaaggccgtcgcgacatgaatcgcgtcaggcagcttcagattgccgctccctgcacgcatcattgccgcatagcgaagaattgtccggtccaccggcaaaacgcttagccattcgctggttttcagcatgtcatcgtaaaccgccaaggcttcatcatctctcgccttatagggtttcacgatcagttcggaatacgtaagttcgctggtggaaaaataaggttctgattgtttgtcccgcgccaacataagcagggtctcgagctgtcgggtcgcggggccaccttcgaataggtcgatgaagatattcgtatccaaatatagatgtgacggcgggttcattcatcgtcccattcgtcacgcaaagcccggatgcgcgcaacggcctcttccgtagtgacgccttctgggtggtgcctctgatattcccgaattctttcgataagctcggccgcggtcatcggctttcgaggttcgtcttgggactcgcttaggccagggtaaaggttgcgatcgaggctggtttttccctcgacctcgacgacaacacgcaccgttgcatcatcggcgaatccctccctcagatcctcgggaaggttggcgacgggataatgatcacgcacgatcttattcatgacggtcacgctccaaacgttgcgtaaaacacaactctacccgcaaacccctgccatgacgaggccgccctcatccgaaggtctttctcggatcgaacgcgtcgcgcaccgcctcgccgatgaagatcagcagcgacagcatgatcgacatcgcgaagaacgccgtcagccccagccacggcgcctgcaggttggccttgccctgggcgatcatctcgccgagcgagggcgagccgggcggcatgccgaagccgaggaagtcgagcgaggtcagcgtggtgatcgacccggagaggatgaagggcaggaaggtcagcgtcgccaccatggcgttcggcagaaggtgccgccacatgatcgtgcggttgctgacgccgagcgcccgcgccgccctgacatattcgaaattgcgcgctcgcaggaactccgcgcgcaccacgccgacgaagccgacccacgaaaacagcagcatgatcccgagcagcacgaagaagcccggcggcaggatcgcggcgatgatcaggagtatgtagagcaccggcatcgacgaccagatctcgatgaagcgctgcagcagaagatcggtccagccgccgaaatagccctggatcgcgccggcgctgacgccgacgatggccgagcagatcgtcaggatgagcccgaacagcaccgagatgcggaagccgtagatcacccgggcaagcacgtcgcgcgcctggtcgtcggttcccagccagttgagattgttccaggtgcagttggggtcgttgacgccttgcgggtagccggagcatcgctcctcggcgcccatcatccagaagggcgcggtcggcgccgaatgcgggatgttggagttgaccgagcggtaggaatagcggatcggcggccagatcatccagccattggccttgatctcgtcggcgatcacgtcggagcggtagtcggtctcggccaggaagccgccgaacttctcctccggatagttgaccagcacgggaaacaggatctcgcccttgtaggaggcgatgatcggccggtcgttggcgatgaattcggcgaacaggctgagcccgaagagaagcagaaacagccagagcgaccagaaaccgcgccggttggccttgaagttcttccagcgcctgatgttggtgggcgagagcagccccttgcgcggcggcttcacgggcgtggcggtcgcgggctttgcggcggtgtccatcacacgtccctccgctcgaagtcgatgcgcggatcgatccaggtgtagatcaggtcggagatcaggctgacgaagaggccgagcagcgagaagatatagagcgtcgcgaacacgatcggatagtcgcggttgaccaccgagagatagccgagccgccccagtccatcgagcgagaagatgttctcgatcagcagcgagccggtgaagaaggcggagatgaaggcgccgggaaagccggcgatgatgatcagcatggcgttgcggaacacgtggccgtagagcaccttgcgctcgttcagccccttggcccgcgccgtcaccacatactgcttcttgatctcctcgatgaaggagttcttggtcagcagcgtcgtcgtcgcgaaagccgccagcgacagcgagatcagcggcagcgtcaggtgccagaaatagtcgagcggcttctgccaccacgcaagctggtcgaaattgtcggagacgagaccgcgcagcggaaaccagtcgtagaacgacccgccggcgaaaagcacgatcaaaaggataccgaacaggaagctcggaacggcatagccgatgatgatcacgcccgaggtccatacgtcgaaggtcgagccgtccttcaccgccttgcggataccgagcggaatggagatgccgtaggagaagatcatgatccagatcccgagcgaggccgagaccggcagcttctccttgatcagatcgagaacggacgtattgcggaagaagctctcgccgaaatcgaagcggatatagttccacatcatctcgccgaagcgcgtcagcggcggcttgtcgaagccgaactgcttctcgagcttcttgatcagctccggatcgagcccctgcgcgccgcgatatttcgagccgccgtcatccattccggagcccatcaggtcgccgccgccgcccgaaaggcgggcgtcagccccctgcgcatcgccggtcagctgcgcgatcacctgctcgacgggcccgcccggcgcgaactggatgacggtgaacgagatggccatgatgccgacaatcgtcgggatcatcagaagcaggcggcgaaggatataggctcccatcagtaagcggcctccggggagttctgtcgtaggctgtccagtctatcgccgctcaatcgtcaagccttcctttgccgttccgtcccggcgctgatcatcgtccgaagtgattcggctggtccatttggagcccagccgccgggccaatgcaagcccgctcacttttgcgcggaagacgaccaccagacatccggaaaaccggtcgagtaggccgggtactcggccggccgggtaatcgtgttccagtaggtgatcgactgcgtgtcgcggtaaaacagcggcacgacataatgccccgccatcagcacccggtcgagcgccttgatcgccgccacctgctcgtcgcggttgggcgcgaagatcaccatgcggatcagcgcgtcgacggcggggtcggaaatgccggcatagttgcgcgagccctgctggttggcggagccggagccccagtagtcggcctgctcgttgccggggttcagcgtctgcgcccaaacgttccagatcacgtcgtaatcgaagctgcgcacccggttggtatattgcgaggcgtccacggtgcgcacgcgcacatcgatgccgatcttcttgagattgttggcgtagggcacggcccagcgctcgaataccgggctcgacagcaggatttcgaagctcatcggcttgccggtcgcggtattgaccatacggttgcccttgatctcccagccggcctccttgagcagcttgatcgccgtgcgcaggttgtcgcggctcttctgcgggtcgccgccaacggggttcgaataggccttggtgaagacgtcgggcgaaagcttgtccttgagaccgttgaggatctccagttcgcgcccctcgggcaggccggacgacgcaagctcggtgttccagaaatagctgtcgatgcgcttgtagctgttgaaggcgacggtgcggttcagctcctcgaagtcgaagccgtagttcagcgcctcgcgcaccttctcgtccttgaagacgtcgcgccgcgtgttggtgaccatcgcctgcatgatgccggtggcgcgcagcgcgttcggcacgtcctccttcttcacgcgcccttccttgacggccggaaaatcatagccggtcgcccagcgcgccgcgagcgtctcctgccagaagtcgctgttgccggccctgaaggcctcgaactcgacgtcccggtcgccgtaataggtgtaggtgatcgagccgaagttgttctgcccgacattgacgttgagatccttgccccagtagtcgtcgcgcagctcgtagcggatcgtggcgcccgccgagaaggcggcgatcttgtaggggccggagcccatcacgggttccagcgtggtcttggcgatatcgcgcggcttgccgtcggggccggtgccttcccaccagtgcttcggcaccacgaccagctgccccaggatgttgggcagttccttgttgttcttctcgttgaaggtgaaggtcacgtcgcgctcgcccgatttctcggccttcaccacgtgcgcgtagtagttggaagcgagcgggttgagctccttcaccttgtcgaagctgaagatcacgtcctcgggcgtgacgggctttccatccgcccacttggcttcggcgcgcagcctgaacgtcgcgctcgagacgtcgtcgggataggagagcccctccgccagcagcccgtaggaggcaagcagctcgtcatcggcgggtttcatcagcgtctcgaagggcagcgtcaggccgacggcgccttggcccttggacagcagcgggttgaacgtgtcgtaggttcccgatgccgaaagcctcagattgccgcccttcggcgcgtccgggttgacgtagtcgaaatacttgaagcccggcttgtatttcagctcgccgatgacggagctgccgatcttgaaagtcggctcctgggccacggcctgcaagggcagggcggcagcgcccagcagggaaaacaccaaaccaagtctcgaccacgcacgcgccattcgccagccccaattgtttcgcttcgtccgaggataggcgaaatgcaggcgaaaaacaggtgacgccaccttttttatccggcttcgcgcaaatgtgagcgcaagggagcaacaagccgccgcgacgcgtccgacgcaaggcccacggcggccgtgaaaaacatcgattcaccagaatcgcttttcgcggtaagtctaatacaaatcactcgacccaatcgggcagcagttcaggacacggcatggctttccgtatcgcgcaggcgctttcctccatcggtaaactggcattggctggcttgatcggcgccagcctcgtcgccggcgatgccgccgctcagcagaaacagccgagccccggcagcgccaaggcgatcttcggcggcgttcagcttcccacgcaaggcggcccgcaacctttcggcttctacgccaagggctgcatgaccggcgccgaagcgctgccgaccgatggtccgacctggcaggccatgcgcctgtcgcgcaaccgccgctggggcaatccggccatgctgtccttcatcgaacagctgtcgcgcgacgccgccagatatgacggctggccgggtcttctgatcggcgatatctcccagccgcgcggcgggccgatgttcaatggccacgcctcgcaccagatcggcctcgacgccgatatctggctgaagccgatgccatcctaccgcatgaccacggaccagcgcgaggcactgcccttcacctcgatgctgaagaaggacgcgtttctgacgatcgatcccaatgtctggagcgcggcccaggcgcgcctgttgatgcgcgccgcgagctaccccgaggtgcagcgcatcttcgtcaatccggcgatcaagaagaagatgtgcgacacctggacgggcgatcgcaccaatctcggcaagctgcgcccggaatacggccacgacgcccacttccacgtccggctcaaatgcccgccgggcgcggccaattgcaagccgcaggctccggtcgcggcgggagacggctgtgaccagtcgctcgcctggtggttcaccccagcgccctgggcaaagcccaagccgccgaagccggatgccaagccggtaaagccgcgcgaggtcatggtctccgatctgcccaaggcctgccaggctgttctcgacgccccggccgtctcctcgatgcgcgcggcgacctatggcggcgcctcggccgccgaagcgctcggcgttgcccccgccgcccagccggcggccgccagcgacgaagagctgcccgatctcggccccgtccctgatgacaagcccgccgcgcaatgacacgcggcgcggtgaaacacagcgatcccgcactttaaaaccctgatcgcttcgtatagaagcggtcaaatcgattgaattttgccagtgaatttagagggggagcttctgatggccggccgcaagtgccttgcgctcatcgcgcatgaccagaagaaggacgaaatggcggagttcgcccgccgcaacgaggaaacgctcaggacgcactggacgatcttcgcgacgggaaccacgggcggccgcgttctcgacgccgctcccgctctcgatgttacacgcttgaagagcggcccgctcggcggcgaccagcagatcggcgcgctcatcgccaccggcgaggtcgatgccctgatctttttcgtcgacccgctgacacccatgccgcacgatgtcgacgtcaaggccttgatgcgtctcgcgatcgtctatgatatcccaatggcgctcaacgaggccacggccgacaggctgatcgccaatcttcacgcctaagcggcgcgcgaacgcgcaacaacggaacctgccatgcaccagctcgataccagcgacgcctccatgcccttcccgatcctgatcggcgatatcggcggaaccaacgcccgtttcgccatcatcgagacggcggatgccgaacaggtcaatttcccgaacgtgcgcaccgccgatttcgaaaccatcgacgacgccatccgcgccaccatcctggaaaagagcgcggtcaagccgcgttcggcgatcctcgcggtcgccggcccgatcagcgacgacgagatcccgctgaccaattgcgactgggtcgttcgccccaggaccatgatcgaaaatcttgggctcgaggatgttctcgtcgtcaacgatttcgaggcgcaggcgctcgccatctccgatctggcgccggagcaccgcgagcgtctcggcaatcccgacgcccatgaggacatggtcgcctcccgcgtcgtgctcgggccaggcaccggcctcggcgtcggcggcctcgtgcatgcgcgcggcgcctggatcccggttccgggcgaaggcggccacgtcgatctcgggccgcgcagcaagcgcgatctcgaaatcttcccccatgtcgagaccatcgagggccgcgtgtccgccgagcagatcctctccggccggggcatcgtcaatctctaccgcgccatctgcgccgccgatggcatcgcgccgaaatacagcgatccggccgacatcacctcgcatgcgctggccgaaagcgacccggtcgccgtcgagaccatctcgctgttttcgacctatctcggccgcgttgccggcgacatggcgatgatcttcatggcccgtggcggcgtcttcctctccggcggcatcagccagaagatcctgggcgcgctgcgcaagcccgagtttcgcgccggtttcgaggacaaggcgccgcatacggcacttctctcgaccatcccgacctacgtcgttacccatccgctggcggcgctttccggcctctcttcctacgcccgccggcccgatacgtttggcgtgtcgacggatggccgccgctggggtcgatagccgatctagccaaacgggcgtcaactctttatagagccgctcgagcgcgggccgcacttgcggctcgcatgaccacgagacaggaagtctttattgcgttcatccgatccccagcagcgacccgttgacagcggtacggtcaccgccgttctgaagcgcatcatcgctgaaaacggccgcgagcacatctggggctacgtcgtcgccatcggctgtcttgtcctcgtcgcgctgtcgacggccttcaccgcctggatcatgcgctcgatcatcgacgaggccttcgccaacaggcgcgccgatgtcgtgtggatcatctgtctggcgattttcatcgccttcgtcgtgcgcggcttcgccagctatggccaggcggtggcgctgtcgaagatcggcaacaacatcgtcgcccgttaccagagccgcctctacgtgcatctgatgacgctgtcggtcggctatttcaacgaggcgcgctcggcccgcatcgccgcccaggtcagccagaatgtcggcggcatccgcgatgtcctcaacctgacgatcacctccaccgcccgcgacctcctgaccttcgtggcgctgctcggcgtcatggtctatcaggacccgctgctcagcctcgccgtcctgatcctggcgccgccgctgcttctggcgctgcgctacctttccaaacgcctgcgccaggccaccaaggaagcgatcgacctcaacagccacgtgctcggcgccatgcaggagaccatccagggcatctccatcgtcaaggccttcacgatggagggccagctcgaggagaaggtcaacaagatcatcgtcgccgccgagggccgcgccaacaagatcgcaaggctgtcggagcgcaacgcgccgatgaccgaaagctttgccggtttcgccgtcgccagcgttcttgcctacgccgcctaccgctcgatctatcagaacgtgccgcccggcgccttcttctccttcgtcaccgcgctgctcctggcttacgatcccgcccgccgccttgccaagcttcaggtgcagatggagcgcgccgccgtcaacgcgcggatgatctacgaattgctcgacatggagccgcgccagcgcgacctgccggatgccaagcccctggtcgtcaccgaggcccgcatcgagctgaggcacgtcgccttcgcctatggcaacgacaatgtgctcgatggcgtcgacatggtcgccgaaggcggcaagaccaccgcgctcgtcggcccctccggcgccggcaagtcgacgatcatcaacctcatcccgcgcttctacgatccgaaggccggccagatcctgatcgacggccaggacatcgcccatgtgacgaagaagtcgctgcgcgagcagctggcctatgtctcgcagcagccttatctcttcgaaggctcgatccgcgacaacatccgctacggccgtcccgatgccagcgatgccgagatcgaggaagccgcgcgtctcgcttacgcccacgatttcattgtcgcacagccggaaggctacgacacgccggtcggcgaaaacggcgtgacgctctcgggcggccagcgccagcgcctgtcgatcgcccgcgcgctggtgcgcaacgccccgatcctgcttctcgacgaagcgacctccgcgctcgataccgaatcggaagccgccgtgcagaaggcgctcgacgaagccatgaccggccgcaccgtcgtcgtcatcgcccaccgtctctcgaccgtcgtgcgcgccgacaagatcgtcgtcatgcagcagggccgcgtcgtcgaagagggcaatcacgagacgcttgcgaagcgcagcgacggtctttacgctcgcctcaacaatcttcagaggcccgcggcctccgagactttctgatacgtgaatgatggacgcctgacatgagcgatgctgcgatgaaactggtggtggttggtgcagcgggccgcatgggacaggcgctcatccgcatggtgcacgagatcgaaggcgtcgtactgcacgcagccgtcggccgcccgggctcgcccttcatcggcaaggatgccggcgagatcgccggcctcggccccaacggcgtcctgatcggcgacgatccgctggccgccttcctccatgccgatggcgtgctcgatttcaccacgcccgcgaccaccaatgaattcgccgcgctcgccgcccaggcccgcatcgtccacatcatcggcacgacaggctgctcggtcgaggacgaacagaagatctcggccgccagccgccatgcccgcatcgtcaaatcgggcaatatgggcctcggcgtcaatctgctcagcgttctcgtcgaacaggcggcgcgcgcgctcgatcccgccgattgggacatcgaggtcctcgaaatgcaccacaagcgcaaggtcgatgccccctcgggcactgccctgctgctcggtgaagccgccgccaagggccgcggcgtcgatctctcaacccactccgtgcgcgtccgcgatggccacaccggcgcgcgcgaagcgggcacgatcggcttcgccacgctgcgcggcggctccgtcatcggcgaacattccgtcatcttcgccggcgaaggcgagcgcgtctcgatggcccacagcgccggcgatcgctccatcttcgcgcgcggcgccgtcaaggcggccctttgggcgcgcgacaggaagccgggtctctattccatgctcgatgttctcgggctttcccaaaactgatctttttcggaggcatttctcatgagtggtaccctcgtcctcgttcgccacggccagagcgactggaacctgaagaaccttttcaccggctggaagaacccggagctcaccgagctcggcgttcaggaagccaacaccggcggcaaggcgctcgccgagaccggcatcaagttcgacatcgccttcacctccgacctgaagcgcgcccaggacacgctgaagatcatccttgagaacgtcggccagaccggcctcgagacgatcaaggaccaggcgctgaacgagcgcgactacggcgatctctccggcctcaacaaggacgacgcccgcgccaagtggggcgaggagcaggtccacatctggcgccgctcctacgacgttccccctccgggtggcgaaagcctgcgcgacaccggcgcccgcgtctggccctattatctcaccgagatcctgccccgcgtgctgcgcggcgaaaccgtgctcgtcgccgcccacggcaattcgctgcgctcgctggtcatggtgctcgacaagctcaccaaggaacagatcctcggcgtcaacctcgcgaccggcgttcccatggtctacaagctcaacgccgactcgaccgtcgcgtccaaggaagtcctcggcgacatgtccggcgcgcactgagcccgtctctggctgcgtccaaactctccaccctcatcccggccttgtgccgggatccagtcaacccaagtccttgggttgaaggactccctcgcgccgcagacgcgacgctgctggatcccggaccaagtccgggatgagggatgccagggggttcacgcacgcccgtgctgcgccctctccatgttgctaggataaccctcaattctcgatcgtgaactgcacccgatcagcggcaaaccgcgtcaccgaatattgcaccggcacgccgtcgagatcggtattcatcgccttggtgatcagcacgatcgcgcccggcgtcagctccagcgccgagagatcggcggcttcggcgtgggcggcggtgatttcggtggtggcgcggatatagtcggacaggccgaggtcggcgaaggcgcgggtgatcgattccgtcttctcgtaggcctcgggcatgcccgcgaaacgcgccgccggaaaccatgaggtcgcgctcgagaccggccgtccatccgccttgcgcacggtctccagccggatcactttcgtccccggcgcaagcttcagccagcgcgccacctcgtcgctggacgcctcctcgccatgtccgagcaacagcccgcgcgtctcgcgcgcctgctcgccgatgccgctgttgaagcgcgtccgcttgctgatcggaaagttcagccgttccttgcgctcgatcagcgtgccgcgaccctgcacggcgcgcacgatcccctcctgcgccagcgccgccagcgcgctgcgcaccgtgtggcggttgacgccgaactgcgtggccagcgtcatctccggcggcaccatgcccgtttcgtcgtaggcgccggcgctgattgcctggcgaatccggtcggcgatctgtcgccacagcgccacgcccgtctgtctctgaacctgcccagccattttagccctttatcttatgcgcccccgaaatgtcacacgcttgtcacctcggcgatttaggtctaggtatagcttgtatggttgtctatatcaatagacatttaaaggatgtggcgatgaccttagcggaaaagaaggtaggcaagaccgagctgggtgagggtgaccgggcgcgcaagcgcaccgtcgatctgctcgcccgcgccgagcggcaggagctggaagcggcctggcaggcattggcggaaaagccggtggcgcaagccgtgcgcggccccgaaaccggcctcgtcatggtgcgcggccgcatgggcggcggcggagccgccttcaatctcggcgaggtcaccgtcacccgcgccaccatccgcctcgcttccggcaccatcggccatgcccaggcgctcggtaccgatcgcgaaaaggcccgcctctcggcgatcttcgatgcgctctggcaggagccggccactcgcgacgctatcgaaaacaccctgcttgcgccgatcgcggcccgcgtcgccgatgccgataacaggaaggccgacgagaccgcggccacccgcgtcgatttcttcaccatggttcgcggagacgactgatgcccctcaagactgaaacgcataacgcagatgccctgtcgggcggcttcgccgagccggtgttccacgcccaaagcgtcttcaagctgatgatggatgccatggctcgccccggcaccatccagaccgtgtcgcccgatgccgagccgccggcgccgctcggcattgcagccggtgccatcgcgctgacgctgtgcgatcacgacactcccgtctggctctcgcctgctttggccaagtccgccacgccgcaatggctcggcttccacaccggcgcgccggtgacgccggaaaaggccgaagcccgcttcgcctttgtcgatgaaggcgccacgctctcctccttcggcttgtttgcctccggcacccaggaatatcccgatcgttcgacgacgctcgtcatcgagctgcccgatctcgaaggcggtcgccgtctcgcgctgatgggccccggcatcaagaccgtcaccgacgtcgcgccgcttggtctgccggaacgcttcctgcatctgtggacggaaaatcgcgcgctcttcccgcgcggcgtcgacatcgtgctcacctcgggcagccgtttcctctgcctgccgcgcaccaccaagatcaccgcaacggagatgtgacccatgtatgttgccgtcaaaggtggcgaggccgccatttcgaatgcccaccgcctgctcgccgatcgccgccgtggtgatcgcgcgctccccgccatcggcatcgagcagatcgtcgcccagctgacgcttgccgtcgaccgcgtcatggccgaagcctcgctttacgaccgcacgctggcggcactcgccgtgcgccagtcgcgcggtgatatgatcgaggcgatcttcctgctgcgcgcctaccgcacgacattgccgcgcttcggctattcgcagccgatcgatacggctcaaatgaagatcgagcgccgcgtctccgccacctacaaggacctgcccggcggccagctgctcggcccgaccttcgattatacccaccgcctgctcgacccctcgctgctcgaggatggcgcggtcgaggagccggtgctgcgcgaagccgaaaccggccgcgtcatgcgcgtctcggaaatccttgcccatgaaggcctgatcgagggcgatggcgaaatgccggaggatcacgagatcggcgatctcacccgcgagccgatggaattcccgatgagccgggatctgcgcctgcaggcgctcgcccgtggcgacgagggcttccttctggcgctcggctattccacccagcgcggctatggccgcaaccaccccttcaccggcgaaatccgcatcggcgaggttgaggtggagtttgatgtgcccgagcttggcttcgccgtctcgctcggttccatccaggtcaccgaatgccagatggtcaaccagttcaagggctcctccaaggcgccgccgcagttcacccgtggttacggcctggtcttcggccagagcgagcgcaaggccatgtccatgtcgctggtggatcgtgcgcttcgggcaggcgagctcggcgaggatgtcacagcgcccgcgcaggacgaggaattcgtcatctcgcatgccgataacgtccagtcgaccggcttcgtcgagcatctgaagctgccgcactatgtcgatttccaggccgagctcgatctcgtccgccgcatgcgcaacgacttcgacgccgcccgcaacggcggcgatgacgatctcaaggaggcagccgaatgagcgatctcgccacatacaacttcgcctatctcgacgaacagaccaagcggatgatccgccgcgccatcctgaaggcgatcgccattcccggctatcaggttcccttcgcctcgcgcgaaatgccgatgccttatggctggggcaccggcggcgtgcaggtcacggcctcgatcatcggccccgatgacgtgctcaaggtcatcgaccagggtgccgacgacaccaccaacgccgtctccatccgcgccttcttccagaaggtcgccaatgtcgcggtcaccacgcacacgaaggatgccaccatcatccagacccgccaccgcatcccggaagaaaagctcggggcggggcaggtgctggtctaccaggtgccgatccccgagccgctgcgcttcctcgagccgcgcgagaccgagacccgcaagatgcacgcgctcgaggaatacggcctcatgcacgtcaagctctacgaggacatcgcccataacggccgcatctccaagacctacgcctacccggtcaaggtcgccggccgctacgtcatggacccgtcgccgacgccgaagttcgacaatccgaaaatgcacatgtcggacgccctgcagctcttcggcgccggccgcgaaaaacgcatctacgccgtcccgccctacaccgaagtcgtcagcctcgatttcgaggaccaccccttcgagatccagcgcttcggcaagccctgcgcgctctgcggcgccgaggacgtctatctcgatgaggtgatcctcgacgacaagggcggccgcatgttcgtctgctcggatacggatcattgcgaggaccggcgggagcatggccatgccggcgagatgttggcgcagggtcgggaggctgcggaatgagggcgcttcaagttcggcgttctgccggggatacccctctctgccctgccgggcatctcccccacaaggggggagattggctgggcgcaaccgctcgttccacatgcattggctggcgtaaacatcgcaacgagtcgatctccccccttgtgggggagatgtccggcaggacagaggggggtaacccacccgccacgctccatgccctcacacacacatccgcggaggcatagccatgaccgacaccccccttctcaaagtcaacgacgtctcgaagttctacggcaaccgcatcggctgcaagaacgtgtccttcgagctctggcccggcgaggtactggcgatcgtcggtgaatccggctccggcaagacgacgctcttgaactgcatctccacccgcctgatgccgaccacgggaagcgtcgagtatcacatgcgcgacggccagtaccgagacctctaccacatgagcgaggccgagcgccgtttcctgatgcgcaccgactggggcttcgtgcatcagaatccggctgacggcctgcgcatgacggtgtcggccggcgccaatgtcggcgagcgcttgatggcgatcggcgatcggcactacggcaatatccgcgcgaccgcggtcgattggctgagccgtgtcgagatcgacgagagccgcatcgacgaccagccgcgcgccttttccggcggcatgcgccagcgcctgcagatcgcccgcaacctcgtcaccggcccgcgcctcgtcttcatggacgagccgaccggcggtctcgacgtctccgtccaggcgcgcctgctcgatcttgttcgcggcctcgtcaacgatctcggcctcgccgccatcatcgtcacccacgatctcgccgtcgcccgcctgctgtcgcaccggatgatggtgatgaaggacggccacgtcatcgagcacggcctgaccgaccgggtgctcgacgatccccgtgagccctacacccagctcctcgtctcctcgatcctgcaggtctaatcgaaagcgcgatccgtaagccggctaaggattgcggatcgccaccagcgaaaccagggaaagtcaatcatggcaacgccactcgttgtttcggaagtctccaagagcttcaccatgcatctgcgcgacggcatcaagctgcctgtcgtctcggatgtctccttctccgtcgcctcgggcgaatgcgtcgtgctcggcggcccctcgggcatcggcaagagctcgctgttgaagatgatctacggcaactacgcggtcgatagcggccagatcctggtcaagcaccaggatcgcctcgtcgatctcgccaccaccgatccgcgcaccatcatcgaggtgcgccgccacacactcggttacgtcagccagttcctgcgcaccgtgccgcgcgtcgctgccatcgatgtcgtcgccgagccgctggtcgcccgtggcacgaaggcggatgtcgcccggcaaaaggccgccgaactgctggccaagctcaacctgccggaagcgctctggcagctcccccccgccaccttctccggcggcgagcagcagcgcgtcaacatcgcccgcggcttcatcaccgatcatacaatcctgctgctcgacgagccgaccgcctcgctcgatgccaagaaccgcgccgtcgtcgtcgagatgatcgccgagaagaaacagaagggcgtcggcctgctcggcatctttcacgacgaggaagtgcgcgaggccgtcgccgaccgcattctcgacgtgcagaaattctcgccacggaggccgatcgcagcatgagccgcaagattggcctcgagccctatatccacgagaccgcctcggtgaacaattcgacgctcggccgctataccgagctgtcggagcgctgccgcatcgacgaggtcgaactcggcgattactcctacgtcatgcaggatggcgccatctggtgcgccacgatcggcaagttcgtcaacatcgccgcctccgtgcgcatcaacgccaccaaccacccgacctggcgcgccacgctgcaccacttcacctaccgcgctgccgattactggccggatgcggatatggagaccgaattcttcgaatggcgccgctcaaaccgcgtcacgatcggccatgatgtctggatcggccacggcgccacgctcctgcccggcgtcagcgtcggcaatggcgccgtcatcggcgccggcgcggtcgtctccaaggatgtcgcaccctacaccatcgtcggcggcgtccccgccaagctgatccgcgagcgctttccgaaagagatcggcgagcgcatggacaggcttgcatggtgggattgggagcacgatcggctgcgcgtggcgctcgccgatttccgcgcgctgaacgccgaggatttcctggcgcgatacgaggcctgagccgcctatccgtccgcatcagacctctccgacgcgaatggatcaccactcgcgccggaggcttagctgaggctcatcagcgccgtgccggcgatggcaagtgccgcgccaccccaggcatgcgcgcgcggcatctgcccgctgcgcagccacaccatcggcaggatgacgacaggcgtcatcgaagacagcgtcgaaacgatcccgacattgccggtcttcagggccgccatcagaagcgacattccgagcgccgtgccaaagaaggcggcggtggccgccaggcggaaatcccgcatccgaaagctgttcgcctgcgcccgcacccggggcagcgccagaagcgcccagaagcagagaaccgccagccccgagcgcaccgccatcgccgtgaacggctcgacaccaccagccatggccggccgcgccgtcaggctccccagcgcctgcccgagcgcggtgacgaccccgagcgttatgccgagcatagagacgggcggcgtggacggcgccggctccgcaatcggctcgccatcggcaagcgggatcatcggcgccgggcgacggcggcgaaagccgatggcgatgacgatgccgcagagaatgagcacgaccccgaacccctggcggagatcgatcgtctcgcccagcgcgacatatccgagcaccagcgcgaatggcgaagccagcgaaaacagaagcgccgtcacgcgcggcccggccgtatagatcgccgcgaaataggtggtgctggcaatcacgatcccgaacacgctggaggcgaggagcgacccgagctgccacgccccaagcgtcgcccagccgccgacgacggtcgccgccagcgccgtcatcacgaaggccgcggtcagctgccagcgcgccagctgcatcagcggcacgcggccgttgagctcgttgatgaacatcgagctgagcgcgatgcaggtggccgaaccgatggcgaaggcttccgagacgaacatgaaattttccttgggggctttcgcagctttcgggaaagtctcggcggaaatcaaggtcgtcagatgggaattgcgagagatgcaccgatcttcgtcgggggccttccgtgccgggatcatccgcgcgtgcccgtcgcaagccgcttcgaggtatcgtatgcgcaaaccccgtatcttcccggcgaagcttccgttaatgtccgccgcaccagacgtcccgcacggagccgaccttgacccataatccgcagtccccggtgagcctttgacgattgatcacgaagcgacattcctcgcctcgctcggctggtccgagttcttttccgatcagttgacggatgacgatcatggcctcatcccccgccgcatcgccgaagtgcatcgcagccgcctgagcgtcacctcgctggatggcctgatccggctcacgatctcgcatcagctcaacacctccgaattcgccgtcggcgactgggtcctggtcgatcccgacgacgacaggctggtgcgccggctggagcgccgcacgcttttgcagcgccgggtcgaagggcgacagggccagcagctcggcgccgccaatgtcgatacgcttctgatcgtcacttcctgcaacgccgatttcaacgtcgcccgcctcgagcgctacatggcgctcgccaatcaggcggagacgacgcccgtcatcgtcttgaccaaggccgacctcgcccccgacgtcgcggaatacgaagcgcaggcgaaagccctgcagcgcgatctcgcggtggtggtcctcaacgccaagagcgaggatgccgctgcggctctcggccaatggagcggcttcggccagacgctggcgctgatcggctcgtccggcgtcggcaagtcgacgctggtcaatgcgctggcggggctgagcggcgagggctcgcaggccaccggcggcattcgcgaacgcgacgccaagggccgccacaccacgaccgcccgctcgctgcacgccatggaaggcggcggctgggtcatcgacacgccgggcatgcgcacgctccacgtcagcgatgtgcaggaagggatcgagcaggtcttctccgagatcaccgagcttgccgaacactgccgcttccgcgactgcacccacgaccacgaacccggctgcgccgtccaggccgccgtcaagtcaggcacgctggcgcccgagcgcctcgcccgctggcgggtgctgcgcgacgagaacgacaagaacaccccgaagatgaccgggccgaagggcaacaaggtgctgcagaaacggcggtgaggggcgggaggcgttgttacggacgatttcaattgactaatggcgtcgctgtagcattatcgctttatatccgtacgcccgtaggcgggcacgtatcttgagacccccaaggcgacgagccgagggggtcttttatttgaagaacgttgcggtgttgatcgatggcggccatgttcgcgttttggcgcgaaacgccggaatgaactacaatcccgattacattgagaagatagccaaggcttgcgtcgagccggatgaagacgctttccggtttttctattacgattgtgcgccgtacagcggaacggtcaaactgccggtgtcagcggaacctaagaccttcgcaggctcggatgcctggctgcgagagcttgctgcgaaagatctctttgctgtcaggctgggcgtactgaagtttcgcggctttaaaccgaaaaagatcttgccggccggacaggcggtgacggataacgacttcaaggcggatttcgaacagaaaggcgtcgatatgcgcatcggcctggatatcgctactttctgcgcatcgaaggctgtcgataggctggtactgctgaccggcgacaccgattgcataccagcaatgaaatacgcgcgtatcgcaggcttgcagattgtcctggttgggtttcccaaccgggccgcatccaacgaaatgctgtgtcacgctgatatcgaacgtcgagtagcttggccagctcaatagggctgttgccaatccaggcgatttccttccgttcacccggcctttttgccgcggacgtctgtcacaacaaggtgaacggcgctgtcacaaatgaatccacagcagccccaattgtgacagcagttacataaaactgacattcaccgttcatccatcaagcctaatgcactccctcatatcgcgtctggactatgaggaagagcatgatgttcgagctgaagaatgtcacccgtcaattcggcaagaagatcgccgtcgattccgtgacgcttgacatccctcagggccagatggtcggcatcatcggccgttccggcgccggcaagtccacgcttctgcgcatgatcaaccgcctgcaggagccgacgtcgggctcgatccatttcaacggcaccgaggtgtcgggcctgcgcggccaggggctgcgcaactggcagcgcgattgcgccatgatcttccagcagttcaatctcgtgccgcgtctcgatgtgatgaccaacgtcatcctcggccgtctcaaccaccgctccacggcgctgagcctgctcggcatcttcacccgcgaggaacgcgtgcaggcgatcgccgctctcgagcgccttggcatcgagcagacggcgctgcagatggccggcacgctgtcgggcggccagcagcagcgcgtggcgatcgcccgcgctctcatgcaggcgccgaagatgctgcttgccgacgagccgatcgcctcgctcgacccgctgaacgccaagatcgtcatggacgcgctgcgcgatatcaacgagcgcgagggcatcaccgtcatcaccaacctgcacacgctcgacaccgcgcgcagctattgcgagcgcatcgtcggcatggccggcggccgcgtcgtcttcgacggcaagccgtccgaactgacggccgatgccgtcaacgagatctacggcaccgacaagaacggcgccggcatcgacgaaaccatgacgtccaccagcctcgataacatcaagggcaagcaggacgccgtatcgcgcgtgatggccgcctccgccgtcatgcgctgacaagtttccggccgggggaaaagccggaaagcgacgatccccaccatctcagcagtcacttatctcagcgtcactgaaaaatgtcaccaaaggagactaccatgtctgcgttccgcaagatcctgatggccacgatcgccatcgccactgttgcaggccaggcctacgcccaggacgtcaaggtcctgcgtatcggcctcgacggcggtgaaaacgaagccgatcaggttcgccgcaccgagtgcgtacgtccgggcctcgtcgccgccaccggcgtctcggaagtccagatcttcccgtcgccgaactacaacggcgtcatccagggcctgctcggcggcaccatcgacctcgcggtcatgggcgcttcctcctacgcctcgatctacctcaaggatccgaacgccgttacgccggttctgaccaccaagcaggaagacggctcgaccggctactactcgatcatggtcgcccgcaaggattccggcatcaagacgctcgccgacgccaagggcaagaagctcggcttcgccgatccggattcgacctcgggctacctcgtcccgaacgtctcgctgccgaaggacatcggcatgccggtcaagcagtatttctccgaaaccggcttcggcggcggccatgagaacctcgttctcggcgtcctcgacaagaagttcgacgtcggcaccaccttcggctccgccaccggcgactgggcccagggctacacctccggcaacctgcgcatcatggtcagcaagggcctgctcgacatggacgatatcgtcgaggtctggaagtcgccgctgatcccgaacggcccgctgatggtgtccaacaagctgccggccgacatccagaagaaggtcaccgcctacttcgccgacctgccgaagaccgacaagggctgcttcgacagcttcaccggcggcggttatgtcgattggtcgccggtcgaccagtccttctaccagacgatcatcgacgctcgtaagtcggttatcggcggttgatccgaaccactgaataaagtcgcggcggcatcatgatggtgccgccgttcgctcaacaaggatgctcataatggcgcacgtggccgaacccgaccacctgggcggactgcagcaaggctcccgcacaattctcgatcattaccagcaacaggtccggacacggcgtatctacaccgtgatctcgatcgtcgtgctcctgatcgtcctcggcgcctcgctcgatttcgccaacagcgccaattccggcaagttcttcgagcgccttccctatctcctcgacttcatgaagcagttcgtgccggacagcccgctggaaatcttccgcgcgatgttcgacctgccgtcgccctatgccgatggctcgatcaagtacgattacgtcagcgaccgcatctacataaccgacagcttctacatcccgaatttcttctaccagctggcgatcaccatcaacgtcgccatcgtctcgaccatcatcggcgcatccgccgccttcctgctctgcttcttcgcctcgaccaatctcgtcggcgccggtttgacccgctgggtcgtgcgccgcatcatggaaatcctgcgcgcctttcccgagatcgtcatcgccggcctgctcgccgccatcctgtcgatcggcccgatctcggctatcatcgcggtctcgatccacaccaccggcgcgcttggaaagctgtttttcgaagtggtcgagaatgccgacatgaagccggacgagggcctgcgcgcatccggcgccagctggctcgagcgcgtccgcttcgccatcctgccgcaggtcatgccgaatttcgtctcctacgcgctgttgcgtctcgagatcaacgtccgcgcctccaccatcatcggcgccgtcggcggcggcggcatcggcgaggtcttcagcctgtcgatcggccgcgatcacgccgccaagacctatgcaatcatcatcatgcttctcgtcaccgtcgtctgcgtcgaccagttctccgcctggctccgccgccgcatgatcggcaagcagtccttcgaattcggccggggagcagcctgatgtcgtcgctcacagtcaatgccgccgatcgccagcgcctgctggagacctatcccgaagtcttccatcgcagcttcatgcagcgctggggcctcgccctcgtcgccggcctcgtcatcgtctacctcgcgctctcgttcaatttcttcaaggtcatcccgaccttcgtcaatggcaactgggaccgcgcctcgatctacatccaggattggtattcctggcgcgcccagccgcgcctgcgcttcgtcgatggcaaggtcacgccgcaatggaacagccgcggccagtatccgaaggatgcggtcatcgactggatgctgccgacagccgcaggcggctatatcgtcacctacggcagcgatgccgaccgcctggaggtgacgcccacgcgcgtcgacgtctatctcggtggcaagctttatccggtcgagatatcgaaggatcgcgccaccctgccgccgggcgcgccggcagccatgaagcaggacgacagcaaggtcaccgtctccttcggcttcgagggccaggcggaaatccgcacgacgcaggtctatgtgcagcgccgcttcctcggctgggccaatttcttcttcgacacgcaatcgcccttctggggcaggagcttcgtcgaggtcgccggcctcatgctgtcgggtgatcgcatcgatcccaacatgtccaatgcctcgcttgcgctcgacaatttcctgaacaatgccagctggcagcacggcgatatcctgtcgaagctgatgcagacgctggtcatggccttcgtcggcacgctgctcggcacgctcttcgcctttccgctggccttcatcgccgcgcgcaacatcacgctcaatcgctcggcgaactgggtgaccaagcgcctcttcgatttcctgcgctctatcgacatgctgatctgggcgctgttcttcacccgcgccttcggtcccgggccgatccccggcatcgccgccatcttcttcaccgacaccggcgcgctgggcaaggtctatgccgaggcgctggaaaacgtcgacgacaagcagcgcgagggcgtgaaatcggtcggcgcttcccctgcggtcgtccagcgcttcggcgtagtgccgcaggtgctgccgatcttcatctcgcagtcgctgtatttctgggaatccaacacccgctcggccaccgtcatcggcgccgtcggcgccggcggcatcggcctgaaactcttggaatcgatgaagaccaattccgattgggacaaggtggcctacatggtgctcctcatcctcatcgtcgtcttcgtcttcgacaacatctcgaatgcggtgcgctcgcgggtgatgggcaaaaagacccattgacgggtcgcaatcatcatcattctgtcacggaaatcttttagccggaagcaagcttgcggtgggcgatcaaatcacggcacactgcctcccgcactcacattcatttccgggatacgcgccttgcgatacgcactctatttcacgccgccgaagggtgatcccttgaacgtggcggcagcccattggctcggtcgcgatgccttcaccggcgaaacttacccggctcccgattatcctggtctgccggccgccgagcagttcgagctcaccgccgacccgcgccgctatgccttccacgccaccatcaaggcgccgtttgagctcgcctcctcggtcaccgaaaaggacctgttgcaggccgtcgaggatttcgcggaccgtacgccggccttcgagatacccgagctcgtgctcggccagctcggtcggttcttcgccctcgtcccgggctccctgcatccgccgcttcagcaattcgcggcctccgtggtaaagtccttcgagcctttccgcgcggcgctgtcggaagccgatatcgcccggcgcaatccggaaaagctcggcgaaagccagagggccaatctgttgcgctggggctacccttacgtgatggatgacttcgggttccacatgacgctctctggccaggtgccggaagagcgtgccgaggtgatgaagaccattctcgccgagcgtttcgccgcgttcaccggccggccgcttttgatctccggccttgccgttttcgtcgaagagacgcgcggcgcgccgttcaccgcccattcctggtggccgcttgccgccgcagaccgttgaaagtccgacacaatgaccaaagaaaccgtcttctccaacgcccgcatcgtcctcgaggatgaaatcgtcgaaggatcggtcctcgttcgcgacggaaagatcgaggatatcgcaagcggcagctcccgcctcggcgaggatttcgaaggcgattacctgatccccggcctggtcgagctgcacaccgaccatctcgagggccactattcgccgcgccccggcctgcgctggaacaagacggcggcgatccaggcgcacgacgcccagatcgtcacgtcaggcatcaccaccgtcttcgattgcctgcgcatgggcgccgatgaagacggcggcttcgagcatggcgagatgcgcgacatggccgatgccatccagaaggccgagaaagagggccgcctgcgcgccgagcacctcatccacctgcgctgcgaagtctccgccgacaacgtgctgcagcacttcgccgatttcgaaaacgacccctatgtccgcctcgtctcgctgatggaccatgcgcccggccagcgccagttccagaccatggaccagtacatcttctactaccagaagaagcgcggcctcaccgatgccgagttcgccaggttcgtcgatcgccgcgtgtccgaatccgagcgcaactcgacgccgcaccgcgtggcgatttcgaaggtctgcgccgagcgcggcatcacggtcgccagccatgacgacgccacgctcgcccatgtcgacgaggcgatcgaaaacggcgtccgtctcgccgaattcccgaccagcttcgacgccgccaaggcttcgcatgaaaacggcatgagcgtcctgatgggcgcgcccaatatcgtgcgcggcaagtcgcactccggcaacatcgccgcccgcgatctcgccgagcgcggcgtgctcgacgtgctctcttccgattacgtgccgctcagcctgctctacgcacccttcctgatcgccgacgaagtcgagagcatctcgctgccgaaggcgatcgccatggtcacgtcgaccccggcccgcaccgtaagcttgaacgatcgcggccgcatcgcaaccggcctgcgcgccgatctcgtccgcgtcttccgcgacgagggcgttccggtcagtcgctccgtctggcgcgaagggcgccgggtcgcatgaccgcgcacgaaacgcatccctcgcacgagccccacgtcgttcccggcaccgagcacggcatcatggtggtcgtggtcggcccctccggcgccggcaaggacacgctgatggcggcagccgcccggcatttccggggccggcaggacgtccatttcgtccgccgcgtcatcacccgcgatcacgatgccggcggcgaggatcatctcgccgtctcgccccagggcttcgcctcgatggagcaggccggcagcttctccgtatggtgggaagcccacggcctgaaatacggcatcccctcggaagtctcggtgtcgctgtcagccggaagcctcgtcatcgccaacggctcgcgctcggccctgcaccatttccacgccgtcttcccgcgcctgaaggtgatcaacgtcaccgcccgcgccgacgtgctggcgagccgtctggaggcccgcggccgcgagacccacgaggacatcatggcccgcctggcccgcggcccgctcaccgtgcgcggcgattacgacgtcgtcgatctcgacaatagcggctccttggaacagggcgaacgccgcatggtcgaggtccttgagggcttcctgcgggaaatcggctgaaacgatgcggccgataggcccacgtcgcggggataataatcgtttgtggcaagaaatgtcgcagcgatatcaatcgcttgcagatttcgtcgtccccatccatccccgctgaaaccatccagccgatactgatggcgtcattggacagggagccgggtcgcgaaccggatctgacacatcagggcgcaagcccggcgtcctgtgatggttgttgaaaggtggatgttgaggtcgtcaggatctcccatccatccggaggcgaaaggccgagagacgctcctgtcggcctggatatccggaagcctcgatgcgatcgggcaggcgatattgcctgacactcctatcctataccgaccatcgcctgcccattcccagcttttcatgccgtcgcggagaggtttccggcgcggggttttgtggtgttcatgttgctggagccgcaacatttgagcccgtggccccctcatcgcctcgctgtcgctccggcacttctccccgttggggagaaggggctgggcgcactcgctgtgcccaatcgtggcgtccctttcgcaaacgagaaaggtctgggcgagcggccgccacttgtctcttctcccctgcggggagaaggtgccggcaggcggatgagggggcctcacccaccaacctcacccacaaaatcccatcccgtcttgcagtcgacacaccccttctctaccgtctctcgcacaaacccaagggcacgatatgaccgacgcaacaccccagcataacgccgcctgccactgcggcaccgtcaaattcaaggtgcggctgacggacgagttcaacaccattcgtcgctgcacctgctcctattgccgcatgcgcggcgccatcgccgcctctgccagtctcgatgacatcgagttcgtcgagggcgaggacaatctgacgctctaccagttccacaccggcacggcgaagcactacttctgcaagacctgcggcatctacacccatcaccagcgccgctccaacaccagccagttcggcatcaacgtcgccgtcatcgaaggcgtcagccccttcgatttcgccgaagtaaaggtcatgaacggcatcgcccatccgagcgatgccggcggcacgtccgaggtcgctggagtgttgtggttcgagccgttcgagtgaacgacgggcgagttgatctgaagcggcgggcgtattacattaagagagacaggtattacgaggacccggcatgtcgaccacagtgacatcgaaagggcaggtaacgatcccgaaggcggtgcgcgatctgcttggcatcacggcgggaagccaggtcgattttcaccgagccaaggacggcagcattgtgctgacacgggcggacagcgagaagcccgtcagccgtttcgagaagcttcggggacacgccggcgccggccttgataccgatgcgatcatggcgctcacccgtggtgaggcccatggcgaggaatgacacttgtcgataccaacgtcctgcttgatctggtaaccaacgacccggtatgggcgagctggtcgataggccagctcgaggcggcaagcctggaaggccccttgctgatcaacgacgtcatctacgccgaactcgcggtccgctatgaacgcatcgaggagctcgatgcgttcatagattcagcggaacttgtttgggcgccgatgccgcgcgccgcgcttttcctggccggcaaggccttcaccgattatcgtcgcgctggcggctcgcgtaccggcgtccttccggatttcatgatcggcgcgcaggcggccgttcagaacctgtcgatactgacgcgcgacattggccggtatagaacttatttccctggtgtcaggctgatatcgcccacgacgtagaccgtgtctctacgagagcggcaatgcccgatcgtcccctacaccaacccaagccgaaccaaactctcggcgcaggcaacgatcgcctcctcccgtgagcgcggtgcccagccgagcaggcgctcggccttcttgcccgtcgcgttcatgtcgtagttgaggagcggcaccacggccttcagctgcgcgttcgtctcgccggcgatccgcacctgctcgtcgggccagacatcggtcgagaccttggccgccgcgtctcccagcctttgccgcagcagttccgcgatctcgaccatccataggctgtcgccgacggtggcgaggaagcgttcgccgctggcggcggggtcggtcatgcagcgcaggtgcaggtcggccacatcgcgcacgtcgacgcagcaggagttgacgttaacgcagcccggctgccccttcatcatgttggcgatcagccggatcgagtgcgagtagtcggcgccgagaaccgggccgtagacagcgaccggattgaccgccgaaagctccatgccaccgccctcgcgggcgatgaattcccaggcggcgcgctccgacagcgtcttcgatttctggtagggcgcgacattgccttcaaggttgctccagtcggtctcgtcgaacggccgccgatggtccggcccatggccgacgccgatcgcgccgaaggccgatgtcagcaccacccgcctgacgccggcatcgcgcgccgccctgagtaccctgagattgcctttgacggcgggctcgatccagtcctcctcgcgcgtctggtcgccggatggcgtcggcgaggcgccgtgcatcacgtaagcgcagccggcggcggcctccgcccaacctgtgtcatggtcgagatcggcgatcgcgaaggacagccggtcgccggcatcgatgccgccgaccttcagatgcgcccgcacctcgtcctcccgcccgggcgaacggatggttgtgcgcacgcgataaccctccttcaacagcgccagcatgcaatattgcgcgatgaacccggtgccgccggtgacgagaacgagcgtgtctttattgtcagtcttcatggtttgcctcatgcttcatgccgccgcatcggatcgcggcgaactcgataacgggaaggtaggcagcccggcccgtactgtgaatgcttgaaaatccgcatgacttgcgcgatagttcgataatgctggctgatcccttctccgatatcctgagcctgacgaaagccgaggcgatcgtcaccggcggcttcacagccggcggcccctggtcgatcgcctttccggggcgcgacaagatcaagttcttcgcggtggtcaagggcggctgctgggtgacgctggagggagaggccgagccgatccgcttcgaggagggcgatgtcggcctgctcgccaggaagcgcagcttcgtgctgtcaagcgatcccgcgcttcagcccatcgacgccatgagcatattcacgggcacgggacggcggctggtgacgctcggcgacggcaatgatttcgcccatatcggcggccacgtcgcgctcgatccgctgaggggcggcctgctgtcggatatcctgcccacctggatccacacccgcgccgcctcgccgcaggcagtcatcttccgctggctgctcgatcggctgatcgaggagcgcgacatcggccagccgggggcggcgcttgcctccgcgcagctgacccaactgctctttatcgagatcctgcgctcgcacttgagcgccgccgaccgtatgcccgccggctggctgaaggcgctggcggaacccaggatcgcgcccgcgctgcgcctgatgcacggcgaaccctcgcgcgcctggcacctggaggagctcgccggcgcctgcgccatgtcgcgcacctcgttcgccgtccatttcaagtcggtctccggcgtcgccccgctcgcctatctcaccgaatggcgcatgcgccttgccgaacggacactgcgcgaaacccgcacccccatcgcctccatcgcccgctcgctcggctatacctccgaaagcgccttcagcaacgccttcaagcgcgtgaacggcaggtcgccatcggcttatcgggtggcggtgaatggggttttggaagaagaaagttgagggctgggtgcccttcgcttgtcgctcagggcgtcgcttccactccaccccctcatcgcctcgctgtcgctccggcacttctccccgttggggagaagag

SEQ ID NO: 10 - DNA, 148072 bp, Rhizobium matallidurans
  source 1..148072: mol_type = genomic DNA
cgcccccaagccggtcgccgccaaggcaagcaccgcgaaggcgggctgagaccaccgcaatcacacaaagccccggttcgccggggcttttttgtttccgcgatgcgcgtgattgcggaaaatcacaaagcggcgcaagattggattcgacaacaccgctgtcgtcatgtacgcattggttaaacgattaatccaatccgtcgaatatcatgcccacagcccgaccgggacccaatctgagcaggatcgcaacgtcgcttggcgtctccgtcgcgaccgtgtcgaacgcgctctcgggcaagggtcgcgtatccgaacagctcgccgagcgtatcagggaacacgccgccgaacttggatacgtccccagccaggcggcgcgcgcgctgcgcaccggccgcagcggcgtgatcggcctggtactgcccgatatcgccaatcctctcttcccgaaactggcgcaggccatcgaattcgccgcgacgtcggccggctacggcgtcctcatcgccgactcgcgcggcaacatcaccgcgcagaccgaggccatcaaccggctggtcgagcgcggcgtcgagggccttgtcatcgtcccgcgccgcgccacccgcatctccgccgccagctgtccggtcgccgtcatcgacactgcctcgacgccgggaaacacggtggccgccgatcactggcagggcggccgcgacatcgccgaccacctggccgaactcggccacaagcgcatcctcgtcatcggcaacaacccggaatccaacgtccagaacgaccgcgtcggcggcatccgctccggattgcgacccgacatgcactcctccacgctgtggatcgagcgcctggagcgtgagcacggcaccggctgcacgctcggcctcgccgagaaggtccgcgaaggctacaccgccttcgccgcgctgtccgaccttcaggcgctcagggcgctcaccgaactgcaacgcgacggcatcgttgttcccgacatggcaagcgtcaccggtttcgacgacctgattttctcccctgtcatcacccctggcctgacgacggtggcgatggacatggcgacgatcgccgatatcgccatctcctcgctgctgaaaaccattcagacgagcggcagccgcgaaggcatgctggtcggtgccgacaccgaccgggtgcccatgcagctcatcattcgccagtcgtcggggcccatcgccccgggtaacggcgaccccaccaaagtcgacccggccaaacgagcctctcaaacggagacctcctgatatgaagcatgccctcatcgcctcggcggcccttcttgccctgacgccggtcgcagccagcgctcaggaaaagacgctcacgatctccgtctatgccttcgcgcaggatgatttcaagtcgatcgtctacgcccccttcgaagccaagtgcggctgcaagctggtggtcgaaaccggcaacagcgtcgagcgcctggcgaagatggaagccaacaaggccaaccccgtcgtcgacatggccgtcgtatcgatggccgatgcgctgtcggccacccgcaaggacctgatcgacaagatcgacacgtcgaagctcaccaatttcgacaagctctacgatctcgccaaggatccgaacggcgacggcatgagcgtcggatacaccttctacgccacgtctatcgcctaccgctccgacaagatgaagatcgagagctgggccgacctcctgaagcccaaatatgtcggccacgtcgccttccctaatgtcaccaccaaccagggcccgccggcgctctacatgcttggcctggcactcggccaggacaaccccgacctgaaggcgccgatcgcggccgtcggcgaaaagaaggacgacatcgtcaccttctacgagaagtcttcgcagctggtacagctgatgcagcaggaagaaatctgggccgccccgatcggccgcttctcctgggcgggcttcaccaagctcgacgtgcccgttgcctgggcgacccccaaggaaggccagaccggcggcatgaacgtcatggtcatgaccaagggctcgaagaaccaggacctcgcgctgcagttcatggatttctggctctccaccgagacccagaccaagctcgccgaaaagctggtcgacagcccggccaacagtcaagtgaaggtttccgacgaggccgccaacaacctcacctacggcgaggacacggtcaggaacctcaagctcatcccgtccgccgccgccctcgacaaccgcgccggctggctgaaggaatggaacgacacggtcggccagtaacggccagccaccatcaggacggctccggcaccatccggagccgcgtcatgcgattgctctgaaagacgcctcatgtttcaaaaccgcacggaagccctggcgcttgccctgcccgcggccctgttcgccgcgctggtcttcctgctgcccgtcgtcatccttctctccgaaggcttccgcatcgacggcagctggacgctcagcgcctataccggcttcttctcgcaatcgctgaaccgcacggtcttcctgcgcaccttgaagctcggcctcgaagtgaccgccgtctccgccgtcatcggctacgcggcggcattcgccatcgtcaacctgccgcccaagggcaagggccggatgatcggcctcgtcaccctccccctgatgatctcgcctgttgcccgcacctatgcctggatcgtcatcctcggccgcacgggcatcgtcaaccaggcaatccagggcctcggcctcagcgatacgccgctgcgcctgctcttcaccgagacggccgtcttcatcggcctgctgcagctcttcctgccgctgatgatcctgtccctgatcagcgcgctcgaaaacatgccgaaggacgccattcccgccgcccgcgtgctcggcgccaactggttccaggtgttctggaaggtgatcctccctctgacccgcgaaggcctcgtcgtcggcggcacgctcgtcttcacgggctcgctcaccgcctatatcacccccgccgtgctcggcggctccaaggtgctgatgctggagacgctgctctaccagcaggtctccgtcgccaacgacttcgtcgccgccagcgtcatcgccttcatgctgatcgtcatgagcttcgccgccaacatcctgttgaagcgcctggccaccgccagaaacgcgagcgggaggaacaagcgatgacatcccgcatcctctcgccgctggtgctcggcctgttgctgatcttcctgatcggccccttcttcatcatcatcgccgcctcgctgtctgccggcgatacactggccttcccgccgcagggcctgtcgctgcgctgggtcttcaaggtcttcaccatcgacagcttccgcgacagtttcgccatgtcgatgctgcttgccgtcggcggcacgctggcggccctcgtcctcggcatccccgccgcctacgcgctgtcgcgctacaagctgccgggcgccgaaaccatccgcaccatcgtctcgctgccgatcatcgtgccggggatcatcgtcggcctggcactgctgcgctatctggtcgtgcccttcggcttcaacatcacgctggcgctgttcttcgcgcacaccgcactcgtgctgccctatgccgtgcgcgtcgtctccgccagcctcaacaacctgcgctccgatatcgaggaagcggcggtcctgctcggctcgtcgcgatcaggcgccttcttccgcgtggtgatgccgaacatccgcggcggcatcctcgccgccttcatcctcggcttcgtcaccagcttcaaccaggtgcctgtctcgctcttcctctcaggtcccggcgtccgcaccctgccgatcgacatgctgggctacatggaaaccacctacgacccgtcgatcgccgccctttcggcgctgctcgccttcctgtccatcggcatcgtcttccttgccgaacgcttcctggggttctctcgctatgtctgacacctatctgcaactcgacaagctcacgcttgcctacggcgatacggtcgcggtgaaggatctagatctctcgatcaaaaagggcgagctcgtcgccctccttggcccctccggctgcggcaagaccacgacgatgcgctccatcgccggcctgctcaacccggcctccggccgcatcacgctggatggcgccgacatcacccgcgtctcggccaacaagcgcaatgtcggcctggtcttccagtcctacgcgctgtttccgcatctgaccgtctacgaaaacgtcgccttcggcctgcgcctcaagggcatcaacggccaggatctcgatgcaagagtaaccgcaggtatcaagtccgtcggcctcgccagtttcgccgcccgcaagcccggcgaactttccggcggccagcagcagcgcgtggcgcttgcccgttccatggtgatggagccgaaggtgctgcttctcgacgagccgctctccaatctcgacgctcgcctgcgcctggaaatgcgcgccgagctgcagcgcgtccagaaggagaccggcgtcacgatgatcttcgtcacccacgaccagatcgaggcgctggcgctcgccgaccggatcgtggtgatgctgaacggcggcatcgagcagatcggcacgccggaggaaatctacaacaagcccgtctcggccttcgtcgccgatttcgtcggcttcgaaaacgtctttgcgctggaaaacggcaagctcgcgacatccaactcactcgtcgagctttccgctccagtgccacaggccgccaaaggcctggcctggcgtccgcgcatggtgatccttggttcaggtcctttccagggcaccgtgcgcggcacctcgtttgccggcaacgtcagagaatatctgctcgacacgccgctcggccccatcaaggccgaggtcgatgccggcgagccgagccactccatcggctccacgctttctttcgatctgccgctcgcggccgctgccccactctctcgctacaggtaatatcatgggcgtctggatcgacaccgacatgggcttcgacgacatcgccgccattctggtggttgaacatgccaagctcgacatcgcgggcgtctcgctggtcttcggcaacacgccgctgccgcaggtacgcagaaacgcagccggcgccgcaaaggccttcggctggaccttcccgatccactccggccgtgcctcagccgtgcttggggagatcgagaccgcccaggccatcctcggcgatacgggcatcccgacatcgggcaagacgctgcccgaagccgccgcgctgcccgacagctgcgccttcaccgcgctctgcgactggctcgagcaggacggtccgcaccgcatcctggcactcggcccgctgacgaatatcgcggcccttgcgctcgcccgccccgatcttgccgcccgcatcaccgagctcacctggatgggcggcggcgtcacatcaggaaaccacacggcatcggccgagttcaacgcgctggccgatcccgaggcgctggcgatcgtcatcgcctccggcctgccgctgcgcatggtcgatctcgacctctgccgcaaggtcatcgccgtccccgatgacgtcgccccgatccgcaaggccggcggcgccaacgccgagatgctggccgatttcctcgacggctatatcggcatcggcaccagccgtggccgcttgggcatggcgatctacgacccctgcgccgccgtcgccttcgcccaccctgatatcgtcaccttccgcgcagcccgcatcgacgtcgagctgcagggcaagctcacgcgcggccgcaccgtcgtcgaaacccgcgccagccacgtcaagccgaatgccgactacgccgtcgagatcgacagcgaggccgcccgcgccatcatcctcggcgcgctccagcaggaggccgcccgatgagccagttggaaccaatggacctcagcgatcccaagctccgcgcccgcgccgttgccgccgcgcgcggcgatgcgcccttcgacgtgttgatcacgggcggccagctgctcgacgtcgtcaccggcctgatccgcgacgccgatatcggcctcgtcggcccgctgatcgcaagcgtgcacgcgccgctaagccgcaaggacgcccatgaaacgatcgacgcccgtggcagcatcatcgcacccggcctgatcgatacccacatgcacatcgaaagctcgatggtgacgccatcggcctatgccgccgccgtcctgccgcgcggcgtcacgactgtcgtctgggacccgcacgaattcggcaatgtccacggcatcgatggcgtgcgctggtcgatcgaggcaacgcgcggcttgtccctccgcaccatcctgcttgccccctcctgcgttccctcggcgcccggcctcgaggtcgcgggtgccgatttcgacgcttccgtcatatcggaattgctgcgccggcccgagatcggcggcgttgccgaagtcatgaacatgcggggcgtcatcgacggcgatccgcgcatgaccggcatcgtcaatgccggccttgcatccggcaagctggtctgcggccacgcgcgtggacttgacggcagcgacctcaacgccttcatggcggcgggcgtcacctccgaccacgagctcacctcggccgacgatctcctgctgaagctcgccgccggcctgaccatcgagctgcgcggctctcacgatcacctgctgcgcgaattcgtggcggcgcttgatggcatcggccacctgccgtccaccgtgacgctctgcaccgacgacgtcttccccgacgagctccattactgcggcggcctcgatgacgtcgtgcgccgtctggtcagctacggcatgaagcccgaatgggcgctgcgcgccgcgaccttcaacgccgcccagcgcctgcgccgccccgacctcggcctcatcgccgccggccgccgcgccgatatcgtgctgttcagggatttcaccgagttcgaaacatccgccgtcttcgccaacggccgcctcgtctcgcgcgacggcaagatggcggtcgacctgcccgccgtcgacagcacgccgctgcagcactccgtcaagctcgaggcgctgaccgagaacgatttccgcatcccctccgaaggcagccgcgtccgcgtcgccaccatcgaccgcccgcgcttcactgagtgggcgcaagccgaaaccgccgtcgaggacggttacgtcgtcccgcccgagggcagcgcgatgatctccgtcgtccaccgccacggcaaggtcgacgcccgcccgcgcatcggcttcctcaccggctggggcacatggcgcggcgccttctgcaccacggtctcgcacgacagccacaacctcaccgtcttcggcggcaatgtcgccgacatgaccatcgccgccaacgccgtgatcgcggccggcggcggcatggcggtggtgcaggacggcgagatcaaggtgctcttgccgctcccgctctccggcctcgtcaccgaggccccgctcgaacaaacggcggaaaccttccgcgccgtacgccgcgccatggaagacgtcgtcgactggaggccgccctacctcgtcttcaaggcctgcttcggcgccaccctcgcctgcaacctcggcccgcaccagacggatcgcgggatcgccgatgtgctgacgggacgggtgatggagacgccggtgattgaggtgttgtagggggccgttgaggatggttggcggcgtgccgcgtggccccctcatccgcctgccggcaccttctccccgcgggggagaagagactcgcggtggccactcgcccagatctttctcgtttgcgaaaaggacgtcaagattgggcgcgccggtgcgcccagccccttcgccccagcggggagaagtgccggagcgacagcgaggcgatgagggggccacgggcgcaaacggtgctactccagcaatatgcacaccacaaaaccccgcgcccgagcaaggcccggcgacggtcggctggcgtatccccaaaaaagggaatgggcaggcggcatcgtatggatagtatgggtatcaggcatttccgcctgcccgatcgcgtctgggtttccggttcgtccgggccgacaggagcgtctctcggcctttccttgccggatggatatcaggccctgacagcccttgatccacctgtggcgaccatcatcgaaggccggataccaaacctggcgttaccggttcgcgaacccggctccctgtccgatgacgtggccattgtggagcgacaccggatgacggggatgaatgagcgcgacgatttcggccaaggcgctgattgccaaacgatatttgtggcgcgcggcattaaattttgcccgcccgccgcaagcgacacccctcaccccgcagccaactcccgctccaccagccgcgtccagaacgccacgcccggcccgatcgcgtcatcgttgaaatcgtaagccgtattgtgatgcagcgccccatccaccgccgggccgttgccgagccagacgtagcagcccggcgcctgctgcccgaagaaggcgaagtcgtcgccggccgtcgagggcgggaagtgtgtcaccaccttctcgccgaatacgtctgaagccgcagccagcgcccgctccgttgcgttggtatcgttgacgacaggcggaatgcgccgttcgaagccgtaatcggcggcaatgccgaacatcgctgccgtgccctccgccagccggccgatctcgtgctcgagctggtcgcggacatcgggcgaataggcgcgcgccgtgccgccgatctcgacaatgtcagggataacgttgagcgccttggggtcgcccgcctgcagcgagcaggcgctgacgacggccggctgcagcggatcgacgacgcggccgacgatggtctgcagcgacgagaggaacgtgccggcggccgtgatcggatcgcggccgagatgcggcttggcgccatgcgtgccggtcccccggaaggtgacgcgccagctgtcggaagaggccagctgcggcccggcgaccacggccatctcgtcgaccgcaaggcccggcatgttgtgcagcccgaaaacggcgtcgcaggggaagagctcgaacagtccgtcctccaccatccgcttcgccccgccgcgtccctcctcggccggctggaagatgaaatgcacggtgccggaaaagccgcgcgtggccgccagatgccgggcggcgccaaggagcatcgtcgtatgcccgtcatggccgcaggcgtgcatcttgcccggaacggtcgacttgtagggccgatcggcaagctcgggcatggcgagcgcatccatgtcggcgcgaagcccgatgcggcgcgtgccgttgccgacctgcagcgtgccgacgacgccggtgccgccgagcccgcgatgaaccttgatgcccgcctcgtccaaaagtttggcgacgatctcgctcgtccgcacctcctcgaatccgagttccggatgggcgtgcaggtcgcggcgcagcgcggtgaggaacggcagatcggcttcgatctcggcggaaataggcatgcgatggacgatcccgtaaatgcagtcaggcgccagggcagcgcccgtcagagaggttatctatcaggcaaaggagcggcgaattcaacctttcgcgagtgcagcattggcgtgtgcggcgccgttgccgccgatctcccacgtttgtgaacgcgtggagaatttccggcgtcgcacgacaacttgacagcaaccgcgctcgggtgacgtaatcccttcaacgcgaaaggccgcaccatgagcgacgaccagatccccgccgatagcaagctcaccaattcgaagcgccgctgggccgacgaaggcaagttcctgaccggccgcacgagtaggcctgagaccgaccggctaccgcccggccagcatctcgtcaagaactggccggtgctcgacctcggcgaacagcctgttgtctccaccgacacatggcggctgcaggtcggcgggctggtcgagaccccgctcgatctcggctggaccgcctttcaggcgctggaacagaccaccagggtatccgacattcactgcgtgacgacatggtcgcgctacgacaacaagtggaagggcgtcgccacgcgcgatcttctcgacctcgccatgccgaaggcggaagcgacccacgtcatgctgaccagctatgacggctatacgaccaacctgccgcttgccgatttcgccgccgaagacgccattctcgccacctcctgggaggatctgccgctgagccgcgaacatggcggcccgatgcggctgatcgtgccgcacctctatctgtggaagagcgccaagtggctgcgccgcatcgacatcatgccggcggacgcggccggcttctgggagcgtaacggctacagcatgtatggcgacccctggcgcgaacagcgctatgccgacgactgatcgcctggcgttggttaagccgcgcacgcctgccggggacaagcgcgtttaacgcgcattccctcgcgtcttacgcaaagatttactcgcctctacattgaacattctgttcaaacgaatcctttagtgtaagttggccgcagaatggtgcaccgcatgaacccatcctgggttgttcggataacctgtcgcacatttcacgcctgagttgatgaccaaggacacgtcgtttcacaccgtcacgcagaagcttctcgacgcctggctgagtacgtctccgcatcagccgggcacgccggacgccgtctatcgcgacgcgctcgacctgctgacgctcaagatgcgtctgacgatcatcgtgctcgagggcgacgatccgatggactggcagctgcgggtcgtccgctcctccggcttcgcgtcccgcatccttaacatcaacaagctcttcgcgaaccagcgcatcggcgacttcaaggatcgcagctacatggagacggcggtcattccgcgctatcgcgaggtgatcgcctcgcagaagccgtcgatggaaatggtcaagacaaggctgctcggcgtcgacatcgcctacgagcgcatggtgctgccgcagaggacgaccgaggcgcgaccggcctggctgctcaccgtcaccaatggccgcttcatgttcaacgcgcccgagcggcaggccaagctcgacgtcaccgacgaagccgtcgtgcagctgctggccgagggcgcgaccgccaagcagatcgccagcgaactcggcatctcccaccgcacggtcgagcacaggctggagcggatgaaggaacgctacggcgccaagaacacggtgcacctcaccgccatgctggtggcgatgcacctgcaccgcgagaccgaccggaactagatgtttaggcaaggcaaagccccggcggaccggggctttgccttctccttagcgaagaaccggcgcggacgcgcggcgaacacccggcgcggccgagagcttgcgttcggcaagcgccccgaaggcaaggccgatcaccgtccagaggatcgcgtgcatgccgatcgaggtggtgcggaaccgccagaggagcatcgccggatagttatccggcacctcgttgatcgcaggcagaagatagagcaccgcgccgatgaacaggacataggcaaatccggccgcgatcgcgccattccacgctccgagcctgggcgaaagccgccgggcaaggacgatcgcggcaaccagcgcggcgatcgacaccacgatcatcaggaagaacagctgggtcctgacctcgatggtctcgggacggccgaccgcgggcggattggcgggatacttgatggcgggcacgatgacgatggcaacgaaggccagggccgcgatggcggccgaggtcgcccgcgcgccaaggctgctgacgcggccctgcacgaaggtgaagatcagcgcgaaaatgccgccgatggccatgccgtaggccgtgaccgcgatgaacaggccaatgcccacctgtacggtccggctgaacaattccggttccggcgcctcgcccgcggcttgcgccgctgcttcctcgatagcgatcgactgatcgacgagcggcccgccgaaggtgtgggcgaaggcaaacacaaggacgccggcgatcaggcccgccagcatgccgcgaagcaaaagttttccaaccatatctcaaactccctcaaagcatgtcgcgcgaaagcgtgcagcgcttttgcggcaacgacatgcgacaaaacaaagacttgaagcgtaacgagcgaaccctgcggatcgcgacacgctttagtggcaggggaagccgagaaggtgtcggccgtcatgtacgaattcgtgcacatacatgccgtcgaacagcgccatcgcgccttcttcggtgccgacgaaatagatggcgatcagcatcagcaggccgccgaaaatggcccatggcaggatgtcgccgacgggaatgggtgcggccaccgaagtgggcgcgagcgtggtacgagacatgaattcctcctggaataacgcgttcagtcgagaatgttcgtgggtagggtctgacttccagtctgaggtatcctcatcctgatcacagtggcgcgaccgcaccggaatttcaccggcttccaaacctacggaatcgacgatatagctgcgaccccgggcctgtcaacgcactgtcacacagggcgggcggcgcctcgatgacgaggagaacagcaagcgtgatgacgcgcctcaccttcatctgccacggcgccaccgacgccatccggaaagcgcgtttcccgctcgacgaagcgctggaggagaaggcgatcgccgggggccgggcgctggcctcgcgaatgccgcgcgccgagcgcgtcttcaccagcccggcgctccgcgcccgccagaccgccgacgccctcgggctggacgcaggcgtcgttccggccttgtccgactgcgattacggccgctgggccgggcagccgatcgcggcgctgcacgagagcgagccgcacgccctgtccgaatggctgaccgataccgacgcggccccgcacggcggcgagagcatccgcgcgctgagggaccgcgtcgagccgtggatgcgggcgcagtccgcgcagggcggccaggtgatcgccgtcagccacgcccccgtcatcagggtcgcggccctgatcgcccttgcggcaccgctgtcctccttctggcatatcgacgtcgaaccgctttcagccatcgaaatgaccagcaacggcgcacgctggtcgctgcgcttcgatcgcgtgtagacgcggagatttcacatcttgaaatttagataagccttgcgcaagccaattgcgcgaaagctaattcgcctggcatttccaggtgataatccttcgtaaaaggaggcctgaccatgtcttacgattggaacggggcgcggctgagacgcacgcgcctcatgcggctcaccggcggcgcgatcttcctgtgccttgctgtcaccgtgtccatactgatgcgactgtagaccatgcggacagcgggcgaacgactgcgttcgcccgtttcctctcccttgaggcaggtatttcaacagatcgagatacgcctatgggtaggtgaggataactagaagtcacctcctagtttcaacggatactttagacttccatgctatatctcttgaaggtggagatggagtgggagcatgccggcatttttccggagcagagccggacggcagtggctgtccctcgtggtgcttggcgcggccctgtgggtcgtgggagcgctgctggaattcggcgaactgctcgcctggttcgtccagcaattcgataactacggcgccgacaagctggtgctggcgctcgccgtcggcggcacgatgagcttcgtctattccgtcctgcgcatcaccgatcttcgcaaggaaatggacctgcgcgccaaggcggaagccagggccgactggaccgcgacgcatgaccacctgaccaagcttcccaaccgctatgccttcgagcgcgccgtgctcctgcaccggcgcgcgcagatcgacgaatacagcgaggaatgggcgcgcaacgtcagcgtcttctgcgtcgatctcgacggtttcaagaaagtcaacgacctgatcggccacaatggcggcgatgcgctgctggtcgaggtctccaagcggatctgcgccatcggcagcgccgactccgtctatcgtttcggcggcgacgaattcatcatcgtcgcgaccggcctgtcgtcgcagcacgaggagcgcctgtcgcggcttttgatccaggccgtgacgcgcccgatccacatcaacggcttcgccgtcgaagtcggcgccagcgtcggttacgaccgctggcaacagggcgaacggctggaagacaccgcccaccgcgccgacctcgccatgtacgaggccaaatcgcgcggcccgaacaactatctggccttcgaggcatggatgcgcgacaaggtcgcgctgcgcgcctcgctggaagccaagctgcgcctggcgatcaaggacaaggcgatccgcccgttctatcagccgctgatcgatctgaagaccgacgaggtctgcggcttcgaggcgctcgcccgctggaccgacgacgaaggcaacagcattccgccttcggtcttcatcggcatcgccgaggagaccgggctgatcaccgtcctgttcgaggatctgctcagccaggcctgtcatgatgcactcgcctgggacgatcacatcacgctgtcgttcaacgtctcgccggtgcagatggaggaccgcctgctgacggcgcgcatcttcaaggcgctgacggtaaacggcctgccggcccaccgcctcgaaatcgagatcaccgaaaacgccctgatccaggacccctccagcgccgccgccgtcctcgacgaattgcacgatgccggcgtgcagatcgcgctcgacgatttcggaacgggctattccagcctgtcgcagctcgccaactaccgcttcgacaagatcaagatcgacaagagcttcaccgccacctatcgcgacgacgagcgccaggaaaagatcgtgcgggccatgctcgcgctcggcctcagcctcaacatcaagaccaccgccgaaggcatcgaggagccgcgacagctcaaccacctgctcgagctcggctgcgatgtcggccagggctatctcttcggcaggccgatgcccgccgacgaaatcggccccttcctgcacgcgagaaacaggactttggcggccgaataggcaccaaccgggccttttgccgtaaaattagctatttgtgatggaaccatttaagatgtggcgacgttggtacgtcgggtcgcataggcgccattgtctgcggcatgccctcggcttgccagatgcagcgatccacggtcgggcaccgcggttcccgacaattcagtcaagagtgtacccttattcataggagagggatcttatcatgaatgttcgtatcgtgactgcgtcagcagcgcttctcatgatcgccgggtcggcctcggcggcagacatcgtcgcggaacagccgcccgcaccggtcgagcaggccgcgccgctctttacctggaacggcttctacaccggtatccagggcggcggcgcctggggcaatggtgatttctccggcatcggctcgtccagcatgaatggcggcctggtcacgggtttcgccggctataactggcagctcgacaacagcatcgtgctcggtctggaaggcgacgtctcctacaactggaattccgaggacgtcggtcccaacagctacaagttcgacacgacgggatcggttcgcgcccgtgtcggttacgcgcttgaccgcgccctgctctacggcgcggccggctggaccggtgcccgcggcagtgtcgatacgcccgtcggcagcgacagcgccaccttctccggctggaccgtcggcgccggcgtcgactacgccttcaccgacaatgtcttcggtcgtgtcgaatatcgctacaacgactacggcagcaaggatcttctgggcgtcgacaccgacttcaaccagaatgtcgtgaccgtcggcgtcggcatcaagttctgacccagcatgcttggcggctgaatgccgcctgttgaaagagcccggtcccgcaccgggcttttccatgtctggaggcctcatcggtttcgacagggggacgtaaagccaccatcggacgcgaaaaacctgtgggatatctggggatcgcgccccgctttccttgtccgactcaccgtcggaaggtaagaagaggctaatacaaggccgcgtgaacaggccgatccgttagtatgttatcaacctctaacgcataaaatttccataaaattcaacaggataggatgccgccgcgtgcccactcggcgagccgaaaggtatgatgatgcggatatcattcatgatttcagtattggcgacgatgctgatggccttccccaataccggcacggccggctccgcgctgcgcgcctcccgcgcgatcggcgcgccgatcggtttcccctccgcgtgcacccgctatgcctggctgtgccgcaataccagcagcggcgacatcagcgacgaaaaggcgatgccgcttctgaagaagatcaaccgcgatgcgaattcgagcgtcaggccggcgacggactacgccacgacgggcaaggcggaatactggtcgctcccgatcggcaacaggggcgattgcgaggattactccttgctcaagatgaaaacccttctcgacgcaggcttccccgccaacaaactcgccatatccgtggtcatcgaccgcaacggcggcaaccacgtcgtgctcctcgcccgcctgaagtcgggcgactacgtgctcgacaacctctcgggcagcgtcaagccctggtccagcaccggatatacattcctcgccagccagaacttcaacaacaagagcgcatggcaggtgacgcttgccggaccgcgcgcggcccagttctccggcacatgaacggactccgcacggaaatcgccggcatccgctacgcgcccgacgacatcgtgttcacaccgcaaaagcccgggcacctcgcccgggcttgatgtttgcgacggagaaatggcgcggcttcggtaaaccgccgccatttcccgagcgaggcagacgcgaccagtgcttagctgccgctcttgccgccggcaccgccagcaccgccgttgccgccggagccgccgttggcattgccgccgttgccgccggagccgccgttgccaccgccgttgccgctgccgccactgccgccatcgccgccgttgccgccgccgccaccgccgctgccgttgctgccgccgttggagccattgccgccgttgccgccgccgccgccgttaccgccgccgttggcaccgccattgccgccggaaccgccggaaccgccgccgccaccgccgccgccgccgctgccgctgccgccgttaccgccgctgccgccgttgccgccggaaccgccgttaccgccgccgttggcgccgccattgccgccgttgccggcattaccgccgctgccgccgctgccgccgccattggagccgccgctgccgccgccgccaccgttgccgcctttaccgctgctgccaccgccgttgtcgccgccattgccgccattgccggcattgccgcccttaccgccgctgccaccgaaggtgctgccgccattgccgccagcaccaccgttgccgccgtcgccggcattgccaccgttgttgctgccgcccttgccgccattgccggccttgccgccattgccgccgtcaccgccgccatagcttccgccattgccgcctttgccgccgttgccgcccttgccgccgttgccgccacggttgttgccgccgttgccgccgttgccggctgctccgccgttaccgccgtcgccaccccaccagctgccgccagtgccgccgccgccgccgttgccgcccttgccgccgttgccgccacggttgttgccgccgttgccaccgttgccggccgctccgccgttaccgccgtcaccgccccaccagaagccgccattgccgccgccgccgccgttgccgccgttgccgccattgccgccgcggttgttgccgccgttgccgccgttaccggcagctccgccgttaccgccgtcaccgccatggttatcgccgccattgccaccggcgccgccattgccaccgcttccggcattgccgtagccgttgccattgccgttgccgttaccattgccatggttgtggccgttgccattaccattgccattgccattgccgttaccattgccattgccatggttgtggccattaccattaccgttgccattaccattgccgttgccatggttgtggccattaccgttgccattgccgttgccctggccgtttccattgccctggccgttaccattcccgccgggatcgactatcccggcgcctggggcggcgctcgccgtatcgctgccgccattgcggttgttggaagaaccgttgtctccgttccgtccatttcgatcatggttggaatcgaggaagggattcacttcgaaaatcgactgaaccggaaagcacagtcgctcctcgatcgatcccggctgcacgtttctgcaattgagattgagcgcctgggcgctccctaggctcgttcctgccagcagaaatcctaagctgacagagagcttcaatagtgttctgttcatttcgctcactcccatcgttaacgtggcgttaaccagggaatttttatatgagtgagcagtaaattaggaaggacaaataaaaatgaagagcgtactcatttcggctgcaattgcattatttagtataaaagcatcatctaatagtagataatcgcggaacctctgaataacacaaggagctttatatgcggagaattgcggccattctaagttttgttatcggtattcctttagtttctagtcagagttttgcaggatccgaaattcccgccagccgttctatagctcctcctgttggatttggacaagcctgtgccaaatacggatgggtttgcaacggcgcgggtggtgtcgatgttgatgacaaggaggcgcttcgcgcgattcaggcggtcaatcgctacgtcaacgcgaaggtgaagccggccgaggaccgggcgacgagcggcaaatccgagaactggacgctgccgatcaacaacaggggggactgcgaggactatgcgctcctgaagatgaagacgctgctcgatatcggctttccgaccagcaagctggcactttcggtggcccttgatcgcaacggcggcaaccatctcgtcctgatcgcccgactgaagtccggcgattacgtgctcgacaatctcgcctacagcgtcaagccgtggcagcgcaccggctacaccttcctcgccagccagaacttcaatcgcaaggctgcatggcaggtgacgctggcggggcctcgcgccgcgcagttcaccaagggctaggcggttcgtcggcgggcgagtttaggaaacctgaggtagcaatccgtgcctgggcgggcaagccaggcacggcggcccgtccggctgtgcggttccaaacgcttaatccgcgccacgggcgcagaagatgatcgcggcccctgcgaggctgatcagcaacccgccgaacatccaccagtctgtcgccgacgacctcaggctgccgtcgccgataaagccgctcgcatgcgccgccagcgcggcgccgcccgctatcgcggcaattccaagcaggtaaagcacggaccgcatcatcaatcctgcaacgaaccgtaaaatcccgggcaagcatgctcgcccggagctaatacgcgcggacggcgaaaaagttgcatcgccgccacgcagaaaaagttgcatcgccgccacgcaatagccggcttagagacacgaagaggcgaggacatgtttttttggtggcggaacaatacgatccgacctatcgttccctttaggcaatggaggttgccgaaggagggaaacatgaacgatagcgttgttggctttctggtcgccgcggaaatgtccgcccttttctgggctggcgtgtttttggtcgcagcgactttttcctgagacaaatattattgtcttgaagcggtgttatcactggaagaatggtagcggggggcggaattgaaccgccgacctcagggttatgaatcctgcgctctcaccaactgagctacccagccacaccaccgacgatgccgtttgcaatgcgcccggcccgtggaatgagcggcttataaggcgcgcctcactgtcatgtcaagcacatgatcgagaaaatcaccgggcttttgtcacgccgccacggcgcccgccaagagcgccttcagcgacgcttccgccgccggctcgcgctccgagcgctcgatgaaaccaccgccatagacccgcgcattgtcgcccggcgccgagtagagcgcgcaggcctgccccggcgcgacacccgcctcgcccaccgcgagatcgacatagatcccggtgtgatcggcatgcagcacggccggcgtcggcatgcgggtggagcgcaccttggcgaagcaggcaaagccctcgcccgatgccgcctgcgcgagttcctcgtcgcccagccagttcacgtcgcgcagatagacgcggtgcgtctccagcgcttccttggggccgacgatgacgcgccgcgagcgggcgtcgagatagacgacgtagagcggctcgccggtggcaacgccaatgccgcgccgctggccgatcgtataatgcaggatgccctcatgctggccgagcacccggccgtcgagatgcacgatctcgcccgccagcgccgcgttcggcttcagcttgttgatgatgtcggtgtacttgccctgcggcacgaaacagatgtcctggctgtcggccttcttggcgacgacaaggcccatctcctcggcgagcttgcgggtctccgccttcggcagtccgccgagcggaaagcgcagatagtcgatctgctcctgcgtcgtggcgaacaggaaatagctctggtcgcgatcggcgtcagccgggcggtagagcgcacggcggccgggattgccgggcgccgggttggcgccggagcggatataatgaccggtcgccagcgcatcggcgccgagctcgcgcgcggtctcgagcagatcggcgaacttgaccgtctggttgcacgacacgcaggggatcggcgtctcgccggcgacatagctttccatgaacggattgatgacggtgtcgcggaaacgcttttcgtaatccagcacgtaatgcggaatgcccagcgtttcgcagacccggcgcgcatcgtcgatatcctggccggcgcagcacgagccggcgcgatgcacggccgcgccatgatcgtagagctgcagcgtgatgccgagcacgtcgtagccttgccgcttcaaaattccggccacgaccgagctgtcgacgccgccagacatggcgacgacaacgcgcgtatcttccggcctcttgtcaaaatccagtgtgttcacgggggtgctgccaattcaaatgggtgtctcgatccgccctatcctacagaatcttggcggatttgcatcgcgaccgacgggatcgaccgccagttcttgtctggccgtggatatagaaaggattggaggcgcgtgcaaggggcggcgattctggggtggtggtgggcgttttggcgtgtggcgcttggtctcatgactgttgtgccgtgagatacccccctctgccctgccgggcatctcccccacaggtggggagatcgactcgtggtgaggtctccgccaaacaatgaaggtgaagtgagcggcggcccctagccaatctccccccttgtgggggagatgtccggcaggacagatgggggtattccacggcacaccctctccaaaggcacaccgaactcccacacctcaagccgccgtcgaagccacaacgcccccgcccgcaatcaacctgttggcctcggcaagcggcatcggcttgcccagcagatacccctgaacctcgtgaaacccctcctggcgcaaccgcagcagctgcgcctccgtctcgatcccctcggcgagcgtcgtcgcgttgaagcccgagccgatgccgaccacggcgcggacgatcgccaggttgccgggatcggtgtcgatgccggcgatgaagctgcggtcgagcttgatcttgtcgaaggcgaaggcgcgcagatagctgaaggaggaatagccggtgccgaaatcgtcgatggcgatgcggatgcctagctccttcagcgacttcaggagcggcaggctctggccgacatcggcgaggaaaaccgattccgtgatctcgatctccagccgctccggctgcaggccgctctcgtcgagcgccgaaacgacgctggcaagcagaccggtgtggcggaactggctgaccgagagattgacggcaatcttcaggttcaggggccagtccgccgccgtccggcaggcttcgcgcagcacccactcgccgatcgccacgatcagcccggtctcctcggcgacgggaatgaactccatcggcgggatcagcccgcgctcgggatggttccagcggatcagcgcctcgaagccgcccagccggtcgttttccagctgcacgatcggctggtaatagagctcgaactggttcttctgcagcgcctcgcgcagttccgccgtcagcatgtgccggcgttccgcctcgagccgcatcgacggctcgtagaagcggtaggtcgagcggccgctttccttggcggcgtagagcgcgagatcggcatgccgcatcagcacgtcgtcgtcctcggcgtgatcgggcgccagagcgatgccgatgctgcaggtcacatgctcgttgacgccgtcgagatcgaagggagaggacagtgaggcgagcaggcgctcggcgaaacgctcgatgcagccgggctccctgaagcccaccaccagcgcgaactcgtcgccgccgagacgcgccaccagatcgccctcgtcggcgagatcggtcagccgcccggccacctggcagagcagcgcgtcgccggccgcgtggcccttgctgtcgttgatatgcttgaagtgatcgacatcgagatagagcagcgccaccggcttgtcggcggtggcgcaggcggaagcgcgcttgatatgctcggcgaaagcggcgcggttcggcaggccggtgaggacgtcgtgcatggccatgtaggcgagccgcgcctcgacggagcgctcctcggtcacatcctgcgaaatgccgagcaggtagcgcggggcgctgccatcgggcgacggcagggcgcgcttgacggtcctcaagatccgctgctggccgtcggtgcgctgcatcgtctcttcgaagctgatcgccgccggcgccgcgaaggcacgggcatcctgctcgcgaaacgccgcggtctggtccttgtcgaagaaaatgcgatcgctgtggccgaccacgtcgagagactgacggccgacgatgtcgccgcaggcttcgttgaagaggatataaagaccatcggcttccatgtccttgacgaacacgccgaccggcagattgtcgacgatgctgtcgagcagcgagcgcgtgtcgctgatctcgcgatgcgcggcattgacctcggtgcgatcctgcacgatggcgaggatcgcgtcgcggccgttgaaccgaacgccgcgcccgtaggtcagcacctcgagcatggtgccgtcggccttcagatgcgtccagcgctcggcccgctccatgtcggagcgcgcatgcacggcggcgatcatccgctggcgctcgtgcgccgggcggatgtcgagcacggtcatgccatcatagacctcgcgcgagtagccatagagatcgacggcggcgttgttgacgatcaggaagcgcaacgtatcagggtcgtagacccacatcggcgacggatgggttgcgaacagagactggaaatcatcattgggcgtatcggtcgaagcgaatgctctctgaatacctgtcatcggcgatgtcacatgaatttgatggctgatttcaccagtaatagtgaaaaaagctaaataaaatcagaatcatagttcgcacaaactttaggcgaaccgccctcgccatgggcatcggcaaccgcttgtcatgacgtttcgcagcttttcttcacaccttggaaaggtctgcccaaagatcgaccagctcaatggcggctatgctcgcattgcccgtgatcggccagaacctcgatcacccggcactcatcgacacggccgtggccgcatccggcgaccatcgcctccagttccaccttgagcgccgtcaggctgcggatgcgctgctcgacatcgacgagccgcgccttggcaatcgcatcggccgaagcgcagggctggttgggatcgtcctgcagcgtcagaagcgtgcggatcgcatcgacctcgaaaccgagttcgcgcgcatggcggataaacgccagccgccggatatcggcacgctcataggagcgctgattgccctcgctgcggctcggcacgttcagcagccctatgccttcataatagcggatcgtcggcaccttgacgccactctggcgcgatgcctcgccgatggtgatccttctcatcacgcgctcctttaactctctagtctctagagtaatatgggagggatacttgtcaatgacaagcaagcgatcgatgaacgatctggtcgatgtcggcttgcggctctaccgctggttttgactttccctgcgccagtgcgccgtgaccgcgaggacaaagcccggcccgccttccgtgcggggcgttgacagcctgaagctgcaaccgaaggcagcgattgtcacattctggaacctatccctttctcgcgcgtttgtcgctgaggaggagaagcaccatgaccaatgatttcaatcgtccgaatgccgcgaacaccccgccggcgaagagttcttcgaagaccatgtgggttgcaatcgcacttctggtcgtcatcgtcgccctggcggcgacctattggccaaggggtgcatccgctcccacggcatccgcgccaagcgcgacggcaccggtaaccgaacccgcggccccggcaacaccgcctgcctcgcaggccacgcctccggccgcgacgccaccggcagccgatcccgcgaccccggccccggcaacgccagcacccgcgacaccagcgcccgcaacgccggctcccgcgaacccgcagtaaaagccggatcaatcgcagacgagggaaagcccgccggttcaggcgggctttttcgtgcgaggccgtctttcaggcaaggccgatgcttgctccaggcgtcagttctggccggctttcagcacccggtgcgtgctgtcatcgagggcattgcccatctggcgcccgtccttggccagcccgttggcggtattggcgcaggaagacagggcaagcatcgaggtgagcgcgatggcgacggcaaatcgtgtcatgaaaatctccctagtgttcggaatagtgaagtggtcggccggaacggcacgcaatcagacagatagcgcccgcccctacgcgatcaacgccgccgcgagagcccgaaacagaaaacccggcacagtcgcctgcgccgggtctcttcacatcttccctgggaggaaagctcaatcaactgcaaatacgagcggcttggcctgtcggattgccggattggcggtcaattttccaagcacctcgtcgctgacggggccgtcgacatagagcagcgcaatcgcgtcgccgccctgctcgccgcggccgagctggaagttggcgatgttgacgccggcggcacccagcgtcgtaccgatgaagccgatcatgccgggaacgtcggtattcgagatgtagaccatgttggcgccgacgtcgccgtcgaggttgatgcccttgatctggatgaagcgtggcttgccgtcggagaacaccgtgccggccaccgagcgggtctgcttgtcggtcttgaccgtcagcttgatgtagccgtcgtagacgccggtcttgtcgcgcttgacctcggcgagcacgatgcccttttccttgatcatgatcggtgccgaaaccatgttgacgtcggcgacctggttgcgaatgaggccagccagcagcgcagacgtcagcgccttggtgttcatcgtcgcggtcgcgccgtcgtagaggatctcgatttccttgatcggatcgtccgaaacctggccgacgaaggcgccgagaacgtcggcgagcttgatgaacggcttcaggatcggcgcttcttcagcggtgatcgacggcatgttgatggcgttggaaacggcacccttgaccagatagtccgacatctgctcggcgacctgaagggcaacgttttcctgcgcttcggtggtcgatgcgcccaagtgcggcgtgcagacgacgttgggcaggccaaacagcgggctttccttggcgggctcgacctcgaacacgtcgaagcctgcgccggcgacatggccggacttgatggcttcggcaagtgccgcttcgtcgaccaggccaccacgggcgcagttgatgatgcggacgccgggcttggtcttggcgagattttccttgccgagaatgccgcgcgtcttgtcggtcatcggcacatgcagcgtgatgaagtcagccttggcgagcaactcgtcgagctcgaccttggtgacgcccatctcttgcgcgcgctcggccgagaggaaggggtcgtaggccagaacatgcatgccgagaccgatggccttcttgcagacgatgccgccgatattgccggcgccgatgacgccgagcgtcttgccggtgatttcgacacccatgaacttcgacttttcccacttgccggcctgcgtggaggcgtcggcctgcggcagctggcgggcaacggcgaacatcagagcgatcgcgtgttcggcggtcgtgatcgagttgccgaacggcgtgttcatgacgatgataccgcggcgcgaggcggccgggatatcgacgttgtcgacgccgatgccggcgcggccgatgaccttgaggttggccgcggccgcgatcagcttttccgtcgccttggtggcggaacggatggcgagaccgtcgtaattgccgatgatttcggcgagcttgtccttgtccttgccgagctgcggctggaaatcgacttcgacgccgcgatcacggaagatctggacggcggtttccgacagttcgtcggatacgagaacgcgaggtgccattgggggcttccttcaaaaaggttcaacgatggaatgtaatcgggattgcgaggctccgcttcgtgagcggagccggatgcgatcaactcaggcagcagcctgggaaagcgtcgccttctgggtcgaaaacgcccaggagagccacggcatcagcttctgcatgtcagaagtttcgatcgtggcgccggcccagatgcgtaggcccgacggcgcgtcgcggtaatggccgatgtcgtaggcgacaccttccttgtcgagcaggctgacgatgcccttggcgaagttcgcctggccgtcggcgtcgagcgccagaacgtccttgtcgatgatcttcaggcagaccgaggtgttggaagccgtctcggccttgaccgccaggttggcgatccagtcattggcggcgacgaagtcggcgatgaccttggcattggcgtcggcgcgggccatcaggcccttcaggccgccgacatccttcgaccatagcagcgcatcgatataatcctcgacgcaaagcatcgacggcgtgttgatggtttcgccggtgaagatgccttcgatcagcttgccgcccgaggtcatgcggaagatcttcggcagcggccaggccggtgcgtaggtggtgagacgctcgacggcgcgcggcgacaggatgatgacgccatgagcgccctcgccgccgagaaccttctgccaggagaaggtgacgacatcgagtttggcgaaatcgaggttctgcgcgaaggcggcggacgtcgcgtcgcagatcgtcaggcccttacggtcggcggggatgaaatcgccattcgggacgcgaacgcccgaagtggtgccgttccacgtgaagacgacgtcgcggtcgaaatcgatggtcgagaggtcgggcagatcgccgtaaccggcttcgatcttgcgcacgtccttcagcttcagctgcttgacgacgtcggtgacccaaccggcgccaaagctttcccaggcgaccatgtcgacgccgcgctcgccgagcagcgaccagagcgccatttcgacggcgccggtatcggaagcgggcacgatgccgatgcggtaatccgcaggcacttccagaatttcacgagtgagatcaatggcctgcttgagcttcgtctttccgatcttcgcgcggtgcgaacggccaagcggcgcgtcggaaagggcttcgagcgaccaaccggggcgcttcgagcaagggccagaagaaaaatgggtgttgttcggacggacgtccggcttcgcggtggcagtggccatatgtatacccttccaggtaattagcctctcgttggggagaggtgtcccgccgtcggatgtattcctgctccctgtcgcagtcaagcggaaaatcgtcggtaccggacaacgggtattgggacgccgattggcgatcacggaaacgtgacgaatgacaatcgcgcgcttgacgcagatcaaaccgaccacggcagaattgaagcatcactgatccgtaagcaaacacaggacatcagaaagagtgattgccatgaatgccccgaccactttttacagcaccaagaacaatttgatcattccattcatgtgcggcttctacgatcgcgtcgccgagcccttcgcatgggcggcgttgcgcatcgccgtcggcggcatgcttgtcatcgagggttggcagaagatcagccatcccttcgcccaggtgggattcgtcgagaatatcggcttctatcccggatggctgtggtcgccgctcctggccggcctgcagttcttcggcggctttctgatcgcgatcggcctgttcacccgtccgctggcgctggccaacaccgtgatgctggccatcacgctctggtttcacttcgccaatccctacggttcggaattcctgacaccggccggggtcgaggcgttgaagagcggcgccaccgaatacttcacgcccgcggccatgaagcgcctcagcgacggcggcggcgccttcctcagcgccgtccagaccaaggccgaactggcctcgctcttctggaccggcggcgccggcctgttcgcggccttcggcggcggcgccttctcggtggaccgtaccttgctcaagaaggaattctgatccggcttgaacgatcgcccgaaacgaaaaaagccgcccggcgattgtcgggcggctttcttttgatgctgtctgttatttgtagaccggctgctgcagcggaatttccggaggcggctcgtaggacgccgtctggcaaccgccgaacatgtagcgggcgccgacgcgtgcttcgtgaatgttgaaacccttgtcgcggcccgggccgccgttcaggttgtagccgaacatgtcgccgccattgacgcgcaggtagcggtagccgacgtcggccttgacgttgcaggtcacgtcgatcgacgcaccggccatcaggccgtagctgaagcgccagctgcccttgccgccatgggtgacggtgggatcgcaaccgatgccgctgccgctggtgtcgcaagacgtgttgttcaggtccttccacttgacgtaggtgccgccgatgccggcgccgacgtaaggcgtgacgtagccataggtgccgagatcgacataggcattggccatcagcgaccacgcggtcatcgaggaaatgtccgtggaggagcacgagaaggagcatgcgccgccgccgacaccggcgccgccgccgatagtcgaccccttgaagtcggacttgccgaggtagtcgagcgtcaggtcggtgcgcaggtagctgttgatctggtaaccgacaccgccgccgatggtccaggcgtcatcgatatcggcactgtcgaaatcgacttcgctggcattgctgccctggaaatatttcgcgccacgcagatcgttgaagccgtagccgacgtcgccgcgcagataccagcccgtcgcttcggtcacggtgacttccggcggggcgatcggttcggcgggcgcgaggtccgcggcgtaagaattcgaggcaatgagcaatgcggcgaagacgccggacaaacttctcttcatggatcccactccaaggttcgacgcctggcaggatcgaactccgccagttgaatacgtttcggtaaggataatgaagtggaaacgttaagcgctgcttaactgtaattgtgaaacatcgccttttactcaaaggcactatcaaaccgctgatatagttcgcattttattcatgcaacggccatccgtgccgaacgcggcgatggccgccgaagcgccgataaaatcgcccgggttaacaaagttaatagcggttccggccgcaagggcgtagggtgcatcgtcggtcaggactttaaggcaatgaccgcttgggagttactaagcgcttccgcccccttatggaggtgcgcccatgtcgaagctcaatagagctatttcgttcgaagatgatctgtcgcccgtgttcgaggccctgtcgctttggtgcagggagcagaaattcggggccgacagccttcagggctgcgcagccgcatccaggctgctcgacttcttcgaagacggtgccatcacgacaccagcgcttctcgagctcatgcgtcgggacgtgatctgacgaaatcgcgatgaaaatgaaaatgcccagctaaaggctgggcattggaatgcttgttgacggtgcctgacgcgtgtcaggcggccgtgcgcacgctcgagatcgttccgatcaggtcgttgacgatgcgctcgatctggctgcgatcgtcgccctccgccatgacgcggatcagaggctctgtgccggacgggcggatgaccaggcgcccgctcttggcgagctcggcttcggcttcggcgatcgcctgctgtacatgcaggtcttccagcggcttgccgccggaatagcgcacgttgcgcaggagctgcggcacgggctcgaagcggcggcagatctcgctgaccgtcttgccggtacgcttgacggcggcaaggatctgcagcgccgccaccagaccatcgcccgtcgtgccgtaatccgacagcacgatatggccggactgctcgccaccgacattgtaattgttgttgcgcatgtgctcgaccacatagcggtcgccgacggccgtgcgcaccaggccgaggcccttgccctgcaggaagcgctcgagcccgagattggacatcacggtggcgacgatgccgttgccgcgcagctgctggttgtcggcgtagctctcggcgatcacggccatcagctggtcgccatcgacgatcgcgccgttctcatcgacgatgatgacgcgatccgcgtcgccatcgagcgcgatgccgatatcggcgcgcacttcgtcgaccttcttctgcaaggccaccgggctggtggagccgcagttgagattgatgttggtgccgttcggctcgttgccgatgacgacgacttcggcgcccagctcccagagcacggccggtgccaccttgtaggcggcgccgttggcgcaatcgatggcgatcctcagcccctgcagcgtgacgtcgcgcggcagcgtgcgcttggcatgctcgatatagcggtcatgcacgccatcgacgcgcttggcgcggccgatatcgtcggacttggccagctgcgaggtcatgtccttttcgagcaggtcctcgatctgcatttccagatcatccgacagcttgtagccatccgggccgaagagcttgatgccgttatcctcgtagggattgtgcgaggcggagatcatcacgccgatatcggcgcgcagcgagcgcgtcagcatggcgacggcgggggtcgggatcgggcccagaacgaaggcgtcgatgccggctgcggtgaagcccgcgaccatggcgttttcaagcatgtagccggaaagccgcgtatccttgccgatgacgacccggtgtcgatggttgccgcgccggaagatcgtgccagccgcgataccgacccgcatggcgagatccggcgtcatcggaaacacgttggactgaccgcgaataccatcagtgccgaaatagcgtcttttcatgtgcacccctgtgccttgagcgcgcgtcacgcggcgcatcgtcttaatcgcaatttgcacgcctgcgcgtgttccctcgccagtgaggccttcattgaggccaccttatgtcagcggaatgccacaaatcgcggcagccatcacgtcaattaccgagaaaatcgattatatcccgttaccaacgaaaaaggccggacaccacctcgggtgtccggccttctcatgatttccaaagaaaatcagtgtggttgcggctccatgccgccttcggcctcgtcgcccttggccggacgcgtgccggtcttcggcacggccgagccgcggctcggaggcgtgtcgtcaccgagatcacgcgacggcttttcaccgcgaatcaacgccttgatctcctcgccggtcagcgtctcgtattcgagcaggccttcggcgatcgccacgaacgcatcgtggtcgtcggtcaggatacggcgcgcttcggtgtaggcttcgtcgatcagcttgcgaacttccgaatcgatggtcatggccgtcgcttccgatacgttcttcgactgcgaaaccgagtggccgaggaagacttcctgctggttctcaccgtaggaaacctggccgagcttgtcggaaaagccccactgggtgaccatcgcacgggcaagcttggtggcctgctcgatgtcggacgatgcgcccgatgtgatgttctccttgccgaacgtcagttcttcggcgacgcggccacccatcatgatgacgaggcgcgacaccatccacttgtagctcatcgagtagcggtcgccctcgggaagctgcatgaccatgccgagtgcacggccgcgcggaatgatcgtcgccttgtgcagcggatcggccaccggaaccttgagcgccgtgatggcgtggccggcttcgtggtaggcggtcagcttcttttcggcttcggtcatggcggacgagcggcgctcggcgcccatcatgatcttgtccttggcgtcttcgaattcctgcatggtgacgacgcgcttgttgcggcgcgcggccatcagggcggcttcgttgacgaggttcatcagatcggcaccggagaagccgggcgtaccgcgagccagaaccttgagatcgacgttcggcgccagcggcacgttgcgggcgtgaaccttgaggatgcgctcgcggccgacgatatcggggttcggaacgacgacctggcggtcgaaacggcccggacgcagcagtgccggatcgagaacgtcggggcggttggtcgccgcgatcaggatgatgccctcattcgcttcgaagccgtccatctcgaccagcagctggttcagcgtctgttcgcgttcgtcgttaccgccgccgagaccggcgccacgatgacggccgacggcgtcgatttcgtcgatgaagatgatgcagggcgcgttcttcttggcctgctcgaacatgtcgcgaacgcggcttgcgccgacaccgacgaacatttcgacgaagtcggaaccggagatcgtgaagaacggcacattggcttcgcctgcgacggagcgcgcgagcagcgtcttaccggtaccgggagggccgaccaagagcacgccgcgcgggatcttgccgccgagacgctggaacttctgcggatcgcgcaggaactccacgatttcctcgaggtcctgcttggcttcgtcgacgccggcgacgtcatcgaacgtcacgcggccatgcgcttcggtgagaagctttgccttcgacttgccgaagcccatcgcgccgcgcgaaccaccctgcatctgccgcatgaagaacagccagacgccgaggatgagaagcatcggcagcagggtgccgagatagctcaggaaaccggacgagccgtcggtttccggacgagccgaaacgaggacattcttcgtctgcaggcgatcgagcagattgtcgtcgacgacaggcgtataggtctggaaggtggtgccattttcaacatagctgccggagacgcggttacccgtgacgacgacttccttgacgcggcccgcatccacttcacgcaggaactgcgaataagggatatcgcgggagctggtctgcgccggcgacgtctggaacatactgaagagggcaatcagcaaaagcgctatgattgcccacaaggcgaaattacgtaagttagggttcatcgaactccccagcactggaacgaccgcctcatggcgaccgctttatttggcttctaacataggattgcgtcaggcggttgccaaggcaaacccatcagttagatggtttttccgtcaataagacctaaaggcggttttggataggggcgtgttccaaaggctgccgcgaggctggcggcgaacttgacgtccaatcgtgtcaaaaaacggtcaaagagcgcgaaatagggcacgacctcgatcttgccggcgagatcggccgacggatcggccgccaggatgcgcggttgcgccgcagcggctctggcgagcgtgcttttggggaggttttcgggtgcgggcatggcggcaggtcgcgctccggctctctcggtgcctcgctcctctctgactgtttcggcgacggcctcctctccaccctcattcctgtgcttgtcacaggaatccagcaacggcgcgtccgcgccgtgagagactcttttgtgcccaaggacttgggcacgctggattcctgtgacaagcacaggaatgagggagcgtgagttaggcgcttggtgccctactgcagcatcagcactcgcggccgcttcagtctctgcagaagctttggcggccaaagcatcgccagcagccgccaccgtcacctcaatgtcagacctgttcgccaccacgaaccgcccatcccaaacgccacgctctccggccccaaccgtcagcggcaacagcccccgcgtctcccgcgccagatacaatccatcgcgcctgagatcgaacaccacccgccccgccgtcatccggccgagccggcctgcggcaagaaagtcgagcaccgcgccgatctgctccgcccctagcgcaaacgcctgcccgccaatcacggccgccagccgcgcaagtccatgcccgagcaccgcgcggtcgccggagagcccggcaacgccgacccgcgccagcatccccgcatgcacatcgacatgcgcatcgacccacccggcagcagcctcgtcgagcgccatccgcgaagccgtcatcgcctcgatctcggcgaccgagatcccctcgcccgccaatgcctggcgcgtccgcacccgctcgtacctcgtgtcctcgttgcttgggtcatcgctccagccgataccacgcagctccagcatcgcgcgaatatccgcccgcagcgacgaaagcagtggccgcgcgatccagacgcggcggtcaaacagcatcgcgtcggcgattccggtcatgttgagggccgagcgctggccgcgcatggcaaatgtctcgcgctgatcgtccagcgtatggccggtcacgatgatgtcggcgccgaactcggtcgccgcctcggcgagcagcgcgtagcgggcgtcgcgtgccgcggccatgatgccggccttcggcttggcgccgcgccagaccttgatgacatgaggaatatcgagcgatcggcaaagagcggcgacatcgcgcgcttcatcggccgattgcgggcgcaacgcgtgatcgacagtcgcggcacaaagagaaattgcggaagctggttcggccttcagcgcatcgaagagcgcgatcagcaggccggtggaatcgctgccgcccgagatcgcgacgagaatgcgcgagggctggtcaagcgaggagagaaagcggcgtgtcgccgtctcgagaggtaggataccgtccgggcgcaagaccggaaaaccttagcaggaaagacgcttctgttcgctggcgaccttggatatgacggcgcgcgatgccttcgggtaacgcttcggcacttcccggagcgtcgcgcaggcggtttcggtattgtcgagagcggccagcgacatgccgagcttgagcagcatttccggcgccttctcggaggtcccgtacttctggtgcgcgttcaggaaggtcttggccgattcgttgaacttgccctgcgaatagagcgcctcgccgagccagaaattggcgtccgccgaacgcgagctgttcggatactggcggatataggcgttgaattccttctcggcggtcgcgtagtcgccggcaagcacaaggccataggcggccttgtactgatccgattcgctgccgagcgaggccgtctgcgagccggcgccgccgaccggcggcaacgggctggagccgacctcggcgcccggattgaccgaaccgccgatcgggttgccgttctggtcgaactgcatggaaccgagctgctgcggcggctggccgaggccggtattctcgggaacgtcggtcgagggcgccgtttcgggtgccctcgaggcctggatggtgcgggcgacatcgtcgccaccaccctggcccattccctggccctgcgccgtctggttggaagccgggatatcggcttcgcttttcttcatcggcttggctccgccgccggcgctgctggcgccgcccttttcgagctcctggaagcggaattcattgtcttcctgcgccttgcggatcgtctcctgcatctgcagcagctggaagctcatttcctcgatacgaccgttgagctggcgaagctggtcttcgagctgctggatgcgcacttccgggccgccggcctgaacgttgataacaggcgcctgcgcgggcgcctggcttgctgccttgcttcctaaatgcaagccgaatagcgacgacgcgttcgccgacgggccaaccccggccaccgttgcgaggcagagcatgcccgccacgacaaatttcttcatttggttcgtcctgtcccagtgattcttcgcgcctcgatggcacgaacaggagatttttccaattgctttcaaaaagcaacggagttcggccaaagtgtggtcaaaaagaaaaggcggcccgcgatggagccgcctttccgatttgtaatgaaacccggcttttgccgccggatcggcaattacatgccggcgccgccgagaacggtaacggcgcgacggttctgcgaccagcaggaaatgtcgtcgcagacggcgaccgggcgttccttgccgtaggagatcgtcttcatgcgctgagccggaacgccgcgcgaagcgagatagtccttggcggcggcggcacgacgagcgccgagagcaaggttgtattcgcgcgtgccgcgttcgtcggcatggccttcgaccgtgacggcgtacttcggataacggccgagccactgagcctgacggtcgagcgtctgggcggcgtcggcgcggatcgaggtcgagtcggtgtcgaagaagatgcggtcgccgacattgacggtgaagtcctgggtcgagcccggcgtcgcggcgcctgcgccgaggccgaggtcaccggcgctgttggccatgttctttttgttggcgcaaccagccagtgccagaccggcgacgagcgcgatcatgaccgggttgcgggcgaagttctgcatgcggctcactgccggggtatgaattcggctcatggccggtctccttgcgacttgattagggttgccggactgtaaccgttctcggttaatcggctttcaacaactatggttaacgagtggttgattcggccctctgccgcccaattcgtagatttttgaggcgacaagaaggcaggcatccaaacttcctactccagaagcggcgaccaggccgggtccgaagcgtatgcgggggtcttgatcatctgctcgttgtagccggtcagatcgatcgaatagagctgtgggccacctgcgcccgccgcctggcggaagaacatgatgacgcgtccgttcggcgcccaggtcgggccctcattgtggaagcccgtggtcaggatgcgctcacccgaaccatccggcttcatcacgccgatcgagaacttgccacccgactgcttggtgaaggcgatgagatcgccgcgcggagaccagaccggcgtggaataggagccgtcgccgaacgagatacgcgtctggccggagccgtcggaattcatcttgtagagctgctggcgaccgccgcgatcgctttcgaacacgatctggccaccgtcgggcgaataggatggcgaggtatcgatcgccgccgtcgaggtcaggcgggtcgtggtgcgcgaacgcaggtccatcgtgtagatgttcgcattgccctcctgctgcaggctcatcaccaccttctggccgtcgggcgagaagcgcggcgagaacgtcatgccggggaagttgcccaccacttcgcgctgtccggtctccagctgcagcagatagacgcgcggctgctggttggcgaacgacatgtaggtgacttcctgccggttcggcgagaagcgcggggtcagaaccaggtcgctgccattggtcagcatgcggacgttgaagccgtcctggtccatgatcgccagctggcgcttgcgctgctgcttgctgccggattcggagacgaagacgacgcgggtatcgaaatagccttcttcaccggtgatctgcttgtagatcgcgtcggcgatgatgtgggccacgcggcgccagttttccggctgcgtgtagaactgctgtccggtcatctgggtgccgccgaacgtgtcccagaggcggaactcggcgcgaaggcggccgtcggcctccttcgtgacgcggccggtgaccagcgcctgcgcgttgatgaccttccagtcctcgaagcgcggcgcgccgtcgggattggagatcttctcgatgaaggcgttcttgtcgatcggcttgaacaggcccgagcgctgcagatccgcggcgataacctgcgaaacctgggcgcccatgtcgccctggaagtcggtaatcgcgatcggcaggggctcgacattgcccttgttgatgttgatttcgacaagcgcgtgcgccggcgtggcgataaccgcggcgctcatcatgccgacggcgaccatcagggcgcggaaaagggaacacttggtcattgagcacaagcctttcagcattttaaagggctagatcgctggggtcgaaattgacgatgacttcgccccaggcgtcgtatttgtcttttggcagattggaaaacggcgaggacttcatgacggcgcgcttggcgccgctggcaagcgccatgcgggtcgcctcgttcgtgccgccgatggcctcgacctcgggcgaaccgacgatgttgccgtcgggatcgagcttcatgcgcaccctgatgcgaacgtcgccggcgccttccatgccgggaatgaccgaccagttgccggcgatcgcgctgcgcagcgcatccatttcgctcatcgacagcttggacccgccggtcgccttcttggcgccgagcgatgcctcttcggtcgagctcttggcgccgccgttcgacggatcctgcttgttgagaagggccgagatatcgtcggcgttgaagtcgctctgctgcgaggacgaggccttggccttttcctgcttcttgtcggacttcttcttgtcggacggcttctcttgggtctgcgccttgtcttccgtcttcttctccggcggcttttcggccggcttctgttccggcggcttcggctgcggcttgatcaccggcgtcggcaccttgtccggcaatgcttccgcatccggcttcggcggctcgggcatgtcctgcggcttttcctcggccttgggcggcgtcggtgtcggcgcgatctccggcttcggcggcgtgatcgacgcgacctggctcggctcgaccgccgtatcctccttcatgatctccttcacctcgttgggcacgggatcattctggggaagcggcttttcggatgccttgggagccgctgccgactcgttgttgctcggcttggcgttcggaatcggcggcgtcttcaggtcgaccttgttctcgcccatgttctcggcattggccacattggtcggcttggaggtcggcttcggcgccggcttgtcgctcggcttggccgtcttgtcgccctgctgcagctgcgtcaggtcctcgacaggcacgaggttgacgggcatggcctcgaaatcctcgaccttgaagtcggatggcgagccgatcgaaaccagcagccaggcgaccacggcggaatgcaggacagcagatgagacgagactggccttcataggtctactacgggcccttcttctcttgggtgaccagaccgatgttcttgaagccggcaccctggatacgcgccatgacatcggcgatcacgccgtaaggcgcggccgaatcgccacgaacgaaaatgcgctcgttgtagccggtggtggcgatcgcctcgagcttggcggcgatttcctcgaccgggatcggcgtttcctgcaggaacgcggtgccgtcgttcttgacggagatcgtgatcggctgcgtttcggaattcagcgccttggcctgcgtttccggcaggtcgatcggcacgccgacggtcatcatcggcgcggcgaccatgaagatgatcagaagcacgagcatgacgtcgacgagcggcgtcacgttgatttcggaaatggcgccacctctgtggccaccgcgacgacgccggcggttgccaccgcctccgccaccgcttggagcacccatacccatgtcgttctccccgtgtccgtcgtttactgcgcggcctggcgtggctgcagcttctcgtcgatttggcgcgaaaggatggcggagaattcatccgcgaaaccttccatgcgcgccgagagcttgcccgcgtcggcggagaatttgttgtaggcgataaccgccgggatagcggccacgagaccgatcgcggttgcgagtagcgcttcggcgatacccggcgcgacgacggcgaggttggtcgacttcgaaccggcgatggcctggaacgatgtcatgatgccgacgacggtgccgaacagaccgatgaacgggccggccgaaccgatcgtcgccagcgagccgagacgcgccgtcagcccttcggcttcacgcgccagcgtcacgtccatggcgcggtcgatacgcatctgcaggccgatcggcgagcgcgcgccgcgctcgaacgacttcttccactcgcgcatggcggcgacgaagatcgaggcgaggccggtattgttgcgttccgacagcgagcggtagagttcttcgagcgactggcccgaccagaaaacctgctcgaacttgtcgaactgccggcgtgcgcgggcgaaggccagatacttgtcgatgacgatcgcccaggtccacacggacgccgcgaccagcccgagcatgaccagcttgacgacgagacctgcctgcatgaacagcgaccagaggctgacgtccgtcgttgctgctgccaatcctacttgttccattgatccaaaatccccgaatccaaacgcccggcacttgaccgggcggcacaaaatgatctcgcaagatatgtctggctgccgccgcctaaagccttggtcaagcttccaagctcttatccgccttccttgccgtcaaatttggtcaaaggaaggcgtgcaccgcacaaactctgacaatccgagtaagacactattatcgttaatagttcgttagcgccggatcataaaaggctgactattggcgagaggatgatcccttggaatacttggccagatctctaatcgatgaccaaaaccgcacaaatcttgcgcgcggcaattccttcacatgaaagtcatgtttttgcaagcagcgttttcagaaaactgccatgtcgtcagggctgagcaagatcacgcccaacggcgcgaaatgacggacattcgacgtgacaaccgtcagattgcgcaccgaagccgttgccgcgatcagcacgtcagccaagcccggcctttgcccaactgcctctgcctgctcctcgatcgtaccggccgccatcgcgatatccgcgtcgacagccagaacgtgatcgccgaactgacccgtcaacccggaaagccattccgcgagcttggcggccctcgcatcagcgcctttgcgttccagctttttgataccgcgctggatttcggcgatggttatggccgagagatagagcgctccttcggcaccccgttcaaatatccagtctcgaaggccgggtgagattgccggccgaccgggcgcgaacagcgagatgacgtttgtatcgagcaggtaaccagtcacagctcgatatcacgcatgccggacgtgttccgacgcagatcgaggtcatcgtcgagaccgccgggaaatgacatcagatattcgccaagattgagcttcgtcctggcaagcgccttcttcgcctcctccgccgcttcaagcgaaacgatagcggcgaccggctttccgtgccgagtaatcgtcacgaactcgccgctcatcgcttcatcgacgagactggagaaggttgcctttgcatcgcgaagcgtaactgtcgtcatcgagacctcagtgtgaccacaagtaactacatagcagtccgctcgagaaatttcaatgaaccgccgacgtcagacctcgatcatcatctgcttcgccagcccctccggcaaccgccgaggacggccgctggcgttgatgacggcgatgatcaccttggccgcgatcaagagcgtgtcgtcgcggcggatctcctgcgccagcaccatcttggcgccgccggccttttcggtgcgcgtcgtcaccgtcaggatatcgtccatgcgcgccggcgacttgaagtcgatctccatgcggtggacgacgaagacgagcccctcctcgtcggcgctgatcagctcgcgctgctcgacgccgaggcagcgcagatagtcggtgcggccgcgttcgaggaagtgcagatagcgggcgtggtagacgagaccggagaagtcggtgtcctcgtaatagacccgctgcagcaggcgatggcccgcttccgtcagttcgcccgagatcgaatgagagatcgaatgcacaccgtccgccataattttctccaaagtcgcgcgccctctttggctgaagacattccgccttgcaagcattgaacaattgtcacgctttctaagtaatcctcgataccgaaggccaacaaggagacgacacgatgaagattgcggtgatgggcggagatggatttatcggctggccaacatcattgcatctgtcggacgccggccacgatgttcacatcctcgacaacctctccagacgctggatcgacacagaactcggcgtccagtcgctcaccccgatggactcgatccaggagcgcacccgcatctggcacgccgagaccggccgccgcatccacttcaacctgatcgatctcgccagggattacgagctcctgaagaagtggcttgccgaaaaccgtcccgacgccatcatccatttcgccgagcagcgcgccgcgccctattcgatgaagagcgaccgccacaagaactacacggtcaacaacaacatcaacgccacccacaatctcctgaacgcgctggtcgaactgcagctcgacgcgcatctgatccacctgggcaccatgggcgtctacggctattcgacggtcggcgccgccatccccgagggctacctccccgtcggcatcgagacgaccagtggcgagacggtcaggcaggaaatcctttaccccgccaatccgggctccatttaccacatgaccaagtgcctggatcagacgctcttccatttctacgccaaaaacgacggcctcaggatcaccgacctgcaccagggcatcgtctggggcacccacaccgaacagacccgccggcacgagcagttggtcaaccgcttcgattatgacggcgactacggcaccgttctgaaccgcttcctgatccaggccgcgatcggctatccgctgaccgtccacggcaccggcggccagacccgcgccttcatccacatccaggattccgtgcgctgcatcgagctggcgctgaagaacccgccggcccgcggcgcccgcgtcgagatcttcaaccagatgaccgaaacccaccgcgtccgcgacctcgccgagatgatttcgaagctcaccggcgccgagatcgcctggttgcccaatccgcgcaaggaagcgccggagaacgagctgatcgtgaaaaacgacaagttccgcaatctcggcctcgatccgatcacgctgaaaacgggactgatgggcgagatcgtcgacgtcgcgaagaagttcgcctatcgcgtcgaccgcagccgcgtgccggcggtgtcggcctggacacgggacatcgcgccgaccatcaaccacgaccccgagggcaagcgattgaagtcggtgtcgtgaaggggaatagttttgacgttgctgcccggagccccctcatccgcctgccggcaccttctccccattgggaagaagagactcgtggcgcgcgctcgacgtcgtctaacctcaccgctcctgcaatagcgcagaacgctcaccacctgcctcttctccccaacggggagaagtgccggagcgccagcgaggcgatgaggggggcgaggcatgccgagcggcctgagcggcaagcgaaggccaccctcacagccctccccgagacccacgcacgatgacctcccccaacgcctacgtcaccctcgtcaccaatgccgactacgccatgggtgccaccgcgctcgcccgctcgctgcgcatgacccataccaccgccgacatcgtcgtcctccacaccggcggcgtgaccgacgctgacctcgaacccttgagcaccctcggctgccgcctcatccccgtcgaacatctgccgctgtcggacgccttcaacgagcgccacgcgcgcggcaaactccatgccgccgcccccttcaccaagggccgcaagccgctgttccactcgccgctcgacaatttctgcaagctccgcctctgggaactgaccgaatacgcgacctgtgtcttcatcgacgccgatgccatcgtgctgcgcaatatcgaccggttgttcgcctatcccgagttctccgccgcaccgaatgtctacgaatcgctggccgattttcaccgcatgaactccggcgtcttcgtcgccaagccttcgagcgaaacattcagcgccatgctggagcggctcgaccagccggaaatcctgtggaaacgcaccgaccagaccttcctgcaggcgtttttcccggaatggcatggtctacctgtttatttcaacatgctacaatatgtctggtttaccatgccggcgctttgggactggaacagcatttccatcctgcactaccagtatgaaaagccatgggaaacggatcatccgaaggccgaaagcctgcggccgctgatcgacctgtggcaggcattccatacgggcaaggacgtgccggacatatcggccatggccaatccgaaaggggcagcatgaaggtactggtatcgggtggaacaggacttgtcggtcgctatatcgtcgaggaactgcttgcagccggatattcggtcatcatcggtggccgccatgccccgctgccgcgcgccttctcccgccccgtcgatttcgcgcccctgtcgctcgaccccgaaaaggaccacatcgaggccttcgacgacgcctatttcttcgttcatgccgcatttcaccatgcgcccggcaaatatcgcggcggcgaaggcgatgatcccgagaccttcaggcgcttcaatctcgatggcaccgtgcgcctgttcgaggccgccaagcgcgccggcacgcgccgctgcattttcatctccagtcgcgcggcctatggcgagcacccgccgggaaccacgctgaccgaggcgacgcaggaaaagccggaaacgctctacggccagaccaagctcgacgccgagcgcagcctggcgcatctggccgcccccggcttcgcgacagccagcctgcggcttaccggcgtctacggcaatctgcgtcccaacaaatgggacaagctgttcggcgactatctgagcggccggccgatccccgcacgggcaggaaccgaagtgcacggccaggatgtcggcaaggccgtgcgcgtcatgctcgaggccgatgccggtcgcatctccggcgagaccttcaacgtctccgatctcgcgctcgacacctgggatatcctcgagccgatccgctgggagcacgattgcgccaaccgcctgcctgtagccgccgacaaatcgctgctgacgccgatggacacgaccaagctgcaggcgctgggctggcagccgggcggactgccgctcttcgaggaaaccatccacgcgctcgcgacacagccggcggcctgacgcacgaacgtcgcatacgcgcgttgcatttgcattcgcgcgttgcattgcgcgccgtccgttctattgtcccgccgaaagagcaaggcggacaccatgaacatgaaagacatcaaggccgcgatacgcgccgaaaggctggcgctgagagacgccattcccgcggagaccagggccgcgatgagccttgccatggccgaacacgccggcgaggccgttgccttcgaaccaggcacgatcatctccggcttcctgccgatccgctcggaagccgatcttcgcccgctgatggcgcggtttcgcgcacgcggcgcgcgactgtgcgtgcccgccattctcgaccgacagacgatagccttccgcgaactcgtggatggcgcgccgctggtctcgaccggcttcggcacatccggtcccggccccgacgcgccggttctcgatcccgagatcctgctggtgccgctgtcggccttcgacagacgcggccaccgcatcggctacggcgccggccattatgaccgcgcgatcgaccgtatcaggcaaaaaggcatgcatccgaaactcatcggcattgcattcgactgccaggaagtggcacatgtgcccgacgagccgcacgatgtaagcctggatgccatcctgacagaaagcggcctgcgcttttttgcctcttggattggatagcaatgcgactgctttttttgggtgacatggtcggcaagacgggacgcacggcggtctgggatcgcctccccggcctgatatcggacctgaagctcgacttcgtcatcgtcaacggcgaaaacgccgccggcggcttcggcatcaccgaggacatctttctcgagaccatcaatgccggcgccgacgtggtgacgacgggcaaccacgtctgggaccagaaggaggccgtcgccttcgccggccgcaacgaccagttcctgcgccccgccaactatccgcagggcacgcccggtcgcggctccggcctgttctacgcccgcaacggcgcccgcgtgctcgtcgccaacgtcatgggtcgtgtcttcatgcatcccgagctcgacgatcccttcaaggcggccgaaaccattctcgacgcctgcccgctgaaggaacaggccgatgcgatcatcttcgacttccacgccgaagccaccagcgagaagcagtgcttcggccatttcgtcgatggtcgcgcctccttcgtcgtcggcacccacacccatgtgcccaccgccgaccaccagatcctgaacggcggcaccgcctatctttccgatgccggcatgtgcggcgactatgacagttcgctcggcatggacaaggaagagccgctcaaccgcttcatctcgaagatgccgaaaggccgcatggaggccgccaccggccccgccaccatctgcggcgtcggcgtggagatctcggatgcgaccgggcttgccgaaaagatcgcgccgctgcgcctcggccccagactgtcggagaccattccggagttctggcgctaaaccgggcatggcctgccagtgacggaaaagtgagcagcggtttcgggatttgatctggaccgccgccgacccttgccgcatccttttgccagtgaaagcgctggggacgtggcatgaagctgcattttcttgtcttcgcaatgaccatcctgtcgggcctgctgcccggctggttgagccccggcaccgcgcaggcgcaggaagcgcgccgaaacgtcagccaatgccaggcgatcgcgcaatccattcccaaggcgacattcgcaagcttctcaggcgccgtgccgatcgcggcggacaatgagaccgtgacgctgacctatatcggccattcgacctttctgatcgagacgcccggcggcgtcagcatcgccaccgactacagcggctggtacccgacaccgcagccgccgatggtggcgacgatgaaccgcgctcattcctcgcactacacgctgacgcccgatccggcgatcgaacaagtgctgcatggctggagcgacgtgccgggagaaaaggccaagatcgacctcatggtcggcgacacctacatccgcaacgtcaccaccgacatcaggggcggctacggcgcgccgcagccggatggaaattcgatcttcatcttcgaggtcgcggggctctgtatcggccatctcggccacctgcactatgaactgaccgacgcccaatacaccgcgatcggccggctcgacgtcgtcatggtgcccgtcgacggcggcctcaccatgggcgccgacagcatgagccgcgtcatcaagcgcctgcggtcgtcgctcatactgccaatgcaccagcaacgaccgctggccaacttcctctcgatgttcggccccgacttcgacgtcgtctacgcaccttcaaacagcatcgacatctcgatccgcacgctgccgaagaagccgcagatctatgtggccaaggggatgcagtagagggggtgcctcggccactcagagcgacgggaatatcgggcggttcttttcgtcataggcttcgacaagatcgccgatccgcgacgccagcaaggcgagcggatgatcctcgtcatcaccgatctcggcaaagatttcgtcaagctgcccgacgaggcgatcatactccgcctcgttcgtcggcatggagagaagcggcgccaccttcacgcgactggacctttcacgatggcatcaacctcatcgatcacgtcgtccaggtcatgtccaaggcctgcgtcgatatccttgcgtgcctgatccaactcaatgatttgccggccttccgacgcgagataggatttcagagcgcgcacgaacacccagctgctcttccgatcacaaataccagcgatctgctcgatccccgcgagcacatcggcaggcagacgcatggtgatcgggtctgaaagctcataactgctcatcaccttacctccggttgcaacgcaagctacgtcataccagcagacgcgtcaaacccgccgaccaaggccatgccagcaacaaaaaagcccaggagccaaagctcccgggcctcgatcgacctcgcagcaaagcctgcctcaagcaaactgcaaatgctgacgcacgccgacgtcgggcatcttgtcctcgtcgagattggccttggcgatttcccagccgaatttcaacttgctgccggtcgacacccagatttccgcatcgtcgacatgcatggcgagcatcgtcagtttcgggtccttcttgccgtcctcgtaccaggcggccaccaccgagttccagtattcctcgatcttcgaagcatcctggcgaacctcgatcttgccggcgaggcaggcatgatagtcgtgatccttgccgacaacgcagaaacgcgcgcgcgttccgggcttgatcgcccgcacgatctccgcgtccgacttggtgtagaaccagatcgtattggtcttggggtcggcgttcggcgccatgggctgcatgtgcatgtcggtgccatcgacaccaagcatgccggcatgaatgttgttgacctgatcccagagctggcgtgccgggtgctcccgcgcctcgttgaaactagccatagcgcttccttccgtttcgaatggtccgtgtttgaaacgtcatctcgcgggctttgttccccaaggcgcgaactgatgctacgctcctggtatcgtggggatagggggatcgtcatgcgcgtcgcggcattggtcacgctgggtttggctgctgcggcactgtctctcgcgccggccatgccgaccgccgccgccgaccgcagcttcatgcccgacgcgtacggccagatcatcttcgtcacgccatccagaaacatcggctgcacctacatccccaagggcggcaccgaaatgtacaggcccgatgacggcggccccgagctcggctgcgaccgcatcgagccgaaatacatccggctgatcctgtcggcctcgggcaaggccttcatcttcgagatggagggcgacaccgcctgttgcgacgatgtcaacgtcctgaactacggcgagcgctggaaggccggaccattcacctgcacctccgccgagaccggcctcacctgccgccgcaagggcggacacggcttcttcgcgaaccgcgacggatacagcgtcgattgatagcgcacggcggcggcgcggccgtccgatacgcctgttttcccttgaacgcgccccgtttcgctcttataaggcggcccattcccaacaataagacgtgaacaggggtgccatggctggccattcacagtttaaaaacatcatgcatcgcaagggccgtcaggatgccgtgcggtcgaaaatgttctccaagctcgcgcgcgaaatcaccgttgccgccaaggccggtctgcccgacccgacgatgaacgcccgcctgcgcctggcgatccagaacgccaaggcccagtcgatgccgaaggacaacatcgaccgcgccatcaagaaggctgccggcgccgatggcgagaactacgatgaagtgcgctacgaaggctacggccccggcggcaccgcgatcatcgtcgaagcgctgaccgacaaccgcaaccgcaccgcctccaacgtccgctcgatcttcaccaaggccggcggcgcattgggcgaaaccggctcggtatccttctccttcgaccatgtcggcgaaatcacctacaagcttgcggccggcgatgccgacaagatgatggaagcggcgatcgaagccggcgccgacgacgtcgagaccgacgaggacggccactacatcacctgcggtttcgaagctctcggcgaagtcgccaaggcgctggaagcctcgctcggcgaagccgaaaccgtcaaagccgtctggcgcgcccagaacaacgtgccggtcgacgaggagcgtgcccaatcgctgctgaagctgatcgacagcctcgaggacgacgacgacgtgcagaacgtctattcgaacttcgaagtctcggaagaagtgctggccaagctctcggcctgacctgtcctccgaacaatggtcgaaaggcgggctccggtccgccttttttcttgccttacgttccggacgctgcgcgcatgaagcttgagcggaaggcggaaaggtcgccgacgctggcatccgacaccgcccagaagaccagcccgttcgccgaccattcgaccatgttgtagccgtcgtgttcgccgtccgtctgcctgcccgccgtctgcggccagacgaagagattgatgacgtggccgttgcgccggtagacgagcaccgccacgaccctgccgccgacataatcgacgcggccgccgaccagcggaaagccgtccttggcgagatcattgaccggcggcgagaaatcgatgcggccgttgaaccagggcttcacggtatgctggtcggaggtctgcacgtcgacgaggtgatcggcaagcatcgactgcacatggctggcgagcaactgatcccggatgccgagctcgggcgccggcgcgttgacgaacagcatggcgctcgcggcaagcgccgccagcgacggcacgaaactccagtcacgcacgaagcggaagaagcggctccatgacgatgccgccgcgccggacctttgcgccggtacgcccacgccctgctcgcgcgccagcgcatcaagcacctgcaagcgtgcctcttccggcatcgtgaagcgcacgccctcccgtccgatccgttgccgcgccccacgcaccctttccacctcctcccggcaatccgtgcacaaggcaagatgagcctccagctccgccgcccgcaccagatcgagttcgccatcgatgaaggcgtgcagcaccggtccccactggtcgcagccctgcttcggcgcgtcgctcatgtccccgccccgccattctcggccccgcgattttcggccccgcgactttcgaatgcatcccaggcttcgccgaattcgcgccgcgcgcgggcgatgcgtgacatcacggtgccgatcggcacgtcgatcacgtcggcgatctgcttgtaggacagctcctccagctcgcgcagcaccaggatctcgcgcatcgcctccggcagcatgccgatgacatgacgcacgcgcgaggattcgctctcgcggatcatcgccgtctccgccgtatcgtcatcggaagcgatctcatgtgccgcgccttcgcttccggcatcgctgtcgagcggcgtttcgaagcgcgccttgcgccgcccctgctgctgccaggcgaggtggcagttgcggacgatggagaacacccaggcccggggatctccacccctgtatgtctcgaaactgcgataggcgcgcaggaaggcatcctgcacgatatcctgcgccgcatcccggtcgcggctgaggaagcgtgcgaaattataggcggcatccatgtgaggcaggatgttctgctggaagcgcagcgtctggtcggcctgcagcggctgggcggcgcgagcccgcctttggtcccgggccatctccatatagccgatgaggatggaagcagcctcgccgagcaatcggccggcacgcccggccagcgcgcgcgaccgccgccgccaccgcagaacggattcggccagctgatcgtccgatggcatggggtaggcaatactgacttgggtcatcacgtcccccgcggctgcagcccagccgattctaatccctggaccgcctcgcaggcaacgcggccctttatcggatagatcgacgatggccgtgttttattccctcccgccgggattttttcgcgcagcgtccacgtcgataaaaataggcgaacactttcaatatcttgatgagaaacccggcggcatcggggaataagcccatggccactccggtctagttccgcagcgggaacgtcgaacccatcccgatcccgctgaaacaatggacaagccagaggaggcatccccatgttcgcaatgtcacgccgtacgctgctcggttcggccgccgcggcagctgcattcggcctcgcatcgaagctcgaaatcgccgcacccgccttggccgcatcgccggatgagccgtcgaccggtttctaccgctacaaggtcggcgatatcgaagtgaccgccatctatgacggaatctggcgcaagccgcacgatcccgccttcatcaggggcgtgtccgtcgacgagaccaggcaggcgctcgccaacgcccacctgccgaccgatttcatgccgatcccgctcacggtgatcgtgctgaacgtcggcggacggctgatcatgatggacgccggctcgggcgtcggccagtggcaggcaaacgccacccacctgcccggcaacatggccgccgccggtatcgactacaggaagatcgacacggtcatgatctcgcatttccatcccgaccacgtctggggcctgatggagaaggggtcgaacgcgccggtcttcccgaacgccgaactcgtcgtccattccgccgaatacaactggtggaccgatccgggccgggtcgacaagcttgccgagggacgcaagcccgccggaaagcgcatcgccgaggtcttcccgaaatggaagaattggaagctggtcgaagacggcgcggacgtggcgcccggcatccaactggtctcggcgccgggacatacgcccggacattcgacctatctggtgaattccggaagcagccagctgctggtctcggcagacatcatgtacgtgcccgcgctgctcgccccgcatccgcaatggcaaggcagctacgatcaggacgggccgcttgccatcaccagccgccgcaagctgatcgatcgcgtcatcgcggacaagatcgccgtctgcggctcgcacttccccttccccggctccggcagcttcgtcaaggacggaaacgcctatgccttcacccccacaagccaggcctgacgcctgaggagacaacagtcatgaaacgctcgttcaccagctatgccgttctcggcgtcatgggtttctacgcgctgtgcgcggccggctccgccgtgtcggcactgaccgcgatgcccgcctacgcggtcgacaacatggagaccggcgatggcccggacctcacctccgtccgcgccaagatcgccgccaaggactatcaggcggctctcaccgaactgcgcggcctcgccgaggataaccagcaggccgacgtctacaatctgctcggctacacgctgcgcatgaccggcgactacgagacgtcgctgacctactacaccaaggcgctcgatttgcagccggatcacaaggccgcccgcgagtatctcggcgagctctacctgcaaaccggcaagccggacaaggcgaacgaacagctcgcttcgctgaagcagctttgcccggcgggctgcgaggagctcgaggacctgcagcaagcgatcgccgcacggggaggcaactgagggcccctgccccggggcgggtggcccagccgctcgccccgcttcaacaaggagatgatcatggaacgctcactcatccgatccgcgggcgcaaacacgatgctgctcgccgggcgcctgctgctctcggcgatcttcctgcatgaaggcgcaacgctggcgctcgatttcagcgccaccgtcgaaaccttcgccaggctcggtctcgacctgcccgtcgccatcggtgtcatcctgctgcagctcgccgccggtctttcggtcgccgccggattggcaacgcggctgggtgcaacggccctcggcgtcttctgcctgctgaccgccgtgctctttcacacggacttcgccagccgcaacgaactcctgcatttcgagaaggacttcgccatcgccggcggcatgttcgtgctggcgatatcgggcgccggatcgctgtcgatcgacgcatggctgaagcgaagcggcccggcgccgatcgccgctttcctgtgaggtccgtccagatccggatcaaagcggttcacaactctgtgaaccgcgggccgtttttaaggaagcggtaacgctaccgcccgtcaatgccctcgctaacccagccggtctgcctcaaggccagcctaactcacactctcggcgggaaaacgacccatgaaaagacaagccctttcgctctccatcgcactcgcaggcacgctcgcgggcgcgatcacggctcatgcgcagccatccatggtcaagcagttcgacgattggggcgtctattcctacgaccgctcgggcaagacggtctgctatattctgacggtgccgaagaccatgcagcccgcggccgtcgaacacggccgcaactacttcgtggtcggtcgcgcgcccggccgcggcaccaactacgaaccgcaggcgatcatgggctacgagctgaagtccggctcgcgcgccaaggtccagatcggcgacaaggaattcgccatgttcaccaaggacaattccgcctgggtgctggaggaaagcaaggagccggagctgatccagtccatgcgcggcggcagcgacatgaccgtcgacgccatctcgcgccgcggcaccgccaccagctacacctactccctgaacggcgttaccgccgcgctgaagcgcatggcccagtgcaactgagcatgccccgcgcaagactggaacgggcgggaccggcctccggtccccttgcccgacacctcggccaagcttggggcacgggctggaagaaaacgctggcgctctgcttcctcggcatcgcgctgacgggcccgtccatggcggccagccagcaatcgccggcgagcgtagagcccccggcgcggaccgatcaggaaccaaaggggcgtgagagcggcttgacggttcctcgcttcgtatcccttcggtcccgcgaggcccgcatgcgcgtcggtccctcgctcgactacggcatcgcctggatctaccgcgttcccggcctgccgctggagatcatcgaggaatatggcaactggcgccaggtacgcgacagcgacggcgtatcgggctggatgcaccgcgccctgctatcgggcaagcgcaccgccacgatcggcccctgggccgcgtccaacgtcagccttcgagccgaaccgcgatcctccgctcgcacgctggcttcgctcgccgcgcgcgtgcgtctttcgatcaacacctgcgacggcagctggtgcgacgtcgaggtgccaggtcacgatctgagcggcttcgtcaggcagaccgcgctctggggcgtctacccgaacgaaacgataaagtgacggtcgaggcccgcgacacgcggcgcggcgggacccgcatgttggccgagccgcgctcggtcaggcggccgcctgcatcagcgtatcgagccccgcgaacagttcgacggatctcagccgcgcctcaatatcgtggatcggcatcgagatgatcagctcgtcggcctgcgtgtcgcgcagaaactgaccgagcttggcctccgccgttctcggcgaccccaccacggcgtagcgcagcgtatgctcgaccgtcatcttttccatcggcgaccagaagctctccatgtcctcaagcggtctcgggaactggccacgcacgttgcggcgcaggttgacgaactgctgctgcgccgaggtaaagtgatattcggcttccgcgtcggtctccgccaccgatcccatgacgcccaccatcgcatagggcttgtcgagcacggcggacggctggaaccggtcgcgatagatatcgagcgcctccatcagggagtcgggcgcgaaatgcgaggcaaaggcgtagggaagcccgagcatgccggcgagctgcgcgctgtagaggctggaaccgagcagccagatcggcacgttgctgttcatgccgggcacggagaggatcgcctggttttcgaccggcgcgccgagcagctgctgcaattcgacgacatcgttgggaaagctgccggcatcgagattgcgccgaagcgcctgcgcggtgcgcatgtcggtgccgggcgcccgcccgagcccgagatcgacacgccccggaaacagtgcctccagcgtgccgaactgctcggcgatgacgagcggcgagtggttcggcagcatgatgccgcccgagccgatcctgatcttcttcgtggcggccccgacatggccgatgaccacggcggtggcggcactggcgatccccggcatgccgtggtgctcggccagccagaaccggttgtaaccgaacgcctcggccttctgcgccattcgcgccgagctctcaagcgactgcctgattgtgctgccttcggcaacgggcgagagatcgaggatcgagaagggaaccatggcgcggcctgtcggtgattggactggacatcctatgtaggtgcccgaccggcgcgaccaaaggtttcaccgccaaaaagccgagcatgagaaaagcccgcgccggtcgctcacggctgccggcgcgggcctgtcatcgagtttaagggatcaacccgcctttgccgatgcgatgccatcgagcttggccacggcatcgggcggcagcacgagatcggcgaccgcgaggttctcccgcagatgcccgcgcgacgaagtgcccgggatgagcaggatgttcggcgcacgctgcagcagccaggccagcgccacctgcagcggcgatgcgccgagatcggccgcgacatcggacagcgtcgaggactgcagcggcgagaaaccgccgagcgggaagaagggcacataggccgtcccctcgcccgcaagctgttcgatcagcgcatcgtcctcccggtgcgcgagattgtactggttctgcacgcagacgatctcggtgatcttgcgcccatcggcgatctgcctggcggtgacgttggagaggccgacatgcttgacgagcccctggcgctgcagatccgcaagcgcgctcagtggctcttccagcgagccctcggccgggccgtgcacgtcgaacatggcgcgcaggttgaccacctcgatcacgtccaggccgaggttcctgaggttgtcgtgcaccgcttgtgtcagcgcctccttcgagaaagcagggttccaggacgcatccgccccgcgcgtggcgccgatcttggtgacgatcacaaggtcgtccttatagggatgcagcgcttccttgatgatctggttggtgacgtgggggccgtagaaatcgctggtgtcgatatgatcgaccccgctctcgaccgcctcgcgcagcaccgtcaccgcctcggcgcgatccctcggcggcccgaagacccccttgccggcaagctgcatggcgccatagccgagccgtttcaccgaacgcgtgccgagtttgaatgttccggacttttcaagattgggcttttcgaggttggacatggtctttctccgtttcgactaagacgagaaataggccagtctggttccatcgataagccgatacaatccgcacgggctgttcggaatttcggacagtcaatccctgctcacgaacggcattcacgatggcgccgccttcgtcggaaagcggcgccatcgaggaacaccctatctccgccgccgcagcacatgcacttcggcgctgtgctggtgttcgccctgcgccagcgtgaaattggcgagctggcggtccatctcgaccgcttcggtggcgagcagatgaatggcggccgtgctctcttcgaccatcgccgcgttctgctgcgtcatctgatcgagttccgcgaccgccgtgttgatctggcgcagcgtctcggcctcctcgcgggtcgcatccatgatctcgctgatctggccgttgatcgcctcgacatggccgccgatgcccgtcagcgcgacgcccgcgcgctcgaccagcgacacgccggcctctacttcgtgcgtggatttctgcagcagatgcgagatctccttggcggcgcccgacgagcgctgggcaagctcacgcacttcctgcgccacgaccgcgaagcccttgccagcctcgccggcgcgtgcggcctcgacgccagcattgagcgccaggaggttggtctggaaggcgatggaatcgatgaccgagatgatcgagttgatctgccgcgacgatgcctggatcgcctccatcgccgcgatcgtgtcgcgcatgatctggccggagcccgacgtctcgttcttggcgtcgcgggcgatccgctcggcctcttcggcacgcgcgagctgcgcgcggacagactgggtgatcgcgtcgatggcgcttgccgtctcggtgatcgacgcggcctgccgctcggtgcggccggcaagatcgtccgagccggcgcgcatctcttccgaccccgcgcgtaccgccgccgaattgccgccgatcgccgtcatcgtgtcgctgagcgtcgccagcgcctggttgaaattgaggcgcaatccctcgagctcgttcgggaagcggcggtcgatctggtaggcgagatcgccgttcgccagatgcagcagcccctcgtcgatcgcctcgaccacgtcctgcagcgtcttcgcttccgcctcgcgctcgaccatgtgctgctggcggtcgcggtcggcgcgttcgcgcgtctcggcgctggcagcttccagcgcgcggctgtcgatcagcgactgcttgaagcgggcgagcgccttggccatcgtgccgatctcgtcgtggcggttctggctgccgatctcgacgtcgagatcgccatcggccaccgcgcgggtgacgccggcaagcctggcgagcggcgagaacagcattttcgtgatgatcccggtggcgaccgccatgaccacgagcacgccgaagccgatcatcgtcaggagcatcgcgatctccagcgagccggcattgatctcgctgagacgcatgctctcgaccaccagatagcgcgcgccctcatagtcaacgggcttcatataggcacgcgcggcgccatcggcgcggctgaaatcgtcgaccgacatcgcggaattggcaaacgcattcttcaggaaggtgaagggcgcggtatcgagcgtcgccagccgacctgcctcgttgaccgtgaccgccgagccgtcttccgagacgatcgcggcctgcgccgtgcttccggcaacgatgcccttggagaggatactggcaacgacatcgtcgcgcaccttgaagagcatcacgcccttcggctggccgagcttgacgacaggcacagcgtagaagatggccgccgcgccattcgcatccacccgcaggcccgagaagccggcgggcgcgccatcgtcggtcgccttggcggtgttttcgatcgccttggcaaacgccagaccggcgccggtcgatttccaggcatccgatttcaggttttcggcgaagtcgtcgttcttcttgtaggagtaaagcacgaaaccatcgagatcggcgatcagcagatcgctgaacggggtgttctgcagatcgcgcgccacctcgccctgcgtcttctcatggttcgaataatagaagccgctcggcgcatccggcttcagcagcttctcgcgctcgccggccgggttgggattgtcggtgatgaacaccttcttcagctcggcgcgcgcatcccccgaggtcttctcgatcgtcttccagccgctcttcaggctggtgatggacatctgcagcgcctcgatgcgcgcaatcgaattggcctgattgtccagctgcgccagctgatcgcgcagcatgtcgccgcgaaagatcagcacgctctccttcgccttcagcgcctgctcgccggaaatccggctgctggcgaaataggcgagacaattgatggcggcgatcgacagcgccgtaagcagaatgaaagtagcgatgaccttgaaggacagcgactggaatctctgaaccatggaaaaactcgaaccccttccggaacggctgataccggcaaggcggacgccccacaggcaggcctgaaaacagaacacggggagccttcgctcgaaaaagctggctcctctcatctcttgtggatcataagttaccgagggaatttaaattcacgtaaatatggcccatcaaaaacgatggcatgtttttgttttgttcacatatcgatggcagttatcgctgatctgcaataggattacgccatgcaaagcgcgattcgtatcatcggcatcgatcccggcctgcgccgcaccggctggggcgtcatcgagacgctcggcaattcgctgcgcttcgtcgcctccggcacggtcacgtcggatggcgacatggacctcgcctcgcgcctctgccagctgcatgacggcctcgccgacgtcgtccacagtcaccagcccgacgaagccgccgttgagcagaccttcgtcaacaaggacgccgtggcgacgctgaagctcggtcaggcccgtggcatcgccatgctggtccccgcccgcgccggcctgcaggtctcggaatacgccccgaacgcggtgaagaaggccgtcatcggcgtcggccacgccgagaagaagcagatccacatgatgctgaagatcctgatgccgaaagccgagttcaagggcgacgacgccgccgacgcactcgccatcgccatctgccacgcccataaccgtggcggcgcccgcatgcgcatggcagcgctcgccggctagcttgttcttgacttgttctcgtttcgtggtaagtaatacctgagaggtattaccatgcgtgtaaccgaaaaaggccaggtgacgatccccaaggagatccgcgaccgattgaatatcggcccggggtcggaggtggattttgtcgcggacgagaaaggcgctcggctcgtcgttgttgccgaaggcaaatccacatcggacgaagaattcgcgacgtggctgaaaagtgtgtcgggtacgttcgacacgctcggcatgaccacggatgaatatatggaatggctgagggggccgcgcgatgacctcggtcctcgttgataccaacgtcttcatcgacgtttttgggccggaaacgcaattcaaggagtggtcatcggagatgatcttgaggctgcgcccgcaagcgcagctcattctcacgccgatcgtctgggccgagttggcgagcatggcgccgagtgaggatcagctcatgttcatgctggcgcgtcttaatctggcgcgcgaagcgctaccctttcctgcggcctatcaggctgggatggcacacatcgcctaccgccgcgccggcggcgcgcgcgagcgcaccctacccgatttcctgatcggcgcgcatgcatccgttcgctcccaccgtctgctcacccgcgatcccgggcgctaccgggcctacttcccgactctccacctcatcacgcccgaaacccatcccatctgaattcttaaccggcggaccaccaaacatgatcggcaagctcaaaggcaccatcgacgaaatcggcgacgactatgtgctcgtcgacgtgcacggcgtctgctacgtcgcccattgctcggcgcgcaccctgtcgcgcatcggctcggtgggcgaagcctgcattctcttcatcgagacctatgtgcgcgaagaccaactgaagctcttcggcttcatgaccgcgcttgagcgtgaatggttcaacctgctgcagagcgtccagggcgtcggcgccaaggtggccctggcggtgctttcgacgctgacgccgggcgaactcgccaacgccatcgccctgcaggacaagacatcgatttcccgcgccaacggcgtcggccccaaggtcgcggtccgcatcgtcaccgaactcaagaacaaggcccccgccttcgccggcgaggcatccgccaatatcggccttaagcaggaactcggcgaaggtgtcgcctccgcgccggtcgccgacgccgtctcggcgctgaccaacctcggctacagcagagaccaggccgccaacgccgttgccgccgccatgaagacggcgggagaaggcgccgacagcgccaagctgatccggcttgggctgaaggagctgtcacggtgattggctggaagcaggtttgcaattactattgatgcactcgaccgaaagaggcttcaacgatgagcgctttgaccaaactaagttcgaaaggacagcttacgatcccgaagggaattcgggagaagctggatatcgcgccaggcaccgaattctacctgacggtcgaaggcggaagactgttggcaacgccaaagcgcgcctcattaccggaaacgaaaagactgatggatttcgcaggcattctcggcaagccccgcaatggcagaagcttgaacatggacgaaatcgatgaggccatcatggacgcggtgaccgaagacgaggagcgtatccagcggcaatggcgcgaaggccgtaaatgatcgggatagacacgaacatcctgctgcggtttcttctcgatgatgagccgacgcaaggcgcgatggctcggcaactcatgtcagagcgaaccgccgacgatccagcatatgtgagcgcggtcgtgctcgccgaaactatctggctgctcagccggcgtctcggttacgccaagtccgagatcgccacggtgttgggactgcttgctcaaacggatgaaatcattgtcgaacatgcggacgagctgaagcttttgatcgccgatgcgtcccgtccgatcgccgatatcgcggactatcttgttgtctgggccgccgccaatgccggctgcgccaaaacctttaccttcgaccgcaaggccgcccgcaaaattcccggaatggaacttctcgcatgaccgacaccgcccgcctcatcaccccggaaaaacgcggcgaggatttcgacgcgacgttgcggccgcagtcgctcgacgagttcaccggccaagccgaggcccgcgccaatctgaagatcttcatcgaggcggcgaagaaccgtggcgaggcgctcgatcacgtcctctttgtcggcccgcccggcctcggcaagacgacgctggcgcagatcatggccaaggaactcggcgtcaatttccgctcgacgtcgggccccgtcatcgccaaggccggagatctcgcggcgttgctcaccaatctcgaggagcgcgacgtgctcttcatcgacgagatccatcgtttgagccccgccgtcgaggaaattctctatcctgccatggaagacttccagctcgatttgatcatcggcgaaggcccggccgcccgctcggtgaagatcgacctgtcgaaattcacgcttgtcgccgccaccacccgcctcggccttttgacgacaccgctgcgagaccgcttcggcatccccgtgcgcctctccttctacaccgtcgacgaattggagctgatcgtgcgtcgcggcgcccggctgatgaacctgccgatgaccgacgagggtgcgcgcgaaattgcccgccgcgcccgcggcacgccccgcatcgccggccgcctgctgcgccgcgtgcgcgatttcgccgaggtcgcgaaggccgaagccgtcacccgcgagatcgccgacgaggcgctgacccgtctgctggtcgacaatctcggcctcgaccagctcgacaagcgctatctcaacatgatcgcggtgaatttcggcggcggccccgtcggcatcgagacgatcgccgccgggctatccgagccgcgcgacgcgatcgaggatatcatcgagccctatatgatccagcaggggttcatccagcgcactccgcgcgggcgcgtgctgacggccaccgcctggaagcatctcggcatgcagccgccgaaggatctcgaagccgcccagttccgcctgttccagcaggacgattgagggaactgtgccccgcttcgcgcattggcatctcgaaaggagatcgtcatgcgcaagtaccgcatcggcactgatgtcgaatggaaatggggcacggggaccggaaccggcaagatcaagaagagcttcaccgatgacgtcgagcgcacgatcgaaggtgcggtcatcaagcggaaggcgagcaccgaggaaccggcctatctgatcgagcaggaagacggcggcaaggtgctgaagagccattcagagctgaagaaatccggctgacggcggcgtaaagcgcctgcatgctccagccgctgcaacgacgaggacatgccatgacggctttcgatcccatccgatccttccgcaagctcgcctataacaacgccctcgccaatcatcgcctgcacatggcctgcgcgctgttgcagccgggcgagttcgatgcgccgcgcgtcagcttcttcccgtcgatcagctcgacgctgaaccacatgctgacggtggactggttctatgtcgatgcgctggagggtggaacgctcggcccgagcgcatgggcggtcgaggagccctgccccgatatcgcgagccttgccgccgaacagaaagccgtcgatcaaagactggtgacactcgtcgaggcgctctcgccgcaaggactggtctcaggcgtcgcgatccatcgcggcgagcgcatccagcgggagcggatggaggatgtgctcagccatctcttccagcaccagacgcatcatcgcggccaggtgcatgccatgctggcgggcaccagcgtgaagccgccgcagctggacgagttcatcgtcgccgacgacgccaggttccggggcgacgagctcgccgccctcggctggagcgaagcacggatcatggactaatcctgcagccgccccttcaacccgtcgatgatcgtcttgctgagctccgcgtagttctcgtcgaagtgatgatcgccatcgagcgcgatgacatcggcgccgctgtccttcacatccgggcaggcggctccgtcgtcatccttgccgtagacgcactggacgatcttgggatcgacggccttgagatcctttaccgggtcaccgccggcgccgtcggtcttggcgccgagccagcccatgaccgagatctggtaatccacctggcgcgacagcgacagcagggacatctgcgccaccgcgctcttggccgccggcttcagccgcgaataggcggcgggcacgacatcggcgccgaaggaatagccgaccaggagcacatgcttgaccttccactgcttgcggtagagctcgatgatccggccgagatcgtcggcggtttcctgcggttggcgctcggaccagaagtagcgcagcgaatccacgccgacgacgggaatgccctgcttctgcagcgcggcacccacctccttgtcgatatcgcgccatccgccgtcgccggaatagatgatcgccatcgtgtcgaaggccggcttggcgtcgaggatcgtcagcggcaggccgagcgggttgtcggcattgcccgatgcggcgatcacctcgtcgagcgtattgctgagcgtcgtccgtgcatcgtcctctgaatcgcgaatgtcgatatccggctgcgccttcttcaactcctccacatgggcgcggccatccttgtctgcgccagccgtgaaggccgcgatgatgggatcgggcagcgccgtgtcgctgaggccatagatcatccggtcaccgacggtcttcttcttggccggcgtgcagagctgctgcgtcagcgggatgccggcaagcgggtcgatcgccagcgtctggccgatcgtggcatcgggtgtctgcgaggcgatcgccagggcgagcgctccaccctcgccgatacccgcgatgatcggcagacggtacgggctgttgccggcggcgcgctgcacctgctggctgagcgattcgatatccgaaacgagatagatgcagccatcgttctcgctggcgtcgtatttgcgcagcgaatccatgtaggacgggaaatccacgccgatgacgacgctcccctgcccgaccagcctgtcggcctcggccttctcgttgtcgccccagcccgccgcatcggagatcagcatcacggtgcccttcacctctccctggggaaggaagacgcgcggcgaaggaatgagcccgctttcgaatgtctgcgtggtctcgtcggctgccattgcggcgggaacacagagcgccagcgcgcagacggcggccagaatgtatcttttcatcatttccttacgacccctttcaatccaccgccgatcaggagcgtcgcgtccatcagggcgatcatcggattgcctcctccggacaccgcgagatatcgcgggtgccattgagggtgaaacttggacttgaaggccctgaggcccttgaagttgtagaagcgttcgccgtgctcgaacacggtgctgccgatccggtcccataccggcgccgtctcgcgcttcgacatgcccgaaagcggcgccatgccgaggttgaaatgcgcgaagccctcggcccgcagatactccatgatctgcacgaacaggaagtccatcgagcccttgggcgcgtccggcgaaaagcgcatcaggtcgatcgttccctcgtccttggccccggtgatcaggatattggcgaaggcgacgatcttgccttcgagcctcaggatcccgacgggttgggcgagaatgtaatccggcgtgaacgcgccgagcgagaagcccttttccttggcgttgtggtcggaaagccaggcgttggaaaccgccgccagttcgtccatcacgccgggcacgtcttccggcgcgaccacctcgaaggtcagtccgtcgcgctgggcgcggctcgcggtctgccgcaggttcgcccatttcccgcccttcatctcgaaggtcgagaggtccgagacggcgagttcgccgagcttgaaggcccggagcccggcatcggcgcaatgcgaaagcagcgccggcgagatctggtagaacacggcgcggcagccggaggcgcgagccgtttcgacgaaacgccacacgagttcgggcatggcgctgcggtcgccgatcggatcgaacagcgcgatccaggagcgcccctggcgtccgtacatgatgaaggcgtcgcctctctcggagaacatcacgctcttgtcgcccatgcgcaccagattggcgtcggcgtagcgctgcttctcgacgatatcgacggcgcgctccagcgcctcgtccgatgccggctcgagccgggtcgtggccggccgcagcaggctgaagacggcgatggcggtggagatgatggtgatccccagcacggcgcgcaggccgcgcggcgcctcttcggcgaactcgaactgccaccatagctcgttgctgtagtcgacgtcgcggtagacgaagagcaggatcaccacggcgccgacgcagaccacggcgatcgccgtcagccatgacgcggtcagcgtctggttgagtagcgaggcgcgacgccggaacagccggcgactgaccagcaggccgaatatcaggaagcccaggaacgacgcctcgacgagggcgacggccttcagcagcgacagcatgagcgcggcggcggccgagaagatcgagatccaccatgcgccgtcgagcttctggccaaggccgcgcgcggcgacgaccagcgccaggccggcgaggctagagaggaaatgcgcgccctcgacgatcggcagcggcaggtaattggcgagaaactccaggttggaatccggcgtcggcgtgacgctcgagaagatcagcatgacgccgagcagcagcgacagcgccgacaggagctgcggcatcagccggatgccgatccggcggaacccggatgcgacgggatggtccgcgaagcggcgaagctcggtcgccgagaccgccagaaccgcgagcaacagcggcacgacatgatagatcaggcggtagagaaccagcgagccgagtacggcgtcgatattcacggcgctgccgagcgccgcgatgatgacggtctcgaacacgccaaggccggccggcacatggctgagcacgccgagaccgacggcgatcgcgtagacggcgagaaacaccggccagccgatcgccgtttgcggcaggagaacgtagagaacggtggccgacgccgcgatatcgaaggcggcgaccaggaactgccgcgaccaggtggcggaatccggcagcctcagcgaaaagcgcccgacgctgaccgcccggccgccacggccgagcacgacgcccgccgccagcaccagcacgatcgccccgccgatgacgcgcagaacccagctgctgacatcgatgagcggcgcgatctcgtcggcgatcgccagaagcgcgatggagccgacgcccgccagccccagcccgaaggcgatggtgacgaaagcgatgacgcggccgatctcctcgggcgtcagcccaagcctggaataggcgcggtagcggatcgcgccgccgctgagcgcgccgaagcccgccgtgttgccgacggcataggcggaaaacgcggtcagggcgacctgcgggaacggcagtttcctgccgacatactcgatggcgttgacgtcgtagaacaccagggccaggaagctgagcgccgtgaagaacagcgccagcacgatcgagctgatcctggtatcggccagcgcctgcaccacgtcctcgtaacgcacctcggtcgtcagccgctcgatcgcgaaaccgaccatgcagaacacggcgagcgtcgccagcgccgtcagatgtgtccgatatcggctgaaaaatcgcgcgatcgcggattcttctataacttcaatctcttccaagttggcgtgcttcgacatcacggaccgtcgtaaacctacatatgagcggaaatcatgtcttggacatctaacataagctacatgtaagttcttggacgcaagtcctcgaatacatggcaacactaccccaatgccgtctaacgacgcctgctttatccccaattggggcatttttggcgcgcggacagaggtttcaatattgtattttcgtaaggttaaattcttcgacgggccactgccggcatccgaagatgccggcccgccatttatgccgccggctcggtccccgcacccgcggccgcggcctggttggtcttctgcgcggcatagcgcgccgccgccgcgttggcgtcggcatcgtgcccctcgctcgaaacctgcagggtgggaacggcgaattcgatgccgttttccttgaaggccgtgcggatcatcgccagcgcgttgcggcggatgacgaactgctcgccgggcttcgtcatcatcgccaggcggatgacgatcgcgaattcaccgaattgctcgacgcccttcatcttcagcgtctcgatgatgtgaggcgcgtaatcgggattgtcgagcagcttctggccgatctgcttgatcaccttcttggccagcacgagatcggtgtcataggtgacgttgagggtgatcttgtcgatcgtccagtcgcggttgaggttgcggaccgcgccgagcgtcccgaacggcaccgtcgtcagcggcccgcgatggtggcgcagcttgaccgatcgcaggctgaaggcctcgaccacgcccttgtggctgccgctctcgatatattcgccgacgcggaaggcatcgtcccagagatagaacatgccgctgatcacatccttgacgatggtctgcgccccgaaaccgaccgccacgccgacgacgccggcgccggcgatcagcggcccgatctcgacgccgaggccggacagcaccatcagcacggcgatgaccgcgatgacgacggcgaggatattgcggaagatcggcaacagcgtctgcagccgcgcgcgcctcgccttctcgtcatcgctgatcgtcccttcgagagacgagtcggccagcctgccgttgatataggcgcgcgccagatgccagaccaggtcggccgcgagcaggatgacgatgccaccgacggaaccgcgcacgatccggtcgaccatcgtctcgccggccgccatccggtcggccgcgaagccgagaatgcggccgagccagatggccgcgatggtgatgatgatggcccgcacgccgcgatcaaacagcaccgccgcgatccgcttcctggcgacgaacccggcctcggccttgtcgagcgaccgcaccgcgagcgtcgagatgcgcagcacacgcggcaagaggacgagatagataccgatccacagcaggagattgaagcccgccacccagagcagccagagcgccacgaaatagatcgtcagcatccaggatgccgtggcgctcttatgtccgccctcggccggacgcgaccagaccgcttccgtggcgatggcgagcagccccagcccgagcacataggccacgagatagcgcgacccgttggaaaagcccaatggtgccaggagctggatcagcgcccagccgaacacgaaatagatgatgaacgtgcagctgcgcttgaaccagaacatcgccgtctcgcgcgagacgtcgcgcgcgccgtcggcatgcggcagcgtcaccagcgacaccaggatgcggccgaccgagatggtgacgcgggagacgatcagcgcgatggcaaccgcgatcgccagcgattgcgtgatcggcggccagttgaagagcacgagcggaacgagcgtcgcgatgcagaacaccagcgccggcaccacccggtaactgagattggtcgccgcatgatgcgcgaccgtggccaccgcgccatcctcctgtttgatgcgcgggcgcggcacgatcatccggaacagcacttcggcgaccgccccggccaggaagagagccagaagctcgaacgacacggcggcccagccgctcggctggacctcgcgctcgacgatctcggaagcattctccacctcgtcaggcagcgtcatcgccgcgccggacaccaggttgaaatgcgtgcgggtatgaccgaggaattccgacagcaccgacatctgttcgccggacatctcgccagcgggtgcagccggttgagccgccgccgtcggtgccggggtcgatggctgcgcggctggttggacaagtggttgggtgggcgcctgcgttgccatccattgcttgacggcgggcttttccatcagctcgaatatctgccgcacctcggcgggcggcggcaccgttgctgtcgaagcggccggcggcgtctgcgccacggccccccagctggtcatcatgaatgcaactagcggcagaagccgcttcataacgcgtgcgccaaaccccagacccatcgccagccctccaacatatatagcatagcttatattgaagcgcgggaaagaaaagcccgcgcggcttgcggcggcgcgggcttggataagcattattgctgaatggtttatgccttgggcttttcgacgtggccgccgaagccggcgcgcatggccgacagtaccttgttggcgaattcgtcgttgtcgcgcgaggagaagcggctgtagagcgcggcactcagcaccggtgtcggcacgctttcgtcgatggcggccatgatcgtccagcggccttcgcccgaatccgacacgcggcctgcataggcgccgagcaccggatcggcatgcaatgcgtccgaggtgagatcaagcagccaggaggtgatgacgctgccgcgacgccagacttcggcgacgtcctgcaggttgaagtcgtactggtagtgctccggattggcgatcggcgccgtctcggcatcgacttcatgcgtggcagcaccgatattggcgcgcttcaggatgttgaagccttcggcataggcggccatcaggccgtattcgatgccgttatgcaccatcttgacgaagtggcccgcgccgtgcggaccgcaatgcagatagccctgctcggccgtgctgccggcctggtcggggcgatgggccgacggcgcgacgttgccgacgcccggcgccagcgacttgaagatcggcgacagcgagtcgaccaccggcttttcgccgccgatcatcaggcaatagccgcgctcgagaccgaagacgccgccgctggtgccgacgtcgacatagtgcaggcccttggccgtcagttcgccgccacggcggatgtcgtcgtggtaataggagttgccgccgtcgatgatgatgtcgtcgctgtcgagcagcggcgtgatctgcgcgatgaccttgtcggtgatggccgccggcagcatcagccacacggcgcgcggacgcgacagcttcgaaacgaactcttccagcgaagcgctgccgacggcgcccttgccgaccagatcgttcacgctttccgtcttcgcgtcgtagaccacgcattcatggccatcgcgcatcaagcgctggaccatgaagctgcccatgcggcccaagccaaccataccaagctgcatctcataatctcctgagaattaagaatctaatcgatattatgcgcgaatacctatcactcgcgctgcagcaagcaagcgaagtctccgtcacaatgacgggaacgtcaacgcatcgcatgccgatcatcgctgaaaccgcgagcgcgcagggcattccgtcgaatcttgaacttgaaaaaatatcgcgaatgtcaaccgcggaccgccgctcaccccacggctcattgctgcactgcaagaataacgcggccgctggtggcgtcgctgagcatccgcgcggtctcgggcgccacggcttccgggatggacagtgtcagcagcgctcccgcgtccacgaacacctcggccacgacgcgcacgccggccgaggccgctatccgcgccttgaccaaggcgagatccgagaaattcaccgcgatctcggcctcgacggtcgcgaccagctcgaccagcgtcgccgctctcaggcaggccgccgccgtgccaccataggcgcggatcagcccgccggttccaagaagcacgccgccgaaccagcgggtgacgacgacggccacccggtcgagcgattgtccgtcgatcgcctgcaggatcggtttgccggcggtgccgctcggttcgccatcgtcgttgaaccgatagctctggccgatccgccatgcccagcaattgtgattggcggcgggatccgcatgcgccgccagaaacgtccgagcatcctcctcggagccgatcggcgccgcgacagccagaaaccggctcttcttgacgatctgctcgagtgtctcggtgcggataagtgaaaacatggccattgccatatcgccagcaacgctcgcttcgcaagcaaaaccggctcccgccggaagctcccgaccgcaaatcggaagccggaaaagcaaaacgcccgcagctcaaggcaacgggcgtttgaaatgtctccgctcgccaggagcggcggtcgcgtgttagcgcgtggcgtcgcgggcaacgcgctcgatgtcggcgcggttgatgccgagatcgctgagcgcacggttggacatgcggccgagttcgttgatggtctgacgatacttgcgccagttattgaaggagcgtgctacgttcatggtaaatcccctttcctagggctttcagcgcctggcagcgcctttgctgcccgtgtctctctgttgatgtgaatataggcgtcctccccgtcggcgaacagcgctaaagcatcagaacaccaatgcgtgcagcgcataactaaaccggtgctgcttaatatttttgcccctgaaaaagccgtaaacgtttcagaaagccgctcttttcgggaactttcgccccgatctccgcggagcgaggccgccccggccacattcgttaaagtgttttaaccgttttaatcgacggatatccgcttgaaattacagatacccggcaattcacggctgcaaaaacacgaatttcctccaatgcgctcagcgcatacattctccacacccctgcgacagcgcgccagaaccatccccgaatgcgcgccgacacaccgcttttcgccgcgaacagccgacggccccattgccagcaaacccggcatacggcagtagagacgcgccgatgcggtcgagtgcgcgaccttcggcggccgtgccagtacccgcgcaacaaggaagtcacatgaagcatatcctcgccgcggccacgcttgttgcggccaccctgctctccatggccacggcccgcgccgccgatttcggcgtcaccccgatgatggatggcgacagcttcatcggctgcctcgcccagaacaaccgcaccggcatcggctacctcgcggtcggcgacaagctggccctgtttgccaatgcggacgccttcgcgatcaccaagggcgagcgcgttaagggtacatggtccgtggatggcgccgccgccgcggaattctcctcgaccgcagacagcgacaagaccgtgacgatcgacgtcccgaacgatgcgccgaccgtcaccgccttgacctccggcaaggagctgaccgtcaccgccaacggcatcgacgtcatcctgccgctgaccggcacggagcaggcgttcaccgagctgctgacctgcatgaaggaaaacggcggcgaataaggccggacgccagggcgctctaagcgcgacgcgatcacgggcgatgggaaggaagagtgcgatccgcggcaaccgatggaggtttacgatcctgggtgcctacaaacgtaggtgggcgccatatgtccaagcccacgggcctggccagggacagctccctttggatcgagtatggccccagggattgtggttcctgtcgagaggcgcagatcgcaactgctatataagaccgatccatgacgcgcgccagaggctgacgcggacgtcccggatttaattcaaggcgctagttcagcgctgcgggcgcccggccgttcagcttgtcggtgatcccgcgcagctggctgctgacctcgacgatggcggcggcgatgctttcttctgtgcggctcgtcgcggccagcaccgtgtcgcggttgctgcgcaggctgttgagttcatcttcaaggctggcgacgcgccgcgtcagctctgagatctcgtccatgatcatgatgccggccatgacggtgatacggagatcgccgatttcgccgaactgacccttgagatggccgacataacggtcgaaacgggtggcgagatcggtcaggtgctcttcctgtccctcctcgcaggccatgcgataggccttgccgtcgatcattaccgttacctgcgccatgtcctaagccctttattagcggtcgagaaccgcgcggatggtctccatcgccgtcaccaggcgacgcgacacctcgcgattgacctcttccagccggttcgcgcggaattccgcctggtcgagctcctgcgccagcttggagcgatcggcatgcacgcggcgaacctcgccctcgatctcgccggtctcgcgctgccgctcgatccgggcgtcgacggcgctgtcgagcgccgaaatcgcctgcctgagctccaagagcgctgcatcgatgctgttgccagtggatgtcatgtctttccggttccccgcgcaagacccgcgaatcggtatcgaggcccgacgcgatgttttcaaaaggatatgcagctcgccaactgcccgtcaataaaggcctgagggcggcaggcgagctagttgtggatgactgaaatcggcggctccgtcagcgggcctgtcacacgcctgtcaacttttgttaaaatcgttggtcaaatgtcaaaaatcgtcattccgacccctctaatagggcttcgatttattgacttgcctgctccaactgctatttgtgcacccgctctcattgatggtctccgcaggcttgaggccatcccccgacaccccggaacaagcggaatagcgatgatttctcctgaacaacacgaccggatggcaaacgcgatccgtttcctctcaatggatgcagtcgagaaggcgaattccggccatccgggcatgccgatgggtatggccgatgtcgcgaccgtcctgttctcgaagtatctgaagttcgacccgttgaagccgcactggccagaccgcgaccgcttcgtgctgtcggccggccacggctcgatgctgctctactcgctgctttatctaaccggctaccctgacatgtcggtcgatgacctccagcagttccgccagctcggctccaagaccgccggccaccccgaatacggccacgccacgggcatcgaaaccaccaccggtccgctcggccagggcattgccaatgccgtcggcatggcgatcgccgaacgcaagctgcgcgaggaattcggcgccgacctgcaggatcactacacctacgtgatcaacggcgacggctgcctgatggaaggcatcagccatgaagccatagcgctcgccggccacctgaagctcaacaagctcatcctcttctgggacaacaactcgatcaccatcgacggcgccgtctccctgtcggattcgaccgaccagatcatgcgcttcaaggccgttcactggcacacgatcgaagtcgacggccacgaccaggcggcgatcgcggcagccatcgaggaagcccacaagtccgacaagccgaccttcatcgcctgcaagaccgtcatcggcttcggcgctccgaacaagcagggcagccacaaggttcacggttcgccgctcggcgccgaggaaatcgccgctacccgcaaggcgctgaactgggaatacgaacccttcgtcatccccaacgacgttctctccgattggcgcgccgccggcacccgttcggccgacgccgtcaaggcatgggaaggccgcctcgagaaggcagcgaccaaggccgagttcaaccgccgcttcgccggcgacctgccccagggcttcgacgccgccatcagcgactacaagaagaagctcgctgagaccaagccgacggttgcgacccgcaaggcttccgaggacgcgcttgaagtcatcaacggcttcctgccggaaacgatcggcggctccgccgacctgacgccgtcgaacaacaccaagaccagccagatgcattcgatcacgccgacggatttcgccggtcgttacatgcactggggtatccgcgagcacggcatggcatccgccatgaacggcatcgcgctgcacggcggcctcatcccctacggcggcggcttcatgatcttctcggattattgccgccctccgatccgcctcgcggcgctgatgggcatccgcgtcgtccacgttctcacgcacgattctatcggcgtcggcgaagacggcccgacccaccagccggtcgagcagatggcctcgctgcgcgccatcccgaacctgatgatgttccgcccggccgacgccgtcgaaaccgccgagtgctggcagatcgcgctgaacaccaaggaccgtccgtcgggcctggcgctcacccgccagaacctcaccaccgtccggaccgaatacagcgagaagaacctctgcgaactcggcgcctacacgctggctggtaatgccgacgccaaggtgacgatcttcgcttcgggctccgaagtcgagctggcggtcgccgcccgcaagacgctcgaggaaaagggcgttaccgtccgcgtcgtctcggtcccctcgaccgaactgttcttcgagcagccggatgcctaccgcgccgagatcctcggcaagtcgccgatcaagatcgccgtcgaagccgccgtccgcgaaggctgggatgccttcatcggaccggaaggcaccttcgtcggcatgaagagcttcggcgcttccggcccggccaaggatgtcttcaagaaattcggcatcacgacggaagctgtcgtcgctgctgttgaagccaagctttgatgtgataaaggagcgcctgagggcgctcctcattccataacgcaagccctactctcgggagagacacacatgactgtaaaggttgccatcaacggcttcggtcgtatcggccgcaatgttctccgcgccatcgtcgaatccggtcgcacggacatcgaagtcgttgccatcaacgacctcggcccggtcgagaccaacgcgcacctgctgcgttacgactcgatccacggcaagttcccggccgaagtgaaggtcgaaggcgacacgatcaccgttggcggcggcaagccgatcaaggtcaccgccgtgcgtgatccggcgcagctgccgcacaaggaactcggcgtcgacatcgccatggaatgcaccggcatcttcacctcgcgcgacaaggctgccgctcacctgacggctggcgccaagcgcgtcatcatctcggcgcctgccgatggtgccgacctgaccgtcgtcttcggcgtcaaccacgaccagctgaccaaggaccacctggtcatctccaacgcctcctgcaccacgaactgcctggttccggtcgtcaaggttctcgacgacgccgtcggcatcgatcatggcttcatgaccacgatccactcctacacgggtgaccagccgacgctcgacaccatgcacaaggacctgtaccgcgcccgcgccgcagccctgtccatgatcccgacctcgaccggcgccgccaaggccgtcggcctggttctgccgcacctgaagggcaagctggacggcacgtccatccgcgttccgaccccgaacgtctcggtcgtcgacttcaagttcgtctccaagaaggccaccacggttggcgagatcaacgaagccatcaaggccgcgtcgaacggcaagctgaagggcatcctcggctacaccgacgagccgctggtttcccgcgacttcaaccacgacagccactcgtcgattttcgccaccgaccagaccaaggtcatggaaggcaacttcgttcgtatcctcacctggtacgacaacgagtggggcttctccagccgcatgtcggacacggccgtcgcctacgccaagaccatctaaggtcggcgatatgggtttcggaaagcggctcgggaaaccgggccgcttttcatttgtcgagacgagccgcgacggtcaaacgcgcttgcccgcatcctgccggatgcggtaaattcaagccacaggctgcaacgcggcgcccaacgagaagccggacctgcaacaggcggatcacccatgagaatgctgatgttggcaatcctactcgtcatgatcgccggcgtgctcagcctcaccgtcgtcggcggcggctccaggcagatcgccaagggacagccgctgctcgcctcctcctcgcgcttgatgggaccgcgataattatactggcggcgggctggcatggcatcaccgaacaccatagtgtcggacaaacgaaaagcgaaagagaattcaatggactacttcaccatcgagatatcaggcaaacccatcgcgagcttccgttccgaaaacgccgaggacgcccggcacttcttcgaggccgaggatttccgcgaggacctgaccgtgcttcagaccgaaggcaagcccgtatgggatggcgcggcggcaatcacattgcgcaaggcgaccccggatgaggcgagcgaagtcgagcatgcctacgagttcgacgacgatccctcccgcacaatcgaagacgaattcgtcgtcttcctgatcccgatttccgacgcggacgaagacgacggcaacgacgacgcgtgagccgtcacaaatatcccggaatacgaatgtgcaagaaaagaacagggcagcgatttttgccctgctctcgcctgatttgaccctacactttacgcaggatcactttccaaccgttcattcgatttgccccgggcggaccactcagcagcatgatgcatgcaaggcgcaaggatagcccttcaggtctacccttcgcctgaattttgccctttactggcaggcatcggacaggaaccggagaagcgatacgatcttttgagacagccgcattcgacgcgaagcgaaactgcggcgattgattttgcgtgaaggggcttgggcatggaagcattctacatcgtcgtgctggtatcgacggcgcttgtgcttcttgccgctttctccagcctgctcgccttccgcttcggcgccccgctgctgctcctgttcctcggtatcggcctgcttgccggcagtgatggcctcggcatcgaattcaccaacaattacctcgcctacatcctcggctcgatcgcgcttgcgatcatcctcttcgattccggcttcggcacgccggtacaggccttcaagctcgccgccgttccctccataaccctggcatcggtcggcgtgctgatgacggcggcgctctttgccgtcgccgccatgtggcttttgaacttcacctggctcgagggcatgctgcttggctccatcgtcgcctccaccgacgccgcggcggtcttcttcctgctgcgcatcggcggcatcaacattcgcgacaaggtacgctcgacgctcgaggtcgaatccggcaccaacgacccgatggcgatcttcctcaccatcgcgctggtcgaggttctggcgtcgggcgagcgctacagcggcatcaatatcggcatgctcgccatgttcgtgcagcagatgggcctcggcgtcattctcggcctgctcggcggcatgatgatcgtgctcatcgtcggccggctcgagaccgatcgcggcctgacgccgatcttcgtgctggcgctggcgcttctggtcttctcgttcaccggcgccgtcggcggcagcggcttcctcgccgtctacgtcgccggcatctatgcgggaaaccgcaagctgcccggctacgcctcgatcaagcgcttccaggacggcatgacctggctggcgcagatcatcatgttcctggtgctcggccttctggcgacgccatcgcagttcggaacgatcgccattcccgccgtgctgcttgcgctcttcctgatcttcatcgcccgcccccttgcgatctggctgtcgctgctgcccttcgactacacgcagcaggaaatcggcttcgttgcctgggtcggcctgcgcggcgccgtctccatcctgctcgccatcatgccgatcctgggcgggctggaaaatggtcaggtctacttcaacaccgccttcatcatcgtgctcgtctcgcttctcgtgcagggctggaccatcaagccggtcgccaagaagctcggcctgatcattccgccgcgcatcggcgccgtcgacaaggtggaggtcgacctgccgggcgccgccaaccacgaactcctctcctaccgcgtcgtcaaggacagcccggtgctgcgcggcgagcgcattccgcgctgggccaccccctcgctcgtcatccgcgacggcaagtcgatgcgctatcaatatgccggccgcctgcgcgagaacgatctcgtctacctcttcatcgttccttcctactcgcgcctgctcgacaagctcttcgcaagccgcgtccccgtcgaggaagacgacaccgatttcttcggcgccttcgcgctttccccaagccgcccggccaccgatctcgacgccgcctacggccccggccttctgaacgaaaacgagaagggcctgaccatcgccgagctgatgaagcagcgtctcggcggcaaggcggaatatgccgaccgcgtgcgcctcggctccatcatcctgatcgtccgcgacctcgacgaccacgatcatatcagcgccatcggcatgtcgctggaggccgtcgagccggccgtgacgctgccgatcttcatcaatctgcgcgatatcatcgaccgcgtgcacgaccgcttcaagagccgcaagaacaaggaggcggcggccgccgccgcggctggaaaagccgacgaaaacccgcgctgaacgccttgcgtccgcgatgatccttgctatggtccccgcatcttttcaggcaataaacgaacggatttcccaatgccctccttcaagacactcgacgatcttaacgacattgccggaaagcgcgttctcgtccgcgtcgacctcaacgttcccgtcaaggacggcaaggtgacggacgtaacccgcatcgagcgcgtcgccccgaccatcaaggaactctccaagaagggcgccaaggttatcctgctcgcgcacttcggccgcccgaaggatggcccctcggccgacctgtcgctgaccctcatcgccccatccgtcgaagccgtgctcgaccatcccgtgcagacggcgaccgatgtcatcggcgaagtcgccgccggcgccgtcgccgccatgaaggatggcgatatcctgcttctcgaaaacacccgcttccataagggtgaggaaaagaacgaccccgatttcgtcaaggcgctggtcgccaatggcgatatctacgtcaacgacgcgttctcggcggcgcaccgcgcccacgcctccaccgaaggcctcgcacgtcaccttcccgcttacgccggccgcaccatgcaggctgaactggaagcactggaaaagggcctcggccagccggtccgtcctgttgtcgccatcgtcggcggcgccaaggtctccaccaagatcgatctcctcatgaacctcgtgaagaaggtcgacgcgctcgtcatcggcggcggcatggccaacacttttatcgccgcccgcggcaccagcgtcggcaagtcgctctgcgagcatgacctcgccgacaccgcccgccagatcatgatcgaagccgcgaccgccggctgcgcgatcgttctgcccgaggacggcgtcgtcgcccgcgaattcaaggcgggtgccgccaacgagatcgtcgccatcgacgccatccccgatgacgccatgatgctcgacgtcggcccgaagtcggtcgaagccgtgaaggcctggatcgagcgcgccaacacgctggtctggaacggcccgctcggcgccttcgagatcgaacccttcgacaaggcgaccgttgccgccgcccaatatgcggcagagcgcaccaaggccggcaagctcacctccgtcgccggcggcggcgataccgtctcggcgttgaaccatgccggcgttgccgacgacttcacctacgtctccacggcgggcggcgcgttcctggaatggatggagggcaaggtccttcctggcgtcgaagtcctgaccaaggccaagtaagccaaaccgggcttctggccggtttgaaccgtttaatcgagaccgcgaaagccagcgctttcgcggtcttttagttgatgctagaataagccttaagtttcaaacgtttgaaatgatttcaatcgtttcaatagcttaacccaggattttccttttaaaattcttctgatatcgcagatccagtgcttcgagagcgtgaaaggacccgacatcttgccgatgtcgatccgttgattgatcgatcaggcgttgccgatcggttttgagatagaaaataacccgcgcgcgaggcgccggttcgaataaggagtgacctatggtggacgcgaagatgttgaacaagatcagctcggcgccaggattcattgcagcgctggaccagagcggtggttcgacacccgcagcgttgcgcctctacggcattgccgacaccgattaccatggtgacgaggaaatgttccgcctgatgcacgccatgcgcgtccgcatcatgagcgcgccggcctttaccagcgacaagatcgttgccgccatcctgttcgaacgcaccatggatggcgacgtcgacggccagccggttccctcctacctctgggaaaagcgcggcgtcgtgccgcttctcaaggtcgacaagggcttggccgccgaagaaaacggcgtccagatcatgaagccgatgcccgatctcgatgccctcctggcgcgcggccgcgacaagggaattttcggcaccaagatgcgctcggtcatcgcaaacgccgacaaggccggcatcgcggccgtcgtcaagcagcagttcgaggtggcgcgccagattatcggcaacggcctcgtgccgatcgtcgagcctgaagtctccatcaagagcccgacgaagcaggaggcggaagccattcttcgcgacgagatcgcaaagcagctcgacctgcttccggcgggcgaagaggtggtgctgaaactgaccatcccgaccgtcgccgatttctacgcaccgctgatcgcccacaagtcggtcgtgcgcgtcgtcgccctttccggcggctacagccgtgtcgatgcctgcgagaagctcagccgcaaccacggcatgattgcaagcttctcgcgcgccctgacggaaaacctgcgcgtttcgatgagcgacgccgagttcaacgccagcctcgccgaaaccatcgacgagatctacgccgccagcgtcaacaaggcctgacgcgcgagccgacctttcactggaaccgacggaaacccggccgcctctgacggccggttttttattgccggtcgattgtcacggcgacaagaattgcccttctgccgggcggtggcgatggctactgagtgaggctcctgaaaccatcggagcacgcgatgacagccgtttccttcaccaccgtcgatgtcttcacctccacccgcttcgaaggcaaccctctggccgtcatgacggatgcacgcggcctctccgacgaccggatgcagaagatcgccgccgagttcggctattcggaggtgaccttcgtgctgccgcccgaaaaccccgaaaataccgcccgcgtgcgcatcttcacgcccacgacggaagtccccttcgccggccaccccaatgtcggcacggcctatgtgctcggcaacctcgacgacattttcggcaagccggtcggcgacatcatgcgcttcgaggaaaaggccggcgtggtcaccgtcgacgtgcgccgcgaacagggccgcgtggtctcgaccgcgatccgcgccccgaagccgctatccactggctctaccgtcgccgaagacaccatcgcccgctgtatcgccatcgacagctcgaaggtcagcgcgcgcatccaccggccgctgtcagtgtccgtcggcctgagcttcgccgtcgccgaactcgccgatctccagacactcggcaacgcccgacccaacctcgcctgttttcaggatgccgccggccccacgctggagggaaaccacgacttctcgctcttcgtctacgtccgatcggcggacaagccctggcacatccgcgcccgcatgttcgccccgctcgacaatgtccccgaggaccccgcgaccggtagcgcctcggcggcgcttggagcctaccttgtctcgctcgaacccgatcccgacatgagggtgtcgctgaccatcgagcagggcgtcgaaatgggccgtcgcagcctcatcggcatcgaggtgacgaagacgaatggcgtcgtgaccgacgtggtgatctctggcgcctgcgtcgagctcatgcgcggcgtcatcgactgctgagcgcagcacgcttgaagacgacggatcgacgctcccccgcgcttgacagcgatccgtcgcgagcgatatcacgcctcgtatcggcaatggattctgccgaggccaaaaaaggctgaaccgcttccccgacgaagccgatgactcctacttcatttgccatcgcgcgaaagggtagagtcatgttcgaagtctcattgtcatcacaaatagccggcgatgccgcccctcatcagggggttgggctatgatcgccttctccgacattttcggcatccgtctccgccagcttcgcgacatcggcaagtggatcgccatcatcgttccgatggcgatcgtcgtgggctcgttctgcgccttctttctctgggcgctcgagatcgcgactcgggcccgcttcgatcatccctggctgctctacggcctgcccgtcgccggctttctcatggtcttggtctaccagagattcggaaagtcggccgagggcggcaacaacctcatcgtcgatcagatccacgagcccggcgccggcgttcccctgcgcatggccccgctcattctggtctcaaccatcgccacccatctcttcggcggttccgccggccgcgaaggcacggcggtgcagctcggcggcagcgtcgccagcgccgtggcgaagctcttccgcctctcacccgccgatgtccgaattctcctcatgggcggggtcgcggccgggttcggcgcggtgttcggcacgccgatcgccggcgccatattcgcgctcgaagtgctgaccatcggccgcatgcaatacgaggcgctgatcccctgcctgatggcatcgatcaccggcgactggaccacccaggcctggggcatcgagcacacgcattaccacatcgcctatctcgccgacgcctccgccgatgtcttccgtctcgacgcgatcctgctgctgaaggtcgcggtcgcaggcgtcatcttcgggcttgccgcgaaatccttcgccgagctctcccacgccgcctccgcgctgttgaggaagcgcctgccctacgcgccgctgcgtcccgttctcgccgggctgatcgtcatcggcctcgtccatctgctgggtacccgcgcctatctcggcctcggcgtctggtcgccaaatgccgccgacccgacgataccgggcttcttcgcgcccggcgccgtcgatgactggagctggttgtggaaggcgctctttaccatcgtcacgctgagcgccggcttcaagggcggcgaggtgacgccgctgttcttcatcggcgcggcgctcggcaacgcgctggcggccctcctgggcgcgccgtccgatctcttcgccgggctcggcttcgtcgcgatcttcgcgggcgccaccaacacgccgctcgcctgcatgatcatgggcatcgagctcttcggcgccacccacgccgtctacctcgccgtcgcctgcttcctcgcctatctctgcagcggccattcgagcatctatctggcccagcgcctcggcgtgccgaagcgccgcgccatcggcaccatcccatcaggcgtttcgcttcgccatatcagggatcggaaggggccggctatcgatggggtcgagaagtaggaaaataagagcgcccgccacgcgatgcgtgacgggcggctaattttgcatcggctacgccgcgtttgaaaacaggtagggccggcgttcggtctcgctcgtcttgaaggaatgccgaaggtgcagcaggtccttgcgtgcgatcagtccgaccagccgcttcgtctgcgggtcgatgacggggatgcgcccttcccccgaattcagcatgatatcggtgacgtgcccgacggtgtcatcggcaagcgcataggcgatgtcagcgtccgaggtcgcgtcggcaatgctcatgtccggcgccacgctctcctgttgccaccgcagcacgtcagcgcgtgagaccatgccgagcagcacacgctggtcgttgacgacgggatagacgcgatgcgtcttctcggccgtctcgaagaaggtcttcacctcccccaccgtctgccgcgaggaaagcacgtcgacatccgcgatcatgatgtcgcgggcgcgcgtcagctcgaacgggtcgatgccgtattcgcgcgtgatgtgctggccgcgccgggcgatcttttccgtcaagatcgaccgccgaagcacaagcaccgtcaccgcataggcggacaccgtggcggcaagcaggggcaggagcgccgacaggtctcccgtcagctcgaccgcgaagaaggttccggtcagcggcgcgcgcatcgtgccgcccatcatcgccgccatgccgatcagcgcccagaaaccctggtcgcccggcagaaacagccccgccagccagccgatcgcgccgccgaaaatgagcagcggcgccagcacgccacccgacgtgccggaggagagcgcgatcagccagatcgccacctttacggcgaggatggtgaggacggcggccggaaggacgttgctgtgcagcagatcctcgatgatgtcgtagccgacgccgagcgcgcgcggctcgatcagcccgccgagcccgatgaacaacccgccgatcgccgggcaccacatccagtggatgggcaaggcctcgaacaggtcctcgaccttgtagaggagcacggtcaggagacccgagccgaacccggtgagaatgccgagcccggcgcacaaggcgatcccccactagggcaagttcatggcgaactgcacgggaaacagcggaccggcgccgaacagagccggccgccagcaggccgatacgcacacggccacggcgaccggaatgaagcttctcggtttccattcgaacaaaagcagttccaccgcgagcagaagtgccgcgatcggcgtgccgaagatcgcggtcatgccggcggccgcacccgccaccagcagcgacttgcgctccgcagaactcatctcgaagcactgcgcgaacagcgagccgatcgctccgccggtcatgatgatcggaccttcggctccgaacggaccgccggtaccaatcgaaatcgccgacgacagcggcttcagcaccgccaccttcggcgacatccggcttccgccgatcaggatggcctcgatggcttcggggatgccgtgccccctgatcttctccgaaccgaagcgcgccatcaacccgatgaccaggccgccgataacgggaacgacaagcatccacaacgacggacgcgcattcgccaggctttcggcaacgaggctgaactttccgaaccagacgatattggagaccagcgagatcaggctgaccagcagccatgccgcgaacgcgccgcccgtgccgacgacgacagccatcaaggtcagcgccagaacgcgcttgtcggtggtgaaatcaccggccgcgcggcgcggcacaagcgaggcaacgttgggtgaggtatcgggcggaagagacttggggggcatcgtcgatcctgtctggtgtttgtctgcgcgctcaaatatatcgtaatacgatataaatcaaggcgcccgcgttcatgcccgatacggtggtccgcccgcgcgctgcggggctttgcggatgacagcgataacgggtagagatcgccctgattttcacgggtatcgacggaaggatgtggcgatgcgggacgacctgacggacgaggattacgaagcgctcgcgaaccttcgccacacgctgcgccgcttcatggatttcagcgcctcggccgcgctcgaagccggcctgcccgcgcagcagcatcaggcgctgctcgccatcaagggacaccgctcccccgatccgatgaccgtcggcctgctcgccgaacggctgatcatcgcgccgcataccgcgaccgaactcgtcgggcggctggaaaccgccggctacgtcagccgccgcgccgaccccaacgaccgccgccgccagacgctcatcctgacggaccaggccgaagcagtcctcaaacagctgacgaccatccacctcagggaaatccgcgaaatggcgccacgcctgatcggcatcctccagagcatccagcaggaaaccccgctgccggacgatccgtggtcggcataatgcttcggtaaggtcgcgggacgaagccaagcagatcctgccaacgggaccgctcccggaccgttaaacgaacagatcccgccccaaaagcgcgaccgcccagatcgcgaaggcgaagagcgcgatcttccagaaatcggcgcgcttcctcagacccggcagaccgagcggcttgatcaggtgcacgaccatcgcaagcatcagcagaagcgcgatgagcttcgtcatgtctttatttttccatacgttcttgatgtcacaggacggacattatttcgcgcgacgagtgtatctaaatacgccgtaaaggcattcggggagacaatcaacatgtcagagactgggcggcatcgcgggctgccatatgtcttcgcgtagctaagtcgagttgcatggggggccaatgaaacgaaatcttctatccgtcgcatcacttctgttcggcacgctttttctgttcatgggcaatggcctccagggcatcctcctccccgtccgcggcaatctcgaaggctatgcgaccaccacgctcggcctgctcggcacctcatgggccgccggcttcgtcatcggctgcctcgtcgcgccccgcatggtcagccgtgtcggccatgtgcgcgccttctccggcttcatatcgatcatcgccatcatcgcgctggtaagcggcatcgccgttcatccggtctggtgggtgctgctgcgcgccgtcaccggctttgccacggccggcacctctatgatcatcgagagctggttgaacgagcgggcgaccaatgaaagccgcggcgcgatcttctcgctctatatcgccatcacccttatcggcgtcgtcgccggccagatgatgatcccgctcgaggacgtccgcacgcccgttctcttcatgatctgcggcatcttctattgcatcgccatgctgccgacgcttctgtcgaccgccgcctcgccgcagccgctgaaggccgtgaagctcgatctcaaggcgctctatcgcaattcgccggtctcctgcctcggcattctccttgttggcatcgccaacggcgcctatggcacgctgggagccgtgttcggcgccggcgccggcctctcggacacctcgatcgccgtgatgatgagcgccaccatcttcgccggcgcggtcatgcagcttcccgccggccgcctgtcggatcgcatcgaccgtcgctacgtgctcgccgccatgtcggcgatcgcggcactcgccggcctgatgctcgtcgtattccagcccgcctcgccggtcttcatcatcacgctcgtggtgctttatggcgcggtcgccaacacgctctatccgatcgccgtcgcccacgccaacgactatgcctcgtcggaggacttcgtgaaggtctccggcggcctgctgctgctttacggcatcggcaccatcatcggcccgacgatcggcggccccgtgatgtcgttgatcaacccgcacgcactgttcctggtcacagcgctcgcccatgtgttgatcaccgcctacgcgatcgttcgcagccgcatgcgcgccgccattccggccagcgaccgcgacgcctatacgaccatcccgacggccacctcgcagatgatgacgcccgagggcatgtcgctggccgatcgcggacagaacaagacgcccgaaccgccgatggagccggcggcgcgataaggtgaagcgagaaaggccgggcgcggcccggccggcacgaggacggaggaccgaagatgagcttcatggatgacgaccggccacaaaagaaggcgaatcacgagatcggcatggacctgtcgatgatgtcggtggacgagctgaacgcgcgcatagacatgctgaaagccgagatttcgcgcatcgaacaggaagcggcgcgcaaggcatcgggaagactggctgcagaaaacctcttcaaatcgtgatccgccgagaggccggatttgatttatagccaccgcgcaagtgttaattcggcacacacttaatgaggcgttaagctttctaatgtattgatgtgctcatccggacttgctctggatctcagacagtttcccatgcggtgaattggtctgatttttctccctgttttaccttgagagccgcttttgcggctctcctttttcgcattggctggggacgaaaaccacgaaactgtggaagttaaccctttattaagaaacgccttgcgctattgggctaaagctaccatctttaaagtcattgaagcgggcccgtgaaaccttttagcatcggccggcgttacctgatcaataagtagatgcgtgcaacagggaccccttagatgtcagagcttggattgaacacgatcagttttgccggacgcgccgccgcatcgtcgcagtttaagacattgtatgccgagggcatgtcgctggtcgaagagaccgccgcctatctggatggcaatggccgcaccgcatccaaggttctgccgcgcatggcatcggttctctacgccgcggaatccatgcgcctcaccacccgcctgatgcagatggcctcctggctcctgctgcagcgcgccgtcaacaatggcgagatgtcgcgcgatcaggttctggccgagaagaacaaggttcgcctcgacggcttcaacgtcgatcgcaacgcgccgggctggggcgacctgccggaagccttccgcgacctgatcgaacgttcgctgcgcctgcagaaccgcgtcgccctgctcgaccgcgaaatctaccgcccgaacgaagcaccgatcgtgcccgacaaccagaacagcgtgcaggctcagctcagcctgctgcagacggccttcggcaacaactgatccattcgaagtggacgacatgaaccggctgcgttccctgcgcggccggttttttattgtccgttcgggagccggcgatagacgttcggatcgagcatatcccaaacgcaaaaaagccccgctttcgcagggctccttcgaaatcagtgcaacagcagcgattagaggccgaggccgccgaaacgcttgttgaacttggaaacgcggccgccgcggtccatgagctgctggttgccgcccgtccaggccgggtgcgacttggaatcgatttcgaggttcatcacggcgccttccgaaccccaggtcgagcgggtttcgtattcggtgccgtcggtcatgaccaccttgatggtgtggtagtcgggatggatatcagccttcataacaatcttcctgcgatgtcacgtccatttgacgcaccacgttgcgacaagaggaccgattgaataaatgaagccgcagtcgcttctggctacggcttcccattaggatgcggtgcctatacatgaaggccactaggataacaagagccccgcgccgtgttgcacggcgttgatggcgctggagattgaattggcagacgcaatgcagaccgagaagaaaaagtcgcgttctctgaagcctcttggcagattgacgccttacgtcatgcgctatcgcggcctcgtcaccggcgccctcttctcgctggcgcttgccgccctcacgtcgctggcgcttccgctcgccgtacgccgcatgatcgaccacggtttcagctactccgatggtcgcttcatcaacagctacttcatcatgctcatggccatggccgtcgttctcgccatagcgagcgcgctgcgctatttcttcgtgatcacgcttggcgagcgcatcgtctccgaccttcgccgcgatgtcttcgcgcatgtgacgcggctgtcggcctccttcttcgacgtcaaccagtccggcgagatcgtgtcgcggctgacggccgataccacgcagatcaagtccgccgtcggcgccaccgcctcggtggccctgcgcaatatcattctgtgtctcggcgccatcgtcatgatggtcgtcacgtcgccgaagctcgccagcctggtgctgtcggccataccccttatcgtcttcccgcttgtcgccttcggccgctcggtgcgcaagcgctcgcgcgcggcgcaggacacgctggccgaggcctcggccttcgccaacgaaaccatcgccgccacccgcacggtccaggccttcggcggcgagacggccgcggcaagccgctacggcaacgcggtcgaagccgcctacacggctgcccgcgccgccatccgctcgcgctcgcttctgacgggcatcgccatcacgctgatcttcggcagcgtcgtcgccgttctgtgggtcggcgcgcgcaatgtgctggaaggcacgctgtcggccggcacgctcggccagttcctgctctattccgtcatcgccgccggctcgctcggcgcgctctccgaggtctggggcgagctgtcgcaggcagcgggtgccgccgaccggctgaccgaactgctcgacgaagtatcgccgatcgtgacgccggcctcgcccgtcgtcctgcccgagccgagcctcggccgcgtcgagttcgcggatgtccacttcgcctacccctcgcgccccgacacatcggcgctgcatggcttgagtttcgcggtgaaaccaggcgagaccgtcgccattgtcgggccgtcgggcgccggcaagaccacgatcttctcgctgctgctgcgcttctacgatccgcagcagggcgccgtgacgatcgatggcgtcgatgcccgcgcgaccgacaccggcggcctgcgaacgcgcatcgccatcgtgccccaggacgtgaccatcttcgccgcctccatccacgacaacatcgcctttggccgcccgagcgccacgcgcgaggaggtgcgcgccgcagccaccgccgcccaggccgacgagttcatcgcaaggctggcggagggctacgacaccaaggtcggcgaacgaggcatcatgctgtcgggcggtcagcgccagcgcatcgccattgcccgcgcgatcctgaagaacgcgccgatcctgctgctcgacgaagccacctcggcgctcgatgccgaaagcgaaacgctggtacagcgcgccctcgacggcctcatggacggccgcaccacgctgatcatcgcccaccgtctcgcaaccgtgctcaaggccgaccgcatcctggtcctcgaccagggccgcgtcgtcgaggaaggcacgcaccagagcctcgtccgccagggcggcatctacgccaaactggcccggctgcagttcgatgccggttccgaggagcttctcgccgcggtgaagtagggatcggatcgccggggtggacatgcgccggctcgttccacaaccgatacaaccacaccaactacctttgcgagcatattgacaatatacaccaatagattacattcggacatcgttgaaaccgtccgttctcatggtgggatatcgtcagatgagttcgatccgcttttccgaaatactggtgatcgtcgtcgccttcggcgtcatcatatcgatgatgctgtgctatcgctcgttgcgtgatgccaagagctggtcgctcaccgacgcgctctcggaagaggtgccgctgaccaagaccgatgcggatggaaaccctgtcgatgccgtcggcaagccattgcctcccggtcaggcgccgatcaccgtgactttgatgaaagcaagctccagccgcttcatcgccatgatcggaacggtggcgatcctcatgctctatgtcggcttcgggcttgcctgccttcgccgcttcgccgatggcgagaatattcccgacatgtccaagggctcgagcttcttctattccggcatcgtgcttttcgccccctatatcgtcaacaaattctcgtcggcattttcatttttcaagccgtgacccaacgggccggcgaccggcaagcggcgcggcgagatcgaaagcccgcccaaacatctcgatggaataattggattttttgttttaggctgcgcttgcagatgtaaacaacatcctgattccgggagacaatcgatgtataagttcgaagtttataaggacaaggcaggcgaatttcgtttccgtttcaaggcatcgaacggcgagtcgatgttcggctccgaaggctacaaggccaaggcgtcggcgctgaacgccatcgaatccatcaagaagaacgctcccggcgccgtcatcgacgacaccaccaaggcggcagacgcctgacacatcaaaggcggcaccccagggcgccgccgtttttgcgatgctggccatgaatggtgcgggatgccgcggtggatgcgccagcgcaaactccaactcccctcatccctgtgctcgtcacaggaatgagggagggtaagccaccccgtcacttctccgtcagcttcagctcgatccgtcggttggtcgcgcgcgcttccggcgtatcgccaggcgtgatcggctgatattcgccgaagccggccgccaccagcctgtccgccggcacgccctgcgcgatcaggaacttgaccaccgagatggcgcgtgccgaagacagctgccagttgtcggcgaagcggccggtgccggcgagcggcacgttgtcggtatggccgtcgacgcgcagcacccagttgatctcgggcggaatttccttggcgacgtcgagcagcgcggtcgcaagcttggccatctccgtctgcccttcgggattgagatcggtgccgccggaggggaacagcacttccgactggaacacgaaacggtcgccgacgatgcggatgttctcgcggtccgacaggatctcgcgcagccggccgaagaagtccgagcggtagcggttgagttcctgcacgcgcgcggcaagcgccacgttgagacggcggccgagatcggcaatcttggtctgcgactgctggtccttctgctcggaagcctgcagcgccgattcgaccgccgcgatctggttgcgcagtgccgcgatctgctggttcagcagctcgacctggctcatcgcacggtcgctcatctccttctgctcgtcgagttccttggtcagcgagccgatccgctgctgcgcggcgtcctggccgccggagccagccgaaagcagcgcctgcagccgcgagcgctcgccctcggcgttggccagcgacgcctgcaggttggcgacgctgtcctccagatcctgcttgctgcccttttcgagcgcgagcagctgcgtcagctcgttgatctggctgttcaaccggctcatcacttcgtcgcggccggatatctcgcggctgagaatgaactgtccgacgacgaacaccgtcagcaggaacatcaccgcgatcaaaagcgtcgatagcgcgtcgacgaagccgggccaatagtcgaccgtgcgttcgcggcgacggttgcgggcaagagccatggcttacttgccctcgctcttttcggtctgcggcatgcgcgggcgctcggcgtgcttttcctgcgcgccgatccgctcggccagccggtcgagcgtgcggcgcatggccttcgcctcgtcctgctgcgcctcgatccagtcgcgcagcatctgctgctcgttgcgcatgttcttgaccagcccctggatgccctcggcgagattggccatggccgcgaccgagcgctggctgccgccgccctcttccgagaccttctgcatgtattccgacagcgcgcggatctcttcgggcgaaacgccgcccttggtgtcgatcacgggtgccgcgagatcggagccgacatcggtcaccgacgacagccagttttccagctccgtatagaaacggttctgcgcgcgaccggcctgcaggtcgagaaagccgaggatgagcgagcccgagagaccgagcagcgacgacgagaacgcctgccccatgcccgaaagcggctgcgacagcccctccttcagcgcggtcagaacatcggaagacccgctggtgccggcatcgagagactggatgactgagctgatcgagccgatcgtgccgatgaggccccagaaagtgccgagcaggccgaggaagaccagcaggccgatgagatagcgcgaaacgtcgcgggattcgtcgaggcggttggcgatcgaatcgaggatggagcggaaagccgtggtcgagatgccgctcgccgacgcatttcggctgccgatcagcgtgcgcatcggcgccagcagcttcgggttgcggttcaccttgtcggcgctacccgcggcgcggaacgaattgaaccagcgcacctcgggcctgagcgacagcacatggctgaacacaagaatgacgcctatgccgagaacgccgagaatgaggccattcagccccggattgtgcatgaaggccgtctgcgcctgcctgaacaggatggacacgatgaacccgacgatgacgaggaacagcaccatcgtccacagaaagggcatcgggctggatagcttataggtataatttcccgtggttttttcggtcgagccgaactccgccacactcacattttccatagattccgcagcctccggcttcatcacagccggagactagatcatcattgtgccgaattgaagtatgccgaacgaaaaagcctgtctttataacaaagacttaccggctgggcaccgggcgtttggcaacctccatcagcgccttctggatgtactcgttgccagccacgacgctaccggtctcgagaatcgagttgccgccatcccaatcgctgacatagccgccggcttcgcggatgagcaggatgccggccgcgatatcccaggccgaaaggccggtttcccagaagccgtcgaaacggccggccgcgacgtaagcgaggtcgagcgaggccgagcccatgcggcgcacaccggcgacttcgcccatgacgtgcctgagttcgacgaggaacttgccgtggttgccacggccgagatgcggaacgccgcaggcgacaaccgaatccgacagcacgcggcgcgcgccgacgcgaaggcggcgatcgttgaggaaggcgccgccgccacgctcggtggtgtagagttcgtccgtcgccggattgaagatgacgccggcgacgatctcgttgttgcgctcgagggcgatcgagaccgcgaacatcggaatgccgtgcaggaagttggtggtgccgtcgagcggatcgacgatccagcgatgcgcgccgtcggtacccttgatctcttcgccttcctcgccgaggaagccataggtcgggcgtgccttcagcagctcttcgcgcacgatcttctcggccttgcggtcggccgacgagacgaaatcgcccggtcccttgaccgaaacctgcaggttctgcacttcgccgaaatcacgccccagcgattttcctgccttgagggcagcctgaaccatgacattgagaagagctgaacgggccatgtgggcggttttccttgggctaaatagatgcgcgttgtcagggcggggatggtccctgatcgccggtagaagctgcgctttataagattggcggcttcaagaccacaaaatcggggaaatttcaagagcgccgccaaacgtcggcctgatcgttcgccgggcaacggtcgacaccgcggtcgcggatatcaggcgaacgccctcgcctcagaacttctgctgcgtgatcaggacctcgcgggcgatctgctcgagcggcaggatgcggtccacgccgcccttggcgatcgcctccttcggcatgccgaacacgacggaggtcgcttcgtcctgcgccaccgtgtaggcgccggcctggtgcatctccagcatgcctcttgcgccatcgtcgcccatgccggtcatgatgatgcccatggcgttggaccctgccgagcgcgccgccgagcggaacagcacatcgaccgaaggccggtggcgcgagaccagcggtccgctcttgacagccacgtgatagcgcgcgccgcgccgctcgagcagcatgtggctgtcgccgggcgcgatcagcacatggccgcgcagcacggggtcgccatcgacggcctccttgacctcgacctcgcacaggctgttcagccgtttggcgaaagcggcggtgaatttctccggcatgtgctggacgatgacgatgccaggcgcattggccggcagcgcctccagaaactcgcgcagcgcctccgttccaccggtcgacgcgccgacgcagaccaccatctcggtcgtcttcgccatcgccttgcccgtcggcggcggcagcattgcatccgccgtcagcttctgcgccggcatcggcgcgccgggccgcaggctgttgacgttacgccggacgttaccgagacgcgcatgcgaagcgctcttcaccgcctcgcgaatgcggaccgcatcgtcggccaacccgtcggcggcgccgatcttcgatttcaggatcacgtcgacggcgccggcctccagcgcctgcatcagcgtttccgaccccgcctccgtcagcgacgagcacatgacgacggggatcggccgctgcgacatcagcttgcgcaggaaggtgatgccatccatgcgcggcatctcgacatcgagcgtgatgacatcgggaatctcttcctggatcttcttcgccgccatgaagggatcggtcgccacccccatgatctcgatatccggatcttcctgcagcacgcgaacgagcgtctggcgaacgcttgcggaatcgtcgatgacgagaacgcggatcttcttgcccatatgctctttgacctagatgcgctggaacacggtgttggaaacctgcttcaggggcaggtcgataccggtgatggattcggagtggccgatgaacatgtagccgccaggcgaaagccgcgcgcacagacgcttcaacacgcccgattgcgtcggcttatcgaagtagatcagcacgttgcggcagaagatcatgtgcatcccctcgcccacgggatagttctcgtccatcaggttcatgcgggcgaaaccgacgcggctgcgcagctcggccgagatcctgacctcgcggcggttctgctgcttggcgaccatcacgtattttcgctgcagttcgcgcggcacgggatgcaccatgtcctcggcatagatgccgcgccgcgccgtggccagcacgtcggtgctgagatcggtcgcgaggatgctgtagttgaggtcgcgccggtcggcgacgaactcttcgagcaccatggccatcgtatagggctcggcccctgtggagcaggccgagctccaggtgcggatcgtgcggacgccgctcgacacgagcgccggaagcgccacctgctgcatgtactcgaagtggcgcgcctcgcggaagaagtcggtcttgttggtcgtcaccgcgtcgatcagatagaccgtctcctgctccagcccgtcgtcgtgaaacaggaagtcgcaatagtcgtcgaaggtcgcgtgctgcgtcgcccgcagccggcggcggagccggccctcgagcatcgtcagcttcgtcggcggcatcttgatgccactgtaatcatagatgaatcgcgcaagcttctcgaaattccgcttgctgatcctgtcgcccaccatcggggcctcaacggcagccattctcataaatcaaaatactccagcgtgtccgctcaggcggccgattgcaggacggaggcgtcctcgcgcgacagaagccgcgcgagatcgacgatgacgacgaagccggtttcccggcgcacgacgccggaaatgtagtccgagcgccagcgcacgccgatgtcaggcgccgcctcgatctggtcctggcggaacggcgtgacctcgaagacccgatcggcgacgaggccgagcgtgagcacacggctctccatcgggatatcgaggaccagaacccgcgtgtgcgacgttggaaccgtcttcgacatgccgagcttcagcctgagatcgatggtcgggacgccctggccgcgcacgtcgcgcaggccaaggagatagtcgggaccattggggatcttgaaggcctcggcatagtcgaggatctcgcggaccacctccacaggcacggcgaagatttcctcgccgaggctgaaggtgacgaactgcgcttcctgggaggtggttgccatattatgcgctttccttgaaatcggcgtcgccgtcatcgggtccgcccatggccatgtcgagtgcgaagcccttggcgcgcgcctgctgcgccgagaccgaattggccgccggcttggatgcgggcttgcgtgcggcaacgggtgccgggctgcgaacgctgatgcgcgcggcgggcttgcgggcctcgcggctgccggccatgtcgaccttgaagaaggcgatcgaggtctgcagttcttccgcctggctagccagttcttcggatgtcgccgacatctcttccgatgcgccggcgttctgctgcgtcaccttgtcgagctgctggatcgcttcgttgatctgcgaggcgccgatgtcctgctcgcggcatgccgcgctgatttcggagaccagttccgccgtcttgcggatatcgggaaccaggcggccgagcatgtcgccggcctcgctggcggccttgacggtatcaccagacatggcgctgatttcagccgctgccgactggctgcgttcggcaagcttgcggacttccgaagccacgaccgcgaagcccttgccatgctcgccggcacgcgctgcctcaacggcggcgttcagcgcgagaaggtcggtctggcgagcgatttcctgaacgatgctgatcttctcggcgatcgtgcgcatggcgtcgacggcgcgcgtcacggcatcgccgctggcttccgcatccttcgcggactggcgagcgatcttctcggtctgcgctgcgttatcggcgttctgcttgatgttggcggccatctcttccatcgaggccgaggcttcttcggccgatgccgcctgttcggtggcgccctgcgacacctgctcggagctcgccgacagctcctggctgccagccgagacgttctcggcggccgcgatcgcatcggcgacgacgccgcgcagacgctcgaccatctgctccagcgccatgccgagcgtgtccttgtccgacagcggcttcggcgcgacggtcaggtcgccgttcgaaatctgcgtggcgatgttcgccgtgttgcgcaggttcgcggtcatgacgttcagcgtatcgaccagatccttgatttcgtcattggtcttgacgagaacgtcctggtcgagatcgccgatggcgaccgcgttgacggcggccttcgccttgttgagaccggcgctgatccccagagcgatccacagagccgccgcaacggcgatcagcagggcgatggcggcaaccgcgaagatgaagttgcgggttgtcgcgtactgcgtgttggtatcctcgtccgcctgctgcatcgcggtgcggcttgcatcgatgcggacctgtacctgcgcttcgatctcgtcgacgatcgcacggccctcgccggtcgccagacgaacggcctcgctgccattgccgtcgcgggcaagctggcggacacggtcgtcgagcgaatagagcttctgctccagatcacccacgtcctgccaggatttcttgccggcctcggtggtgatgttggccagcaaccactggcgggtctcggagaactgcttgcggttgctgtcgctggcctcgatgtacttggcgacgtcctcgggcgtcgtcgcggtcgccatgttcatctgcgcgcgaacgatgcgaagctggaagttgccgagattctgcgcctgctcgagacgcttggccggtccggcgatgacatcgctgatcgcggtattgaggttggagaggctgtagatgccgtagccggccgtagccagaagcaagacgatcatcaggccaaaggcgatggccagtttcgatttgatggtgaaccgcatttcttcatgtccttgaaatcgcagtattaaagacgccgccattaggggaaatggtggcatgacaggcgcaggaagactgtacatccacccttctgcgatctccggagtccggatatttcaaccgacgtattcacacgtcgggttgtcgctccgggctgaacgcccgaggcgacgaaacgtaaatcaggcgctttcgaggaaatcgtcgtcaccggcgtccgggccacccatcgacaggtcgagagcgaaacccttggcgcgtgcctgctgggccgagaccgagcgggcactgaaattcttgttaaaagtgggagctttcatccgctcatggccggctgctgtcgcgcgccgcgcctccaacgatccattcgttggcatgcgattatcgtggccggccaaccggccacgacatggtcatcgatcacgcgctttcgcggaaatcgtcgtcgctggcatccgggccgcccatcgacatgtcgagggcaaagcccttggcgcgcgcctgctgggcggcgacggaacgggtggcgacattcttgttgctgacgacggcgggccgtgcggccggagccttggcggctggcttggtcgcgggcttcttgaagccggccttgctgccggtggtatcgaccttgaagaaggcgatcgaggcctgcagttcctccgcctgggcggcgagctcttccgatgtcgccgacatctgctcggaggcgccggcgttctgctgcgtcaccttgtcgagctgctggatcgcttcgttgatctgggcggcgccgatatcctgctcgcggcaggccgcactgatctcggaaaccagttcggcggtcttgcggatatcgggaaccaggcggccaagcatgtcgccggcgttgctggcggccttgacggtatcaccagacatggcgctgatctcggcggctgccgactggctgcgttcggcgagcttgcggacttccgaagcaacgaccgcgaagcccttgccatgctcgccggcacgcgctgcctcgacggcggcgttgagggcgagaaggtccgtctggcgcgcgatctcctgcacgatgacgatcttgtcggcgatggtgcgcatggcctcaaccgcacggctgacggcggcgccgctctcttccgcgtccttggcggactgacgcgcgatcttctcggtctgcgccgcgttgtcggcgttctgcttgatgttggcggccatctcttccatcgaagccgaggcttcctcggccgatgccgcctgttcgctcgcaccctgcgacacctgctcggagctggcggacagctcctggctgccggcggagacgttttccgaagccgaaagcgcatcgccgacgacgccacgcaagcgctcgatcatcaggttgacgttaccgagcatttcaccgatctcgtcacgattggtgatctcggccatcttcgtgagatcgccttcggcgacttcgcgcaccaccatgttggcgcggctcagacccttggagatggtgctggcgatccagaaggcggtgatggcggcgaaaacaagcgctgcggcgaccgcgacgatcatcgtcgtgcgcgttgcgacatagcttgcctcggcttcgtcgtcggcggtgctcatgcgctgcttttcgagcgtcaggatttccgcgagcgcggcatcgatctcgttggcggcggtacgcgccgtggtcacggaaatgttgttggccgcctccatgttgcccgctttcacgaatgtgcggatctggtcgtcggcctggaagaaggccttcgagagctcggagacctgttcccagcgcggacggccctgttccgtggcgatctgcagcacggatgccagcgactgcgcgaattccttgcgtccggcatcacccttggcgatggagccgtccacttcggcggcattcgtcgccatcagcaggttcttctgctggcggatggcttccagctggccgatattgatgctctgcgccagttccagccgcgccgccggcccggtcaacacggcggagatggtgttgttcaggccgctgaggctgatgatcgaataggtcgatgtgcccagtagcatgaggatgatgaaggcaaacgccgacaccagtttcgtcttgatcgtcaatcgcatcttgtaaccccttaccctcgatgacgctgcctaaacggcggtcggtgtctcgtgtcgtgaagaaaacagtgcctgcagatttggcaggatgatgaactcgcccccgcgcttcaccaggcagtcgatgtagtcggcgcgccagcgcatgccgacgctcggtggcggttcgctggctgcccgcgccagcgtcgtcacctcgttgaccttgtcggtgcgcaggccgaccagcgtcgcctcgccatcgagatcgatctcgatgacgatgatgcggctgtcgatcgtcgcttccgtgccgtccatgccgaaggccaggcgaaggtcggccagcggaatgaccttgccgcggaaattgatgacgctggcgacgaagggctgcgcccccggcaccgccgtctccggcaagaggtccaggatttcctggacgatcaccgcctccagcgcgaaggtctcgccgttcatgtcgaaggtcaggacctcgacctcgtcggcatagttccaatgatggtctatcttctcggctgccgcgctcatcctgccacccgcatctgtgtttcctgttgctgaccggcggccacgagatggccgacgtcgagaatgagggcgacgctgccgtcgccgagaatggtggcgcccgagaaggtggacacgtcgttgtgcagcttcgacatcgacttgatgaccgtctggtgatcgccgatgatctggtcgaccaccaggccgacacgctccgtgccggtggagatgaccacgaccttctggtgcacgtcgggcttggtgccggtgcggaagagatcgcgcagtctcaggaacggcacgaggctgtcacgcagcgagatgaagctgcggccacgcgaacgcaggtcctcttccagcgacagctccaggcattcctcgacggccgagagcggaatgacgtagctgccattgccgacgcgcacgagcaggccgtcgatgatcgcaagcgtcagcggaatacgcagcgacacttccgagccctggccattgaggctggtgatgtcgatcgcgccacgcagcgcctcgaccgtcttcttgaccacatccatcccgacgccacggccggagagattggtgattgccgcggccgtcgaaaaacccggcgcgaagatcagctgcagtagttcggaatcggtcagcggctggcccggcgcgatgaggccagaggattccgccttggcgcgcacccgctcgcggttgatgccgcggccgtcgtccttgatcgagatgatcacctcgccgcccgcctgccgcgccgacagcgtcaccgtgccggcttcgctcttgcccgccgccagacgctcggccggcgtttccagcccgtggtcgatcgaattgcgcaccagatgcaccagcggatcggcgagacgctcgatcacggtcttgtcgacctcggtgctttcgccctcggttactagctcgatcaccttgcccgtttcgcgggcgagatcgtggacgagacggcggaagcgcgaaaacagcgtcgccaccggcaccatgcggagcaccatcatcgtgtcgcgcagttcgcccgacaggcgctcgatttcttccgacaccgaccgcagcgcgatatcggcgctggcgctggccagctggctgaggcgcgactgggcgatgacgagctcgccgacgcggtccatcagttcgtcgaggcgctcggccggaacgcgaacgttttcggcggccttcgcctgccgctggtcggcctgggccgcactctcgcgcttcgcgggcacggcgtcgaccggcttgaattccggcgccgcggcgacgggagcaggcgcggcgacgacaggctcggccttcacctctactacggcagcgaccggttcagccttggtttcctgggccaccggaccggcgatctcctcgacctcgagctccatgtcgtccatgacgaagatgaacacgtcgtcgatcgccgagcgttcctgcgtgctggtcagggtgacgtcccaggtgacgtagagatccgtcggaacgagctcttcgagcggcggaatggcagaaagattggccttgacgctgcattcgccgagatcgcgcaactcgtcgagcaggccgagcggattggtgccgttcgccatcgaattcgccggaaggctgaagcggatgcgccatgtggtggtcttggcggcagcggcggcgggaacggccaccggagccggctgagcggcggacaccgcggcgccacccgaggtctcgccgaccgcggcctgcaactgggcaagcaacagttggcccgtatcgccgtgatcggcgtccggccgatcgaccagcgcgcgcatgtgatcctgagcggcaagcacggcggcgacgagttcggccgtcgccggcacctcgcccttgcgaacccggtcgaacgccgtttcgcaatgatgcgtgaaggcggccagcgcatcgaagccgaacatcgagcccgagcccttcagcgtgtgaaggccacggaagacggcatcgacgacgtccttgtcgtcgagcttgtgcgtcaggtcgagaagacccgcctcgatggcttcgaggcattcggccgcctcggtgcgaaagaccgctacaggatcgagagagctcatctgccgagcaccttcctggcgatcttgaccaggttttccgggtcgaacggcttggtcagccagccggtggcgccggcggccttggcgcgggccttgaggtcggcgtcggattcggtggtgaggaagatgatcggcacgccggtatgctcaggcagcttgcgcagctcctcgatcatcgtcaggccgtccatgacgggcatgttgagatcggtgatgatcaggtcgtaattgccggccttggcagccgccaggccctgagcgccatcggccgcctcgctgacggtgtagccggcattggtgagcgtgaccttggtcgtcagccggatgctcgcggaatcgtcgacggtaagaatgttggcgctcatggctttacctcttcatgcaaccagaattttgtatcttcgccgttgaaggcttccacgaagccggcacgctccagcactttcaggacctggccgcgggccggagccgcgagtgcgagcgctttgtcgttgctatcggcatgccgacgaacagcttcgatcagctgcacaaaactcaaatcggcttcagctttttcgggaatatcgagaacaacggagctgttgttcttaaataaagacacaattcttgagaatatatccgatatattcctgatgttcagggattcaggcagggacatagactcggggtactgttcacgcacactcacttcggcctcctagggcggagaaatactttttcaacccgctgaggaatctcacgacacacttaacaacgcgtaaagttaggttgcaatgaaatacaattgggacgagtctcgactccccgaattatcacccgggagaaataataattagcacggcataatatttggaaacaaaaaagaaatcatgatgttatctgaagtatgagctttcgtcgggaacgtcggtcgcgcaattcacgctatgttaagcacaacgttgacgagtctcgtttgtttacccgtcatttccacgatgcccgtaaaaatagtcccgaaccttgccagggttttaagtaaaggacaagaaaatgacgaacggggcgacatcggcactgactgcattccagggatcgggatcagccatcagccaaacattggaagcggcgcgcagcaaggtcgaggagcgctttctcgaaggcggcaccgtgttgctctccgtcatggacgtcctcaaccgattgttgagctcgctcgacaacatcaccaaggcgctcgacgccggtgagaatggcgatgccggcgccgaactgcgcgcgacggtcaagagcctcagcgatctcccgaccgcggaaaagtcccgccgcgaagcactttcgtcgctcgccgagaccggatattcgctgcgccggcacgtttccgacatgcaggaaaccatgcgctacctgcgcactttcgcggtcaccgtgaagatcaccggtgccggtcttgccgagttcgcgggcttcgcccaggagatcctcgagcgcatctattccggcaccgacgaggtcaaccgcttcgccgagcggatcgcggaactggaaaaggaagtcaagctggcgctgaccttcggcgccgatgtctccagaagctatgccgacaccgttcccgccgtggcgagcgcccttgacggcgacgcccgcaagatcgccgaacaccgccagaacttgagcgccatcgcccgcgacgtcggcgccgtcgccagaggcgtgcagagcaaggtcgcctcgaccctgtcggcgctgcagatcggcgacatcacccgccagcgcatcgagcatgtgcagagcaccttcacgctgctcgacgaattcctggacggcgaggaaggccgcggcctgaccgccgacgcccgcgcgcgcctgcaaaacgtcatccagcacctgacggcagcgcagatgaacgaaatgtgccgcgattttcaccgcgattcccagaacgtcgtcaagacgatcgccagcttcggccacgacacgcaggagatcatgcggctgcgcgaccagatgagcggcggcggtcagggcaacttcatccgcgcgctggaatccagcgtctcggccgcccacgagatcgtcaagcaggtcgacgccgtcaccctcaaggccgaccaggtcagccagtcgacgcgcgacaccaccgccaagcttctggaggcgatcggcaacatcaaggcggtgaagaccgatattcactacatggcgctgaacaccaatctgcgctgcagccggctcggcgaagccggcaagtcgatcaacgtcgtcacggcggagctgcgcattttcgccggcaagctggatgacagcgccgacgccatcgtcaacggcctgccggcactggaggaagccgccggtcgcgtggcgccctcgagcgagacgacgtcaggtggcctggccgagaacctcaccaccgccgtcgccgatatccgcaccgccgccgatacgatggaggcggagctgaaaatcctctccgaacacggccgcgaggtcgccggcaagatcaatctcctgatcggcacgctggatttccagaaggacctcggtgacgtgctggcgggctgcgccgacgcgctggaggacgcggccggcgccgagatcgccgacatctcggacctggccgagaccatcgcgccgctcgatcgcaggatcttcaagctctatacgatggtgcaggagcgaaacgtccaccgcgacatcatcgccgcggtcgaggaaacggccgctgccgaacccgagccggcaagtgcggcctccagcgacgaggacctgttcgaggacgcgttgttctaaaccgatcgggcgcgatcagcgcaggcggcggaacttgttggcggcttcgatccccgccttctgctgctcttcctcgataccgaggtagaaatcctcgagcgccgggtcgggcagaccggcacggcgcgagagcacgtaccatttggtggcctcgaccgggtccggcttcgtgccgagcgcgttgatatagagatgcgccagcttgttctgcgccaccacgttgccgtcattggcggcgagcctgagccactggaaacccttgtcgaaatcgcgggggccgttggttccgttgacgaaccagatgccgagatcgagttgcgcggtgtcgaatccggcacgggcggcgcgcgccatccattcacgggcaagctgcttcttctcgggcggcagatcggccagcgacgaatagatctgcgccaccgcgtactgcgcgtcggcgacgccctgctcggccgatctttcatagaagggcagcgccagtttcagccccttttcgccgggattgtcggcaacgacgatctgtccccagttgaactgagccgatgcattgccggcttcagcggccttgcgcatgtattcgtcggcgagcgccttgtcgcgcgtaacgagccggccctccatcaggatgagcgcgtatttgaacatcgccgacgggtcgccgccctcggccgcctttccgtaccagaaggcggagttcttggcgtcgcgcttgacaccgaggccctcggccaggagttcgcccatcagcgtctgcgccgccgggtcgccaagctgcgcgcgcggcagggcaaggcccatcgcggtcagaaaatagccgcgctggtaggcgccataggcatcgtcggtcttgcccgtgtagtccttttccggcggcaggtcgggaagcttcgcgcccatgcgatcgaacacaccgacacccgtggacggcgttaccccgtccggctgcggccgtccggatttcagcgtttccggcgcgccggtaagcggccgcgtgaccagattgtcgacctgctgggccgatgcgccatgcgcgaaagccgccacacatgtggcggcggcaaggaaggaaaggcgcaaatggcgtgtcagcatgggcatgagggcgatatcaaccctcaaaccgtggcgctttttcgtcaagaagtgcgttgatttccgcgacgacaagggccgcccgcgccggctcgccgaaaaccgcgagacgcatggcaacgaactccgcgccgctctcggcgaccgcgagagccgacgccggatcggtgccgcccatgacgatgcacgggatctcgatcatcgacgcccaccattcggcgagcgccaggttcttcggatgcgcctccggcttgatgtcgccctcgagcttgccgaagaagacatactcggggcgctcctcgccgatttcgagcgcatggtgccggtcggccgcgttgccgccgccgacgatcagcttgtcggcatacttctcgaccgcctcggaaatttccgcagcaccgccggtgatgtgcaggccatccgccttggtgcggcccacgatacggctgtcgccggccagcagcgccgcggcacccgcgttttgcgcgagcggcacgatcttctcggcatgcttctgaaactcgccgtccccaagcccgtattgcggcaggatgatcgaggcgacatcgccgcccttcaaggcatcgccgacgattttcgcctgctcgtcggcatcggcgatatcgggcacgatcagcaccaggcggcagcggttttcaggttcgctcatgaactctttccatttccagcggatttcgccgtctgccggccgatccgcactcgttttgtgtgagtaattccgttagaccgggctggcaaggggaggacttcaaaagcatgccgatggacgtgtcattttactacgccgccattcccgccgtcattctcgtcggcctcgcgaagggcggcatgggcgacgccttgtcgctgatcggactgccctttctggcgctcgtcgtctcccccgtgcaggccgccgccatcctgctgccgatcctgatcttcatggacatgatctcgctggtcatctggcgcaagcacggcgactggacgacgctgaagatcatgctccccggcgcgctcgccggtatcgcgctcggttgggccacatcggcgctcgtccccggcagcgtcctgcgcgtcgtcatcggcgtcgtcaccatcctcttctgcctgcgctatttctggaacaacttcggccccggcagaggaaaaatcgtgccaccgcatggacagcggccggtccgcgccacgctctggggcaccttctccggctatggcagcttcgtggcgcacgccggcggcgcgccgttccagatctatgtgctgccgctgcaaatgccgccgcgcgaatataccggcaccagcgtccgcttcttcgccatcctcaatgccgtcaagctgatcccctatttcgcgcttggccagctcgacacccagaacctcgcgacctcggcgacgctgctccccttcgcgccgcttgccaccatcgccggcgcgtggtgcgtgaagcgcatgcaaccgagaatattctatccgttcatgtatgcgatggcgctgatcgccgccgtgctgatcgcccgcgaaggccttggatattagggcttgccgggtttcgctgcggcgcacaatccgcttgcccaaattctccatttgacgtagcttttcgccatgtcgaacgtggaccccttcactgcgattgccgaccctcaccggcgcttcctgctggaggaattgcgacgctcgccgcgcaccgtcaacgagctcgccgaggggcttccgatcagccgtccggccgtttcccagcacctcaaggccctgctcgattgcgacctcgtctcggtcaccgcggatggcacgaaacgcatctacgcggtcaacaatcgtggcttcgacaggctcaatctctggctggatcagttctgggcatagcattgcccggacatgaaaacgcgccggctgcgaccttttcggcaaccgacgcgcaggaacattccaacggacgcgatcaacgactaaacaactggttatattgcgatatttaccctttgcatcgcgtcgaccacgccctgtaacgttctattctgcttaatgtacggatgatttaagacgctcaatctcgtctttgatgcgcagttttctgcgcttgcactcggcaacctcacggtcgtctctggagggggatgccatcagtgaatggagctcctcctcgagagcgccatgcttcttctggagtgattcaagatgagcttgaacagtcatatgacccttccttcctctagcctttctccagccaacaccgccggagatccaaggcgtcaaccctcaaactgtgacacatttttgaagggttgtcgaaggcgaaaacaaggagagagcgtggcaaattcatgatcgagactaactagccgttaccgctatttggtgataggagcttgcaaaaattaccgacaggccggagaaggtctgaagacgatcatggggattgcgtatgccggatcaggaacaggcggaagtcaggctcatcgtggcgcgcctgcgccaggagcatgaggattacgatgtcgccatcaacgccatgatcgcgactggctgcgatgcgctgcgcgttcagcgcatgaagaaaaagaagcttgttatcaaggacaagctgtcgaagctcgaagaccagatcatcccggatatcatcgcctgaaggaagtgtcgtgacgatgacagacagaccgaccgttgccatcatcatgggaagccagtccgattgggagaccatgaagaacgccgccgatacgctggaagcgctcgagatcccctatgacgccaggatcatatcggcacatcgcacgcccgatcgcatggtcgagttcgccaagggcgccaaggcggaaggcttcaaggtcatcatcgccggtgccggcggcgccgcccatcttcccggcatgaccgccgctatgaccccgcttcctgttttcggcgttcccgtgcagtcgaagacgatgtccggccaggacagcctgctgtcgatcgtgcagatgcctggtggcatcccggtcggaacgctggcgatcggcaaggccggcgccatcaacgcggcgcttctcgccgcggcggttctggcgctgtcggacgaagacctcgccgaccggcttgacgaatggcgcgagagccaaagtgcggcgatcgccgaatatccgatggacgacctatgagcatgacaacgatcggcatcatcggcggcggccagcttggccgcatgctggccatggctgccgcccgcctgaacttccgcaccatcattctcgagccgcaggccgattgcccggcagcgcaggtcgccaaccggcagatcgtcgccgcctatgacgatcccgcggcactcgaggaactggcgaccgtctgcgacgtcgtcacctacgaattcgagaacgtccccgtctccgcagccgaagcgctggcccagaccgtgccggtctatccgccgccgaaggcgctggaagcggcccaggaccgtctcgtcgaaaagcgcttcatcaatgattgcgccattcccaccgcgaaattccacgccgtcgacagccaggccgatctcgaggcagcccttgccgatttcggcggccagggtgtcttgaagacgcgccggctcggctatgacggcaagggccagaaagtcttccgctcgacatcggacagcgccgacggcgccttcgccgaactcggcggcgtgccgctgatcctcgagagcttcgtcgccttcgagcgcgagatctcggtcatcgccgcccgcggcaccgacggcagcgtcgtcagctacgacccggccgaaaacgtgcaccgcaacggcatcctgcacacgtcgacggttccagcgtcaatcaccgacgccacggccagcgccgcgcgcgaggccgccgagaagatcctgacgacgctcggctatgtcggcgtcatcggcatcgagttcttcgcgctctccgacggcagcctgatcgccaacgagatggcgccgcgcgtgcacaattccggccactggacggaagcggcctgcgtgatctcgcagttcgagcagcatattcgcgccgtatccggcctgccgctcggcaacgccgatcgccactccgactgcgtcatgcggaacctgatcggcgacgatatccttgatcttccggactggctgaagcggcgcgacacgctcgttcacctctatggaaagacggaatcgagacccggccgcaagatgggccatgtcaccacgcttgccaccacacttgcggggaaataaggggtttttccctgacaaaaccggccaccgccacgggaaaaacaccttcacgtggttgacacagacaagaggccgggttatctgcacgcccaacctgaagagcgcgccctgagcgcgcttttgaatgtaatagatacgggcgaatgtgaattcccccaaacatcgcggatcaaaacaatgaagatcaagaattcgctcaagtcgctcaaggctcgtcaccgtgacaaccgcctggttcgccgcaagggccgcatctacatcatcaacaagctgaacccacgcttcaaggctcgtcagggctgattttgctggccggatggctcggcagcgtttcagcgcctgagcctgtccggaagggtcccgggtttcatcttctcgatgaatgatcccgttaaagtgttttgatctttcgcgttggcgggctatgatgcccgccatgcgttttttggctatgacctgcgcggccctgccgctctccctcgcactgctttccacgtccctgcctgcccacgcgcaggagcccgcacccgtgcgggaaaaggaaaagctcgtcgagcagcaggccgcgaacctttcgcccagggaacatctcgaccagcttttcgcgcaattgaagcgcgagcgcgatgccgacaaggcggacgatatcgccaaccagatccgcgccgagtggaacgattcgggcagcgccaccgtcaatctcctgatgcagtgggccgacaaggcggtcgaggagaagcgcaacagcgccgcactcgatttcctcgaccaggccatcgcgctgaagcccggctattccgagagctggaaccgccgcgccacgctgaactacaccaacggcgccatgcgcaagtcgatgtccgatatcgaacgtgtgctcgatatcgagccgcgccatttcggcgcgctcgccggcatggccgcgatcctcggcgacagcggcaacgaccagctggcgctgaaggcatgggagcgctttctcgaaatattccccgccaaccgcaatgcgcaggagcagctgaacacgctctccgaaaagcttgccggcagccgcacctgacgcgcaatatctagcagcctcgccctcttgaaggtgaaccgggcgagccaatctaacgtatggtccgttagtccatgccgcaggttacgccatgcttaccctcgtctccgccatcctcgcccccatagccgccgcgatcggctactcctcctataaggcccgccagttcgagcaggcctatcccaacatcggcgaactgacggatatcggcggctaccgcatgaacgccgtccatatcgagcgccccgaaaccgccgacctgccgccgctcgtcttcatccacggcgccagcggcaacctgctcgaccagatcggcgcctttctggagcctctgcgcggccgcgccgaaatgctcttcgtcgatcgccccggccacggctattccgaacgcggcggaccggacaatgccctgccctcaggccaggcggacgccatcgccgcgctgatggaaaaacgcggcatcgacaaggcgatcatcgtcgggcactccttcggcggcgccatcgccgccgccttcggcgtccgtcacccggaaaagacggcgggcctgctctttctggcgcccgccacccacccttggccaggcggcgtcgactggtactatcacgtctccaccgcgccggtgatcggttggctcttcaaccacgcgctcgtcataccgctgggtttgaggcgcctggagcgcggcacgcacaacgtcttccgccccaacccgaggccggacgactacatcatgaaaacaggcccgtcgctggtgctgcgccccgccaccttccacaacaacgccgccgacttcgtgcgtcttctcgattacttcaagacgcagtcgcatctctatatcaggatatcggcgcccaccgtcatcatcacgggcgacagcgacgacatcgtctgggagcacctgcactcgcagggcctcgcccgcgatatcgccggctccgaactggtcatgatcaagggcgtcggccacaagccggattacctcgccaccgacgtcgccatcgccgcgctcgagaagatcgcaggccacgaccgcgatctccaggcagccgcgcgcgtcgccgaggcaaggctggcaaccgctgttgcacctgacgccaatctaccgaaagcccccgcgccgcgacccatcgccaccccggacctgcaaggcagcgtttgacgcgcgcagcgcattgcccgccgcgcctgcagccccatatcttccctaccgccgtccaccgaggggaatatcatggaccgccttcgcacgaaattcgcggcactgctagccgccctgtcgctgacactcgcgccaatctcgccggcgctcgccgcctcgcccgcgccggtcgaggccgacaacggcatggtcgtcacggcccagcacctggcgaccgatgtcggcgtcgacgtgctgaagaacggcggcaacgccgtggatgccgcggtcgccgtcggttatgcgctggccgtggtctatccgaccgccggcaatatcggcggcggcggcttcatgaccatccgcatgaaggacggcaagaccagcttcctcgatttccgcgaacgcgcgccgctggccgccaccaagaccatgtatctcgacgccaagggcgacatcgtgccccgcgccagcctcgacggctatctggccgtcggcgtaccgggctcggtcatgggcttcgagaccgctcgcgaaaaatacggcaccaagtcgcgccaggatctccttgctcccgccatccgctacgccagggacggcttcaccctcgagcagggcgacgtcgcctcgatcgagggcagcgccaagcggctggccaaggacgaagccgccgccaagatcttcctcaagcccgacggcaagctcttcacctcgggcgaaaagctggtccagccggaactggcttccgtgctgtcgagcatttccgacaagggcacggacgccttctacaagggcatgccggccgacgccatcgtcaaggccagccaggccaagggcggcattctcgccagggaggacttcgagcaatatcaggtgcgcgaactgaaaccggtggaatgcagctatcgcggctatgacatcatctcctcgcccccaccctcatcgggcggcgtcatcatctgcgaaatcctgaacatcctggaaggctatccgctctccttcctcggctacggctcggccgagaccgtgcacctgatgaccgaggcgatgcgctacgcctatgtcgaccgcaacgccgccctcggcgacccggatttcgtcgacaaccctgtcacgacccttctcgacaagagctatgccaagaatatccgcgccaggatcgacatcaacaagtcgggtacatccgccaacctgaaaccgctcggcgccagggaaagcaccgaaaccacgcactattccatcatcgacaaggaggggaacgcggtcgcggtcacctatacactgaacggcaacttcggcgccggcgtcgtggcgccgggcaccggcatattgctgaacaacgagatggacgacttcacctccaagccgggcgtccccaatctctacggcctcgtccagggcgaagccaacgccatcgcgcccaggaagaccccgctctcgtcgatgagcccgaccatcgtgacgaaggacggcaagcccttcatggtgatcggcagccccggcggctcgcgcatcatcaccatcacgctggaagccatcctgaatgtcgtcgatttcggcatggacatcagccaggccgtcaacgccccgcgcatccaccaccagtggcagcccgacaagatctacttcgagccctatgcattgtcgcccgacacgatccgggccctgatcgcgatgggccacaccatggacgacggcagcggcccgcccgtctggggccaggccgccggcatcctcgtcggcggcaagagcctgaaggatatcgagaagggcggcggcgcccgctactacggcgccatggacagccgcgcgaccgaaggctcggcccgcggttactgatcggcctagatgtttagtcccggcatctagcggatcgtcgtgcgggcgtattgcgccctgatggtgacggcgggcttggcgccggtcacgctcggccgcgcgctgtcgatcagcgaagcggccgcggtgacggtgtaatcgacaggcgcgtccttgccgaagtcgagatagctgtccaccgaacgcgccctgacgtcgatcgtctcgtcggcatcgagcttgtcgtagacgagacgggcccgcagagcgtcgctattgatctcaacgctcgaggcgtgaccctgcagcgtcacgtcggccgcattgctcgacaggcggagcttttcaaactcgccctcgaaccgcgccatgaccgcctgctggttgacctggatcgacccgcccggcggaatgttggcgacgacctcggacgagcaatcggagagatcggaccattgcccggaagcgaccgcgatagacagcgtcgggccgtttaccgtcatccggctctggtcctcgcaaccgctgaagaaccagctcgaataccagcggctgaaccagccgtcgcgccggccccgcgtctcggcccgatagggattatcggtattggtgctgatgcggatggaactggcgtcacccgttatcacgatcgagcggatcgccgagacgtcgatcgtctcacccatccgccagccgtcggcatagctcgaaaccagcgtgaacaggagcagtggtatggttatgatgatcatcatggcaatctccttgcgtgacgccgctcccatcgagcggcaaacccaaggtcgccgacgctacgcaaaatcgagaccttgatcgcgatccgggtcgcgcgcgattgcgatcaaggtcattgtcgtgctcatatcgctacggcatgtctcccgaaagtggtcaccggtttcggggtgaagacatgctgaaagacaaagtcctgaagcgcggtgcgcgaacctgaacgatcgcgacgcgctttagtctgttgctggatccgcgcccatgatcttcgtgccgctgccctttatcgtcacattgctgctcgtcatcctggcgatcagaatggtcaggcaacacgacggcctcgcaccggagcgttggcccttcctcaccctgatcgcgctgtatgcgctgcaatcggtgctgctcggcctgcgttggggctatgacatcatcgccctgatgcccgtccaggcggtgcttgccgccctcatcgcagccttcgcctggatcagcttcagcaatctcgcgcgcgacaccaatccctcatggctgcgtcttgcgccgcatctgcttccagccgcgatcgtcctcgtgctgatgatcttctggcgcggccctgtcggcattttcatcaccgccaccttcgcggcctatggcgtggccctcttctggcttgcccgccacgggccagacggcctcgtttcctcgcggcttgatggcgcgctcctctcctaccgctcgctgctgatcaccgccacggccctgctcgcctccgccaccgctgacatcgtcatcagcttcgatttctacaggaccggtggcgcccatgccggtgccgtggtggcgatcggcaatgtcatctcgctgctggcgcttggcaccgccgccgccatcgccagcagcacccagtccaccgagcccgcgccatcgccgcagccacagccaccggcgcccgcgccggcatctggcccgactgaggaagacggagccatcgcccggtcgctcaacgagctcatgcaagcacgccagctctaccgcgacccggagctcaacctcggccgcatcgcccgcaggatgaacctgcccgcccgccgcgtatcgatcgcggtcaaccgcgtgcacggggcgagcgtctcgcaatatgtcaacgacttccgaattcgcgccgcccgcgaaatgctggaaaagagcgacgagcccgtgacccggctgatgttcgactgcggcttcatcagcaagtcgaatttcaaccgcgaattcctgcgcttgaccggcacgaaccctaccgactaccgcaggcgccaccagacccgcccgaccggcaaggcccccgcgccggaacccgaactcttgccggcgccgcgaaagacgcttttcatgtcaccgtgacaaagcagccgttcacaacatcgggttggcgtcctattcatgatgacattatcatccgaaagagctttccatggtcagcattgaaatgatcgtcgccgcccgcgcccgcctgcgtggacatgcccgccgcaccccgcttctttcctctccgtttctcgacgagatcgccgggcgccggctgttcatcaaggcggaatgcctgcagcacactggctccttcaagttccgcggcggctggtcggccgtctcggcgctggagcccgaggtgcgcgcccgcggcgtcatcgcgttttcctccggcaaccacgcgcagggcgtcgcccttgccgccaggctgcacggcgttccctcggtcatcatcatgcccgacgacgcaccgaagctgaagatatcaaacacccgcgcgctcggcgccgaggtcgtgctctacgaccgcgccaaggaagaccgcgacgccatcggcgcgcgcctctccgaggagcgccggctgacgctcatcaagcccttcgacgaaccgcaggtcatcgccggccagggcacgaccgggcttgagatcgccgaacaggcggaagaggaaggcgtaagctcggccgaggtgctggctccctgcggcggcggcggcctgacctcgggcatcgcgctggcgctcgaggcgcgcacgccgggcttccgcgttcgcccctgcgagcccgaaggcttcgacgacaccacccgctcgctggcctcgggcaggatcgagcgcaacgccacgctatcaggctcgatctgcgacgccatcatcaccccgcagcccggcaacatcaccttcccgattctcaagcgcctcgccggcccgggcatcgtcgttaccgacgaggaggcgctgcgcgccatggcgctggccttcacccgcctgaagatcgtcgtcgaacccggcggcgccgtggcactcgccgccgcgctgtttcatggagagcagttgcaggaggatgccgccatcgtggtgacctcgggcggcaatgtcgatgacgagatgttcgcccgggcgttggcattacaggggtaggatagcggatcgcgaggttggcgcgaacattcccccatccgccaagccagcaccacacacaccagccacgaaaaaacccgccacctcctggaggcagcgggttctcaattcaattcaatcaaaccaaatccggatcaaaacccgctctggccgtccgagccaatataggcgatgcgcagcatgttggtggcgccgggggtgccgagcggcacgccggccgagatgatgatgcggtcgcccggcttgccgaagccttcgtcggcgacgatgcggcaggcgcggttgaccatgtcgtcgaggtcggtcgcgtcatgcgtgaccacacagtgcaggccccagacgatagcgaggcggcgcgcggtctggataaccggcgacaacgccaggatcggcacctgcggacgctcgcgcgatgcgcgcaggcccgtcgtgcccgacgaggtgtagcagacgatggccgacaggcgcagcgtttcggcgatctggcgggcagccagcgaaatcgcgtcggcgccggtggcttccgcctgagcgcgctgcgcgtagatgatgccgggatagtgcggctcgcgctcgatcgtgctggcgatcgacgccatcgtcgagacggcctcgatcggatagtcgccggacgcggattcggcagacagcatgacggcgtcggcgccttcgaagacggcggtcgcgacgtcggagacttcggcgcgggtcggaaccggcgccgagatcatcgattccagcatctgcgtggcgacgacgacgggcttgcccgaacggcggcaggctcggatcagctgcttctggataccgggaacggattcgagcggcatttcgacgccgaggtcgccacgggcgaccatcagcgcgtccgagagctcgatgatctcctcgatccgctcgatcgcctgcggcttttcgatcttggccatcaggccgacgcggccgcgcgcgatcttgcgcacttcgacgagatcctcgggacgctgcacgaaggacagcgccacccaatcgacgtcgtcggtcgccagaaccgcatcgaggtcggcgcggtccttgtcggtcagcacgccggcggtgaggatggtgtcgggaaggctgacgcccttgcggtcggaaatccgggtgccggagatgacggtcgtgacgatgctcttgccgtcgcacttttcggcgcgcaacgccagcttgccgtcgtcgatcagcagacggtcgcccggcttcacggcttcgagaatctcgggatgcggcaggaacacgcggttcttgtcgccggggatgtcgttgttgtcgagcgtgaacgtgtcgcccggcttcaggtcgaccttgacgtcggcgaactttccgacgcgcagcttcggaccctgaaggtcggcgagaatgccgatcggccggccgctacgcgattcgacggcgcggatgcgctggatcagcgtacgcatcgtgtcatggctggcatggctcatgttgatgcggaaaacgtcggcaccggcctggtgcagcttctcgatcatcgcttcctcggacgaggcgggtccgagagttgcgaggatttttactttgcggttacgcttcatcagttcggactttcttgggtgcctggggtatcggaaagttggaccatccagctgccctggcgacccgtgtcatattccttgaaccccatcttctggtagccacgggcgtagcaatcattgacacccgtgatcttgaattcgttttccgccacgcacatctgcacgtcgcccgtccatcgtcctccccgggcggcgtcctctgcgtagagataatagtagcgggactgcagctctccctcgatcagcgtcgcgcaggtcgttgccggcacctgccaccagccttccgtcatccagccgtcggtggcgcggtatccgatcgccacacccaccagattctgcgtcccgttgcagacgcgaaaatccgcgcgcgccacgtcggcgatgaagaacggcgagaacgccgcgagaacaaaaagagcaaaacgggcaagcggcccggaacgcgtaaggaaacatggcgcggtctggatcaacacgacttccaattggctcccggttattcgttgtcgtgccttcttgcgctgcctcccggcgaaagtcaacgcaatgctaatcgattatatttctgacatggaccaacggcggcactcgctgccgcaatgatcgtgccgagattgccgcgctattgccaggcgaatgatcgcggctcgcgcttgaacgcttcccctgcccgtgcgatcagtgacacgcttcaaaacagtcaacggcattgtcctcgatgaacgacttccaatccttcgaaattctaggcgggcatcatgacagcggtatggtgctgctcgccgaccatgcgatgaatcgcctgccggagcgccatggcagcctgggtcttcccgaaagcgccttcgcccgccacatcgcctatgacatcggcatcgaggggctgacgcgggctctgtctgaaaagctcggcgctcccgccgtgctcggcggtttctcccgtctcttgatcgatccgaaccgcggcgaggacgacccgacgctgatcatgaagatctccgatggcgccatcattccgggcaatcatccgatatcggacgaagagtggaacggccgcatcgccaattttcaccgcccctatcacaatgccgtcagcgagacgatttcggcggtcgcctcggccaccggcaaggcgccactggtgctctcgcttcactccttcacgcccgcctggaaaaacgtgccgcgcccgtggcacgccgccgtgttgtgggacagcgaccaccgcgccgtcggcccgcttcttgacttgctgcgcgccgatcccgatctggtgatcggcgacaacgagccctatgatggcgcgctgaagggtgacaccatgtaccggcattgcatggtcaccggcattccgcatgcgctgctcgaggtgcgccaggacctgatcggcgacgccgccgggatcgccgcctgggccgagcgactggcgccgatcttcaagaccatgaacgccgatccggccctgcatcaatacgaggtgcatgcctcgcgcactggcccatactgagaagaggagagcgacatgaccacgctcagcaaggaacaacagaccgaattcgaagccgccgccttccgccgcctcgtcgcgcacctgcgcgaacgcaccgacgtgcagaacatcgacatgatgaatctggccggcttctgccgcaactgcctgtccaactggtacaaggacgcggccgatgccgacggcgtcgaactgacgaaggacgaggcacgcgtgatcgtctacggcatgccgttcgacgagtggaaaagccgctaccagaccgaagcctcggcccaacaaaaagccgcattcgaaagcaacaacccgcacaaatgagcccccgctctgtcgaataggcttgaccccggcgacacttcgcggcagtcaacgccatccgaatttttatccccctagcaggagaacacgatgtctgatgcccacggcgttgcccgcgaccagcttcgcgctttcatcgagcgcattgaacggttggaagaagaaaagaagaccatcgcggacgatatcaaggacgtctacggcgaagccaagggtaccggcttcgacaccaagatcctgaaaaaggtcatcgcgctgcgcaagaaggacgagcaggagcgtctcgaggaagaagccatcctcgacacatacctggcagccctcggcatgatcgaaggtccggcggaagcctgattttcgattactatcgaaccaaacaagaaagccgccgggtcgccccggcggctttctttttgtctctctgtcccagccgatcagccgagttgcgtgactcagccgagctgcgtgacgtagcgcacgtcgagataggcgttgatcgcttccgagccgccttccgtgccgtagccggaatccttgatgccgccgaacggcacttcaggcaaggccaggccgttgtggttgatcgacagcatgccggcttccacgcggcggccaagcgcctgcgcggtggcgctcgagctggtgaaggcgaaggaggctaggccaaacggcaggcggttcgcctcgttgatcgcgtcgtcgagcgtcgagaagcggttgatgatggcgagcgggccgaagggctcctcgttcatcacgcgcgccgaaagcggcacgttggcgagaaccgtcggctcgaagaagttgccggtgttgccgatacggcggccaccggtcttgagctcggcacccttcgacacggcatcgttgatcagctcttcgagcgccggaatgcggcgctcgttggcgagcgggcccatctcgacgccgtcttccaggccgttgccgaccttgaccgcctgcgcggccttcacgaagccatccgtgaaccggtccatcacgccgtcctgaaccaggaaacgcgtcggcgcgacgcagacctggccggcattgcggaacttcgagccggccatgatcgacacggcctgatcgacattggcgtcgtcgaacaccatgaccggcgcgtggccgccgagttccatcgtcgcccgcttcatgtgcaggccggccagcgccgccagctgcttgccgacgggggtcgagccggtaaacgagatcttgcggatgacgggatgcgagatcaggtattcggagatctcggcaggcacgccgtagacgaggttgacgacgccagcgggaatgccggcatcggcgaagacgcggatcagctcggccggcgatgccggcgtttcctcgggcgccttgacgatgatcgagcagccggcggcaaccgcggccgaaagcttgcgcaccacctggttgatcgggaagttccaaggcgtgaacgccgccaccgggccgaccggcgacttgatcgccagctgcgtgacattgggcgcgcgcgacggaatgacctggccgtaggtgcggcgcgcctcttcggcgaaccagtcgatcacgtcggcggcaccggcgatttcaaccagcgactgcgccagcggcttgccctgctcgcgcgtcatcatccaggcgatggtttccttgcgctcgcgcaacaggtccgcggcgcggcgcatcatcttggagcggtcgaagggcgaggtgtcgcgccagacgcggaagcccttgtcggcggcggcgagcgccgcgtcgagatcctcgcgggaggcatgcggaatggtgccgatggtttcacccgtggccgggtcggtgacgggcagcgtccggccggaggccgcattcttccattcgccgtcgatgaacagcttcacatcgggataggtctgcatgattattccttgtcgtcttcatcaatcaaattgtcggacagcggagccggcgaaaaacacatcgctccacacccattccatataggccaggcatccgcccgttcttaggggctgcgaccttatagaccgaaaatcgtggcctgcgagccccataatttggtagccggccacacccttcaaccccacgattgcggtactttgaccatgccccggattgatgtactgaacatgacgtcgtgggagagaagcacatggacgaagtcggttgcatcgtcgccggtgccggcgtgatcgggctggcgatcgcgcgcgaagcggcgaggcgcggactggacacgctcgtcatcgaggccaatccgatgatcggcatggagaccagctcccgcaattccgaagtcatccacgccggcatctactatccaccgggatcgctgaaggcgcggctctgcatcgagggccgcggaaagctctatcgctatgccgaggacaggcgcatcccccatgcccgctgcggcaagttcatcgtcgcgaccagcccgtcgcaggtcgggaaactcgaagccatccgcttgaaggcggccgaatgcggcgtcgatgatcttatcctgatctccggcgaggaagcgatggcgcgcgaaccggcgctccgctgcgtcgccgccctcgtctcgccctcgactggcatcatcgacagccacgcactgatgctcgctttgcggggcgatgccgaggacaacggcgccttcatcgccctcaacaccgagatcgtgtcaggtgacgcgagtaacaaccgcttccgcctgcgcacccgcgaccgggcgagcggcgaggaatacgacgtggcctcgcgccatttcatcaatgccgccggcctgcgcgccaacgatctggcccggctcgtctcgggcttcgaccacgccacggtgcccaggctccagcttgccaagggcaactacttttccgccccgacacgcaacgtcttctcgcggctgatctacccggtacccgaggatggcggtctcggcgttcacctgacgatggatctcggcggctccatccgcttcgggcccgatgtcgaatggatcgacgcgatcgactacgaggtcgatccgacccgctgcgagcgattctacgacgagatccggcgctactggcccggcctgcccgacaattgcctgcagccggcctatagcggcatccgcccaaaactctccggccctggccagcccgccgccgacttcgccatccatggtcccgccgtgcacggcataaatggcatggtgcatctctatggaatcgagagcccgggcctgacttcgtcgctggcgatcgccgaacacgtcatgtccgggatcgccgcctgaaaggctacgcgcaacacctgtctccaaccttcggatagtggcttcatcccgcaattcggggtagattgcgctgtcagaagagcaacttgcggagcgcatgccgtgaaaacgattaccgacagggagctggccgagcgcctgcgtcaggcgcttgatatgctcgacaatggcatgccctcaagcaaacgcgcgctcaacatctacgagatggtgatccgcgttctcgacaccggcgcgcgcgtgctcgaggatgagcagtttcgctcgaccgccaacgacaaccccggcaagccctgaacggcgcgccacgcctaccccctgatccgcgccagaacgcgatcgagcgctgcgatcagcgcgtcgctgccgcccttgcggtcgaagtcatcgaacacctgttcgttgaggccgcccttggtggagaactcctctttcagcgtctcaagcggtgtgtcgccatgtttgaccgccgtctgcgccaggctgaggaacagcggcgccaggtaggcccgcgccttctccttcgccatcccctgatcggcgagccagccggtggcgcgatcgagaatgccgaaatagctggccatcagcgcgctcgccgccgccagcaggtcgtattccgcccgcgtctcgcatgccaccgtgctgccgagtgccgaaaagatcgccgctaccgtgtcgttgtcgggaaagatcgccgtcaccccggcgcgctcggcgacgaatggcagcggaatggcctgggtgatcgtcaccggcgcatcgatccagctctcgagcgtcgcccggtccgtggcggcaatgacgctgaccacgctctgtccggcgcgaaagcgcaagggcttgatcaccgcctcggcgatctgcggccggatggccaggaacaggacatcggcggcatcgaccacggcctggttgtcggcgccgatttcgaccagcggcgacgatttggcaagccgcgcggcgatctcgccattgcgcggcgagacaatgatgcgcgtcaggtcgagcgaggagccgagcatccccttgaccatggcctcggtgatcgcccccgtgcccaagaacccgatcttcatcgcaacgctccctctgccattttctcccgtgcatcctccgcccatagtcctgtgccgaccatggggcccacaacaaaaaaccgccggattgctccggcggttctggtgtctggtctggaagcggcctcagttcgcgtcgaacttgcgcacttccatgaaattgaccgccgtaccgctgaagcggcccgtgtcgatcgacgccgtcttggtgaagccctcggcatagaccgccttcggctgcgcacgcaacgtctggctgacgaaacgcggtgccttgaccggcttggtgaccatttccatgcgcgcgttgctcagcgcccattgcgagatgatcttctgcgtcagcttcggctcggtggtaacggtcgcacggctggcatcggcctcggcggcctggttcttggtcgggcgaccacccttggtggaaaggccctgagtggcgccgggctcgatcgccggcttcggcgtatcgaagacatcgccgaagcttgccgacttggtcggcggagcaagggcggccagttggaccggcggcttttcagccggaaccttttgcggcatggccgcgtttatagcctgttcgacactcgacaccggcggctggttggccgcaagctggccactattggcattgtgctgctggttgagagcatcggcgacagcaggtgaaagcgtatcctgctgatccgcctcgtcatcgccagcttccggaccggcattcgccgcggccagaagcttctctgcgagcgccggacgctcggccggtgtcggcacgcccgcgagattccccgtcatcgcggcagccggatcggctgaagcgacttccgcgtctccaggagaacgacgcgcgccgaggagcgaaggcacgggaatgctatagccgcttagatcggcgaagctctgctgaccctgaacggtcacagcggcaagtgcatcctgcgcggcgttgccggattgcggagcgacgagggcgttggccacttcgctgccgccaggctgatttgcgaacgccggccgcacctgcgggatcggcgcgttcacgcttgcgacctcggtctgctgctgagcagccgcctcggcgggagcaccctggctcgggtcagccgcgttcggcatgtcggcggccttcggcggcgttgccttggcaacggcgacgggcgcgctgtcttccgcgctatcttccgcctcatcctcgccaccgccaaacagggcagcaaacagtgtcttcggcctctttcgctcttcgctggacgaacctgcataggcgccggagcttgccatctgcacggaactgtcgctcacgcggcgcttgtaatcggcgacggcctgctcataccccggcagcggcttgccgtcggccgggatgtgcatggtattgccgttcgggaacaggcgcacaagctcgtcgcgggtcatgcgcggccaggcgcgaacaccaccgacatccatgtgcacgaaaggcgaaccagatttcggatagaaaccaacgccgccgacctgcatcttcatgccgatgccgcgcaaggtcgcgagcttgacgtcgggaatgaagaagtccatggccttgccgagcatatgctggctcttttccgcaacgccggaattgcgcgaacggcccttgagcatcgcgttggttgccggcgagcggaagccgcagacgacgctgatatattcccgggaaccgctctggcggtagacttcccagatcagatcgaaaaggcgcgggtccatcttcgtcggctggttcttgcgccagtcgcgaaggaagcggttcaactgctcgagacccttggggtcgaagcggccgttgcgcttgtaggtgatgacagccttttcacccgtattgatgaaataaagcttgagactacgcgtctcgccggccgcctgcgagggagaactcacaatgacgggcgacgaaactgcaactgcgagaagggcggccatagccgtccttgtcacctttccgcaaaggtctgcgcacctagtgcgccatgtcaggcgcgaaggcttcgtattccaattcagatccggcaaactcaatccccgtcagacagccgatggtccctcaatctgacccttgactgttaaatgcggtcacacgatggcaaaaatgccacacatgatcaaccttttctttacatagtgaacaggccactaacaagtggtttatgattggtaacaaaagatgattgccggaatcttaactgatacaccctatgcagcgtccttttgcgggttgtccgggtcaattccgtagtccttcaactttctgtaaagcgtcgagcgaccgatgcccagtttgcgcgcaacctggctcatctgaccgcgatagaacttcagcgcgaatcggatcagctcttcctcgacgtcggcaagcttgcgcacgtcgccggccggattggtgctcgagatcgcgttgtcgggtgcgtcgttgatccgcgccgcgacattgtcggccaccgtctgcgagacgccgaattcggcggcggcgatctcgccgaggcgaacattgctgctgttgtcggcgaccagcgccagatgatcgaccacgtcgtattccggcagctgcgccgcgatctgcgggaaatcggcctccgtcagctccggaccgtcggcaagaaccacggcgcggaagatcgcgttctccagctgtcggatgttgcccggccagtcgtaggcggtgagcagcgccagcgcgccggcattgaccgtcatgcggttgccgttcttctgctcgctcgagaagcgttccgtgaacacccgcaccagatgcggaatgtcctccttgcgcttgcgcagcgccgggatggtgatggggaacacgttgaggcggtagtagagatcctcgcggaaatggccgttcttgacctcttcgatcagatccttgttggtcgccgagatcagccggacattgaccttgtgcgcggtgcgcgcgccgacggtctcgatctcgccctgctgcacggcgcgcaacagcttcacctgcacgtcgagcggcaggtcgccgatctcgtcgaggaagatggtgccgccatcggcttccatgaacttgccgacatgccgctctgtggcgcccgtaaacgcacccttctcatggccgaacaggatgctctcgaccagattgtgcggaatggcgccgcagttgacggtgacgaatggcttgccggagcggtcgctgccggactggatggcgcgggccaccagttccttgccgacgccggattcaccttcgagcacgaccggaatgttggactgcgcggcgcgctgggcaagatccagcacccggatcatcgccgggcttgcagacacgatatcgtcgaagccgacggcacccgagcgcgaacgccgcccggcacgcgccttgacctcgcgctgatcgagcttcagcgcattggcgatcgaattggaaatccgctccggcgacaccggcttgacgacgaaatcgaaggcgccggcgcgcatcgcctgcaccaccgtctcgattcccccctgcccggtctgcacgatcacgggaatttgcgtgccgaacgcatggatcgcctcgagaaactcgagacctgtcatctcgggcatcatcaggtcgagaacgatgacgttgtagaggccactgcccctcttcaccatctcaagaccgatccggccattctctgcctggtggacgacgtgtccgtgacgctcgatggcgttcttaagcagtctgcgctgtacaggatcgtcctcgacgacaagtatctgcgctgcacccttgtgctcgttgtaaccggtcattgctgcctcacttcatgcgaaaccttggatggcaatgtcgcagaaaggcttgaacatccagttttgagaaataatcgcattttaacgtttgtgacgaaggtggattcgcctcgaaacgacgctcccgcgcgacgaaaagccccttgatgccaaggctttgggcgcttagacagtcagacctgtcgtaaaataggaagaggatcccgctcatgaaaaacccgctcttcggcgccgaatgcaacttttcggtaagcaatgccggttccgcgaaggcgatcgaacttggcgacctcccgacctggaagcttgaggacctctatccctccgccacctccgacgccttcaaggccgacatggcgaaagccgaaaaggattctcttgccttcgaagccaaatggaagggcaagctctcggacgccgcgacgaaaaagggtgccgacggcatcggccaggcgctgaaggaatatgaagcgctcgacgacatcgtcggccgcctcggctcattcgccggcctcacctatttctccgacacgtcgagccccgcaaacggcaagctctacggcgacgtgcaggcgaagatcaccgatttctccggccacctgctgttcttcgcgctcgaattgaaccgcatcgacgacgccgtgatcgacgcctgcatgaagaacgaccccgatgccggccactaccgcccctggctggtcgacctgcgcaaggacaagccctatcagctcgacgacagactggaacagctctttctcgagaagtcgatgacctcggccgccgccttcaaccgcctgttcgacgagaccatggccgaactgcgcttcgaggtggatggcgagatgctgtcgatcgaggtgacgctgaacatgctgcaggaccgcgaccccgaggtgcgccgcaagggtgccatggcgctcgccaagaccttcaaggacaatctgcgcatcttcacgctgatcaccaacacgctcgccaaggacaaggacatttccgaccgctggcgcggctttgacgacatcgccgattcgagacacctcgccaaccgcgtcgagcgcgatgtggtcgatgcgctggccgccgccgtccgcgacgcctatccgcgcctctcgcaccgctactacgcgatgaaggccaaatggctcggaatggatcagatggagttctgggaccgcaacgcgccgctgccggaaacctccaacgccgtcatttcctggacggaggccaaggacacggtgctatccgcctacggcaacttcgcccccgagatggccgcgatcgccaagcgtttcttcgacgaggagtggatcgatgcccccgttcgccccggcaaggcgccgggcgccttcgcgcacccgaccgttccctccgcccacccctacgtgctcgtcaactatctcggcaagccgcgcgacgtgatgacgctcgcccacgagctcggccacggcgtgcaccaggtgcttgccggcagccagggcgcgctgatgtgccagacgccgctgacgcttgccgagaccgcctccgtcttcggcgaaatgctgaccttccgcgcccttctcgacaagaccaaggacaagcgcgaacgcaaggcgatgcttgcccagaaggtcgaggacatgatcaacacggtcgtgcgccagatcgccttctacgaattcgagcgcaaggttcacaccgcccgcaaggaaggcgagctcacggccgagcagatcggcgagctatggctgtcggtgcaggccgaaagcctcggcccggcgatcaggatctccgagggctacgagacctactggacctacatcccccacttcatccactcgcccttctatgtctatgcctacgccttcggcgactgcctggtaaactcgctctacgccgtctaccagaaggcggatcagggcttccaggacaagtatttcgagctcctgaaggcgggcggcaccaagcaccactccgaactcctcaagcccttcggcctcgacgccaccgatccgtcgttctggagcaagggtttgtcgatgatcgaggggctgatcgacgagctggaagcgctagataagggctgaggtgggaggaagcgccagtagcgcgcttctcacgccacacggaaacaagagatggggcgttacgccgccacaggtctcttctccccggcggggagaagtgccggagcgtagcgaggcgatgagggggcggagcgcgagcgacgcgttgagcgaatgcgataggcaattgcgcccgtggccccctcatccgcctgccggcaccttctccccgtcggggagaagggaggtcgtcgcaccgccccgcttcagaaacaggacccagcatgaacgggcgcgccccccacatcctcttccgcgacgacacatccggccaggtcatgctcttcgcagacccgaccgagatcatcgtcgcccacacccgcgccgaggtctttgccggcctcgcccgcatggagaaggccaaggcatccggcaagtggctcgccggctacatctcttatgaggccggccacctcttcgaggacaagctcgccggtttcgcgagcgagaacggtgaaaccccacttctctgcttcggcgtcttcgaccacccgcagccggacggccaccccctcgcccagcccgcacaacgcctcgaaaacgaagagttcctgacggcgccgaaagccgcatgggatttttccacctacaagaaccgcttcgaccgcctccaccaccacctcatgcgcggcgattgctaccaggccaatctcaccatgccgattgaggcccgctggtccggcgacccgcgcgcggccttctggtcgctgatatcgcgccagccggtgaaatacggcgcgctggtcgatctcggcggcccggtcatcctgtcgcgctcgcccgagctcttcttccgcaccgacgagcaaggctggatcgagacgcatccgatgaagggcacggcaaggcgcggcagcacacccgccgaggacgaggcgatcaagcaagccatgctcgccgatatcaagacgcaagccgaaaaccgcatgatcgtcgacctcctgcgcaacgatatctcgcgcatcacgcaagtcggcacgctcgacgtcccaaaactcttcgacatcgagacttatccgacggtgcaccagatggtgagccatgtgcaggcaaagctcctgcccaacctcgaaatccgcgacatcctcgccgccctcttcccctgcggatcgataacaggcgcgccgaagatcagcgccatgacgatcctgcacgagctggaagacggcccgcgcgacgtctattgcggtgccatcggcatgatcgcgccatcgagcgccatgcgcttttccgtcgccatccgcacgctcacgcttttcgacgacggccgcgccgtcttcaatgtcggaggcggcatcgtcatcgattccaccgcggacgccgaatacgaggagtgcctcctgaaggcccgcttcgccatcggcgaccagccgatcgcaggaacggggagcgtctgaccgtggccgatttctcgctgatcgaaaccctgcgctacgagccggacacaggcttcatccgcctgcgtcttcatctcgcccgcctcacccgctccgcccgccgcatcggcttcccgcagccggtgggcgcgctcgaacgattgcagcaagccgtcgccggcgccacctcgacccagcgcgtccggctgaccttcgacgaaaacgcgaatatctcggtcaccgcggcaccgttcacgccgcttgcgcccgacaccacctggaccatccgcatcgccgaccagcggctcgcctccgccgacaagctgctccgcatcaagaccacgcgccgcgcagtctacgaggccgcgcgcgccgaatacgccaccgatgaagccgacgaggtgctgatgctgaacgagcgcggcgaggcctgcgagggcaccatcacctcgatcttcctcgacgacggctccggcgtcctgcgcacgccgccgatctcctgcggcctgctggcgggcgtattgcgcaccgagctcatctgccagcgcaaggcccgcgtcggccgcatcacgcgcgatgatctgaaaacgggaaaactctatgtcggcaattcgctgcgcgggttgataccggcaaagatcgtgctttaagccacgatccgcaatcgatcccgcccgccctgcttggcatgatagagcgcctcgtcggcgcgcgcgtaaagctcgcgcgccgtgtcgccggggtgcagttccgcgagtcccgccgagcaggtgtaggaaaaacccggcgcgttcaggatcggcctggcgccacgcaccgtggtcaggatccgctcgatgatcagctcaccctgcgccaaggtcgtatcgggcaggatcagcatgaactcctcgccgccgatccgcccgaaactgtcgcgccggcgcacgaggggatgcacccggcgcgcgaaatcgatgagcacgtcgtcgcccgtctggtgcccgtagacatcgttgatgcgcttgaagaaatcgaggtcgatgatgcagatgcaaccgcccgcggagcgcgagacggccttgccgttggcgagattgtcgagcgccgccatcatgaaccggcggttggagacgctggtgagttcgtcggtctgcgaggccttgagcgcgaagtcgcgatcctgcctgacgtcgcgttcgctggccttcagatgggtgatgtcgctggcgatgcacagcatccagccatccttctgcacggtctccgtcatccacagccagcggccgtcgaccacatccgtctcgaaggcccgaaacggcagcttgccgcgccgcgattgcgccgagaccagccaggtctcgaagtcggcggcgcggatgatcgtgcccttgccgttgcgcgcgttgcggcgcatcaggtcggcccacagggggtattcctccggctccagtgcgaaggtcgtgcgaaaggccgggtttgcgtagcgcaggcggtcatcctgatcgtaaagggcgatcaggacaaaactgtcctcatgcaattccgcaagccgctccgatatctggttcatccgatggttccggggcgtagagataacgatgattcgcagtttgacgcaaaaatctgaaaagatgatggatggtttcggcgcaattgccctattcaggtgtctcggaatgcgacgccttggttcacggtgaccgtcgccgggctaaagattttgaagaggtaaggcgatgaacagcgaactgcgcgaccatgtccgtctgctcgaggagaggttgttcgaccagacggtccgcaacacgcgcagcctgctcgagaccctgctttcgccggatttccgcgagatcggcaactccggtcgcctctatacccatgaggagatcatcgccgccctgttggaagagcccagcgatggcacgacgcgtcagctgaccgacttcgaaattcaaacactggcaccggacgtggttctcgccacctatcgctcggagcgcatcgtgcagggcgagccacccgtccgggcactccgcagctccatctggcgccgcggcgccaacggcgcgtggcgcatggtcttccatcagggtacgccggagcgttagagtttatccatgacgccaccgacctacacaccctatgacggctcggccaggcccttcacaatcggcctgatgccgctcgacctcgaccgctggatcgagcccgacgccgattgggcccgctatgtcggcgaaaagcgtgcgctgatcgagagcagtcgcgacgaggtcttcgtggccgaagccggcaccgaggacgcacagcaggaagcactcgacctgctgcgtcagcatctgagcgaacaccatccgcagctccttcccagcgtcccggacaccgacgccgaccgcccgccgctgctccgcgccggcctgatgatccaggacgatctcgtcatcatgcgccgcaaagaggacggctggcatctcgttgccggtttcgtcgccttcccgtcctcatggtcgctcagggagaaattcggccggccgatgcatgcgatccatgcggatgtgccgggcttcgacgagggtacgcgcaacgccaccctgatccaccgcatcttcgacaatctgcaggtttctcaaccggtcgagcggctgaactggtcggtcaacacctcgagcgccctcttcctgccgctctccaagcaccgccgcccgccgcaggccgagccgttcacgctggccgagcgcttcgcccgcgtcgagcgccagacgctgcgcaagctcccacgctcgggcgatatcctctttacgatccgcgtctacgtcgacccgatctccgctattgctcaccacccgcaggcacaaagcctggcgctaagcttcgcagcccagctcgaaagcctcgacgagtaccaggccgcctacaagggactgagcctgcagaagcgcgaactggcggcgaaattgcacgcgtttgcaagcaatgaccgcttcacctgatatttacattcccggccggaacgctctttattgtgacgtgattttgtgattagagccggtcacctatcggtatttgaacgatttcaagcgaattcttagaggcgtctcgccttcgtcgccttccacaggagaaaagaatgacggaacagaaccacccggtatatgccgaaattaccggcccgatcgtcatgatcggctttggctccattggccgcggcacgctgcccctgatcgagcgccacttcaagttcgacaagagccggatggtcgtcatcgacccgcgtgaagagccctccgacatggagatcctcaagcagcacggcgtccgtcacatcaaggaatatgtgacgaaggacaactacaaggaactcctgaagccgcttctgacagaaggcgaaggccagggcttctgcgtcaacctctcggtcgacaccggctcgctcgacctgatgaagctctgccgcaagctcgacgttctctacatcgacaccgtcgtcgagccgtggctcggcttctacttcgacaagtccatgaagaacgccgaccgcaccaactatgcgctgcgcgaaaccgttcgcaaggaaaaggccaagaacccgggcggcgccaccgccgtttccacctgcggcgcaaacccgggcatggtttcctggttcgtgaagcaggcgctggtcaacctcgcaaacgacaccggcctgaagttcgaagagccggatcagcatgaccgcgaaggctgggccaagctgatgaagaagctcggcgtcaagggcgtccacatcgctgagcgcgacacgcagctcaccaagaacccgaagccgctcaacgtcttctggaacacctggtccgtggaaggcttcatttcagaaggtctgcagccggccgaactcggctggggcacccacgaaaactggatgccgaaaaacgccaagaagcacaagaagggctgccaggccgccatctacctcgagcagccgggcgccaacacccgcgttcgcacctggtgcccgacgcctggcccgcagtacggcttcctcgtcacccacaacgagtccatctcgatcgccgattacttcacggtgcgcgacaaggacggcgaagtgaccttccgcccgacctgccactacgcctaccatccggccaacgacgccgttctgtcgctgcacgagatgttcggcaacggcggcaccgcgcagccggttcaccacgttctcgacgagcatgaactcgttgatggcgtcgacgaactcggcgtgctgctctacggccacgagaagaacgcctactggttcggctcgcgcctgtcgctcgaagaaacccgccgcatcgcgccttaccagaacgccaccggcctgcaggtcacctcggcggttctggccggcatggtctatgcgcttgaaaacccgaaggccggaatcgtcgaagccgacgagatcgactacaagcgctgcctcgaagtgcagctgccctacctcggcccggtcgaaggtcactacactgactggaccccgctcgatggccgcccgggcctcttccccgaggacatcgacaccaaggatccttggcagttcaagaacatcctcgttcgctgatagaaacgagaccgagatcaccagatgcccgccgcaaggcgggcatttttgtaacgcctgctgtataaatgccctgacgcgcgcaagaagccttgccttcccggaacgctcgcgccatgtgttcgttaaccaagcgttatatttttcggtctgaacttccgggagcatcttatgagactcaaaaccctcgtcgtgatcgcgagtgcttcggcggccctttcggcctgcgttccgcagtccccgcgtccgatgcccgttgccgccgccccggcgcagacaggcgtggaaggctcctggtcggatccgaacggcatcatctccaccttccaggccggcacgttcacgacgcgcacgaccgacaccaaccagatgctggcctccggcacctacatcaacacgtcgccgacgctggtcgagatcaacatgacctcgctggtgcgcaagacgcagtccaaggtcaactgcgcgctggtcacccagagccagctcaactgcacctccgacagcggctcgcagttcagcctgtcgcgccgcatgtaggccgcttcatacgaacatcaggaaagctcccctcgcgggagctttttttgtttaccgctcttggaatgcaccttcgctgtcacaggtttttctcttgcggccactaatggttgatggaaccatcgaccgcgtagggacggcggggcttgggggactgtcatccggcaaaccggatcaggttcgagcgccgccgataaaatcaggagaacaggatgacgaaatcgtttcaattcggtctgctgaccgcgtccgtattggcgctgtcgagcagcgccgcctttgccgattaccagcttaatattctgcacatcaacgatttccattcgcgcatcgaggcgatcaacaagttcgattccacctgctcggccgaggaagagagcaagaaggaatgcttcggcggcgccgcccgcctgaagaccgccatcgaccagcgccgcgcggcactgtcgggccagaatgttctcctgctcagcgccggcgataattttcagggctcgctcttctacaccacctacaagggggccgtggaagccgaagtcctgaacgacatgaagttcgacgtcatggccgtcggcaaccacgagttcgacgacggtgaggatggcctggccgcattcctcgacaaggcgaaattccccgtcgtttccgccaacgtgctggcggccgacggcgccaagatcggcgaccgcgtcaagccctccgtcgtccttgagatcggcggccagaagatcggcatcgttggcgccgtgaccaacgacacagaggacctggcctcgcccggccccaagatcatgatcgccgacgacgtgcagacgatcaccgccgccgtggcggatctgaagaagcagggcgtcaacaaggtcatcgcgctcacgcatatcggctacggcagggaggtctcggagatcgccaagatccccgatgtcgacgtcgtggtcggcggccactcccacagcctgctgtccaacaccgacgcgaaggccgaaggcccctatccgacgatggtcgacaaccccggcggctacaaggtgccggtcgttcaggccgcctcctacagcaagtatctcggcgacctcgtcgtcgatttcgacgacaacggcgtcgtcaagggcgccaagggcgatccgatcctgatcgacagctcgttcacgcccgatccgacgctcacgacccgaatcgccgagctcgccaagccgatcgaggagctgcgcaagaaggtcatcggctcctccgaaggcccgatcgagggtgaccgcacggtctgccgcgtcaaggaatgctcgatgggcaacctcgtcgccgacgccatgctcgaacgcggcaagagccagggcatgcagatcgccatccagaacggcggcggcctgcgcgcctcgatcgatgccggcgaggtcacccagggcgaggtcatcaccgtcctgcccttccagaacacgctcgcgaccttccagctttcaggcgcagatatccgcaaggcgctggaaaacggcctcggcaagatcgaggagggcgccggccgcttcccgcaggtgtcgggcatgaaatacagcttcgacaagtcgaggccgtcgggcagccgcgtcgtctcggtcgacgtcaaggacggcgacgccttcgttcccctcgacgacgccaagacctatggcgtggtcaccaacaattacatgcgctctggcggcgacggctactcgatcttcgccacagcgggcaagaacgcctatgacttcggccccgatcttgccgacgtcaccgccgagttcctcgccgcccgctcgccctacaagccctatacggatggccgcgtgaccgaagtcgcctcctctgcgccagcgcccgcgccgaccgcatcgggtatggccgcaccggcccccgcggcgccggccacctcggaggcaacgcccgctcccgccgctccggcggcaacggcaccttcgacggaagccccggcggccctcgcccccaacacaccgaccacccacgtcatcgcagcgggcgacacgctgtgggatctcgccaagcagttctatggcgacggcacgctctggaagaagatttcagacgccaacgacaagccgacgccgcgccgcctgacggttggcagggagctgcagatcccgtccaagtaagccttgcgcgagaacgcgacatgctacgacgatttgtcccaatgatgtgagccggtccggggtttcccgggccggcttttgttcctatagggtgaaccattcgatctcgtccgcgtatgagcggtcgagcagctggattggggtatgaatgacgaccgttgagaccacgcacgttccggcggaacacccgccggtgaaacatggcaaggtgggcgtcctgctcgtcaatctcggcacgcccgatgctaccgactacacctcgatgcgccgctatctcagggaattcctgaccgacaggcgcgtcatcgagtggtcgcgctggaagtggtatccgatcctcttcggcatcgtcttgaacacccgccccggcaaggtcggcaaggcctatgagctgatctggaaccgggacaaggacgaaagctatctgcgcacctatacccgcagccagtccgaattgatggccgagcgcctcaaggacctggaaaacgtcaaggtcgactgggccatgcgctacggcacgccctcgatcgcctcgcgcatccaggcgctgaaggacgacggctgcgacaggatcgtgctcttcccgctctatccgcaatatgcggccgccaccaccgcgaccgtcaacgacaaggcgttccagcatctgctgaagatgcgctggcagccggcgctgcgcaccgtgccagactatcacgacgacgacacctatatcgaagcgctggccaactcgatcaccaggcatctgtcgacgctcgactggcaaccggaaaagatcatcgcctccttccacggcatccccatgtcctacttccagaagggcgacccctattactgccagtgccagaagaccgcccgcctgctgcgcgaaaagctcggcctgtcgaaggaccagttcatgatcaccttccagtcccgcttcggaccggaggaatggctgcagccctacaccgacaagacgatcgagcagctcgccagggacggcgtgaaaaagatcgccgtgctcaaccccggcttcgtctccgactgtctcgagacgctcgaggaaatcgccgaacaggcggcgcattcgttccacaagaacggcggcgagaaattcgcccatatcccgtgtctgaacgacagtgatgatggcatggcggtgctggagaaggtggtgcggcgcgaattgctgggttgggtttgagggtagtggccaggagactataggcgtttaccgtgagcgtctactagccgctgcggccagtgttacccccctctgccctgccgggcatctcccccacaaggggggagatcgactcgtggtgaggtttacgccaaacaattagggtggagcgagcggctgcccccagccaatctccccacctgtgggggagat

SEQ ID NO: 11 - DNA, 126677 bp, Rhizobium matallidurans
  source 1..126677: mol_type = genomic DNA
ttacttgaaactctcttcgagctgacaccagatggcaagcaaaggctgaaaggtgcatcttatcgcgagtgggagggatggccgacactgtcgagtttgcgtttcacgaagtcgaggtgtgcctgatagcacgcacaaagccagcgtatatatcagccttatattgttgatatgatttgtgttgctgcgctgagccgctcatctttcctcttttcccccttcatcacgtacggcggtcatggtcttggcgatagcctggatgtggcccgctcgcttgcgccgcgatccgacgttcgtcaggcattgtcgatggaagccgatcaggaacgccggacgctgaaagaggtcatggggtggctctcgcgggagtcaaccgccttcaacgccgttgccatcgccgtccgtttatcctcggtgccttatcaagcgcggaaatcaagaccgatatcgagaatgggcgcgctgtgggtgatccagccgacggagaccaaatcgacccccgatgctgcaatgtcgcgcgcggtttcaggcgttatgcgccccgaagcctccgtgattgcacgtcctccgaccatcgccaccgcttcgctgagctgccgggcccccatattgtcgagaagaaccgcatcgacaccctcctccatcacgtcactgagttgatcgagcgtatcgacttcgatctcgatcttcagcatatgtcccgccgctgctttagcccgacgcagagcctcccggacaccaccggcaatcacgatgtgattgtccttgatcagcatcgcgtcatgcagcgcgaaccggtggttcatcccgccgccggcgcgcaccgcgtatttttcgagcgcccttagtcccggcgtcgttttgcgggtacaggcgacggccgcgccgctgccggcaaccgcttcgacgatcgatgcggtcaccgttgctatccctgacagatggctgaggaagttgagcgctgtgcgctcaccggtcagtattcctctggacggcccgctgatggtggcgatcacgtcacccggccctaccgtgcttccctcacggatgtgccgggcgaccgatatcgcgggatcgaccagctcgaatgcaagggctgcggcatccaatcctgcgacaatgccgggctgacgcgcggccatgacgacggtcgacatgtgcttttcaggaatgaccgcggccgaggtgacgtcaccggccattcccagatcttcggcaagcgctgttctgaccgcaggttcgatgacgagacgtggaagagatgtgacgtgcatttcatgcactccttgcaaagtttgatgagcttgcggaacgggcgatctgcaacgcctgttcaagcgttatccggctgcgctcagcaaccgcgtgcttcaacggatagtcggtccgggcatgcgccccgcgcgattccgtgcgcaggcttgcggagacggcgatcatcaacgcgacgatcgcggggtcggccgctatgtcattgccttctgccacaggcaacagctcctcaatcgcctggtgaatgccgaccgcgccgcgcagaacgccaacttgccgggagacaattgggcgcacggtcgtcgtgtcgggcacgctcggcatgggcggaacatatccaagcgtaaccgccgtcagctttgatctcatgtcgttggccgcgcgcacgcccatgacggcggcttccagcagcgaattgctggcgagcctgttggcgccatgcaatccggtcgaagcggcctcacccgcgacccaaaggccagcaacggtactgcgtccggctcgatccgtcgcaacaccgcccatgtggtaatgcgcggccgggcgaacggggatcggctgctcggcggtatcgatcccggccgagcggcaagcggcatggatcgtgggaaagcgcgaggcgaagcgcgcgccaatcgcttggcgcgcatcgagaaaggcgcggccgccgcgggcgatctcggcgctgattgcacgcgcgacaacatcgcgcggcgcgagttcagcacctgcaacatgcctcatgaagcgttcgccgcgctcgttgatcagcacggcgccctcgcccctcaccgcctcgctgatcaggaccagagggcgccgattgccgtcaagtgcggtcgggtggaactggacgaattccatatcggcgagcacggcacccgcgcgcgcggcgagcacgatcccctggccgaagttgccggcaggattggtcgtcgcctcatacagtccgccaatgccgccggtggcgagaagaatgcgcgacgacggcaagaccatgcccccgccagaactggcgcagagcaagccggaaacaacgccatcagtcgtcaatatccgccgcgcatccaccccttcgataacggtgattgcaggatcggcatggaccgcccttttgagggcggcgataatggccgcacccgagccatcgccgccggcatgcacgacgcgccgacgcgaatgggcagcctccaggccgagcgccagactcccattgccatcttgatcgaacgagacgccgagacgctgcaaggctccgatcacggacggcgcttcagcaataatttcggcggctgcagcggcatcgcaaaggccatcgccggcagcgagggtatcggcaaggtgcaggtccacactatcatccgcaccgatgcatgccgcgatgccaccctgcgcccacccgctcgagctctcggcgccgagatgtgcgcgggtgacgagcacgcagggctcgggagacagcgtcaatgccgcgatcagcccggcaagcccgcttccgacaatgaccggtcgatccgcgaggttttggaggatctcggtcatatcgccagcatcctttcgacagcgcggcgagcagcagtcgcgacattggcgtcgacgacgacttcgtgctggttttcctcaagcgcggttcgaatgttgcgcaaggtgatgcgcttcatgtgcgggcagagattacaggggcgaatgaactcgacatcgggatgatgcaccgcgacgttgtcgctcatcgagcactcggtcagaagcacgacgcgggcaggcttcttctctccgacatagtcggacatgaccgccgtcgagcctgcaaagtcggcttccgccacgacatccggcgggcattcgggatgggcgagcacggtgacgccgggatggttctcccgaagctggcgaacatcttcggcggagaacagttcatgcacttcgcagtgcccgtgccaggcgatgatctcgacattcgtttccttggcgacgttgcgtgccaggtattcgtcggggatcatcagaactctgggaacgccgagcgcctcgacgatctgcttggcattgcccgatgtgcagcagatgtcagatgctgccttcacagcggccgatgtgttgacgtaggtgatcacgggaacgccggggtaagccttgcgcagcagggcgacgtcctcgggcgtgatggaatccgccagcgaacagcccgcctcggtgtcggggatcaaaaccgtctttttcgggttcagcagcttggccgtctcggccatgaaatgcacacccgcgagcacgatcacgtcggcgtcgacgtcgattgccttgcgggcaagcgccaggctgtcaccgacgatatcggcgacaccgtggaagatctccggcgtttgatagttatgcgcgaggatgaccgcgttgcgtttgcgcttcagctccaggattgcctcgacatcctcctcgaagctcatccattccgctttgggaatgacccggctgacacggttgtaaagcgacgcggcagacactgcggtattcatctcatcctccattatactcagttcgagtatatctaggagaaatagatattctcacagtgagcatatgtcaattgcgggcgagaggcagctttgtccctgatagagcgcgttcttcgacgaccgtctgccggaagcggaagagcttggcggggcggccgccggtttcgctggtgatgccaccggtttcctcgacaagctcctgctgctcgataaggcggcggaagttctgtttgtggaggcaaaggccggccaaggcctcgaccgttcgctgcagctgcagcaaggtgaacgcgctcggcatcagctcgaagacgaccgggcggtattttatcttcgcgcgcaggcgcgctatgccggtcgccaggatcctgcggtggtcggcaaacatcggccggccaaaattgtcgctcacatcacctgcttctgtcaccaacccggcttcgtagagcaattcgtatcgctgcagcgtcagatcctcgttccagccaccgtgatcgaggccgaaggtgaagtcggcgcgctggtgacgctcgtcgcgacgtcttgggtcgacatcggcccagacccggagcttctcgatgatcgcatccagaaccttgggtcgtccctgccgatgatcctcccacggcagatattcgtaccacccatgccatgccggacggcccgcacctggcgcatcctgttccagcaccagcccgagatagctgatcgagatcgttcgtccgccacgaatgtcgttgttgcggtcccggtcggcgaatgtgtagagctgctcaaggtagccgatcgggtggccggtctgctcctggatccattcgcgcaagccgctctgcagcgtgcgatgtccaagctcgaacgggccggacggcaaggcttcgccggaacgcaccgtcatcacacgtggctcgttgctggtgacggctgccacaacagccatgagttccgcgtgggcaagcccgatcgtcaagcaattctccctgaatttagcaacatcaattgcacgccggccgctttaccgcctgcccgcaaccttctgccccaagaggcttgccacgtcgagcatccggttcgcgaagccaaattcgttgtcgtaccagccgaacacgcgaagcagtccacccggcgcgatcgatgtctccggaccggagacgaccaatgactcctggcgcgcccgcatgtccacggaaaccaccggcttctccgtccaaccaagaacacgtgacgcggcggcagctttttgcatctgcgcgcgcgcatcggcgagtgacggggtgtctcgcaacgacactgtcagatcgatcgccgaaacgctcgccgtcggcacccttatggcacgcgcctcgatcgctccagccagcgacggcaggaccttgccgagaagcttgtgcgcgctggtggtcgtcggcaccatggagagcgcggcggcgcggcttctcgcgaaatcgtcacgcggctggtcaaccgtgggctggctcccggtatagcaatgcacagtggtcatctggccgcccaccacgccccaggcatcgtcgataaccttgagcaacggggcaagcgcattggtcgtgcaggaagcgttggagacgatgaggtgatccccaagcatctcctcgttggcgccgagaacaaccgtcacatcggcggcctcggcgggccctgagatcaacacgcttttcgcgcccgcttccagcgcacgagaaatgaactcgcgtgtatagcgctggcccgtgcactcgagaaagacatcgacatccgagagatcaagctggcggacatcgcgaacattgtggaaggcgatcagcctgtcgcccacctgcagcgcctggtcgcggaccgcgacctcttccggccaggggccgaaaacactgtcatactggaagaggtaggcgcagctttccagcgccgcgacatcgttgatcaggacgagttcgaaactcccgcccttgctcagcaggacacgcagcaccgttcggccgatgcgaccgaaaccattgatggctattttcgtcttccgctttgtcatgtgtgcccggactcacattgcctgtcattgctcggtacgcccgtcagacggatttcgcaacatggagatctggcttcctcagcctccgtggcagcgcaaccgccgactgcgcggatatgtccctcccgggtctgcgattgattgttacaaatggaaaaatcgggggcacatctctgcgacaaatcaatattagctatgcgtcacgcaaagctggcaggcacgattgaaatgccaacggctgactcgggtcgcggtcaatcacggaggcgacaacgaccgttgagttcgatcggattggtgggcgttctgtttgccgcgagccgttggccgatgaatgccatgaacggtgcgcggcgacgaccgacgtgtgaagcagacgaaagagaacgtgaatcatgttagaaaaaatgatccacgtcctgcgctttcgctctctaccttgcgcaagcgtggtgttgctacctaattccggaagattggagcaggcgtcggggactgacagtttcagtggtttcatcccgaccggtcgataaagggcgacgagaacaccgcgcgttgccactcatgtcaccgctctcgtcagcagagccagttcatgttcacgctttttgaagcaaagagcgtcagcagttgagcaggccgttcacgaagatctcgggcagcgcacgccagcggctcggcggacgcatcgtccttgccgtctgcatggacacgctcatgctgcttggtctcgcatactggtggctcgaaaacctcgcccaggagctttttggaaccgcgttgttcctgcttcttgcaaggcatatctaccggaaccggagctggtttcggaacatcgtcaaaaggcattatggtttacgacgcacggttatcgtcacatttcatgccgcgctcgctctgaacatggctgcgcttctggcaacaagtctcgccatatcccaatccctattcgcggctctgccacggccggatagcgccgtgctgaccgaaatacactggttctcttgggccgtgatcgcgatcgggtgccatgtcgggccgcactggtcgaggatcggggcaatcacgagcgccgccctcgatctgccgccggccacaccggctcagacacggtcctgacgttactcgccgtcgtgcttgtcgcaatcggcatatcgagcctttcagcgctcggtgtccaaacgaagctatcctttgagctaagtcccaatttctgggacttcagcacttcggtaacaccattctttgtccgcaggaccggtgttcttgcactgctcgcgatcgcaacctattgcgcaatggatattgttccacgcctccgaacgcgatcgaagctctgatgtgacgctaggagcggcttgcgctcgttgcggctatcgcgttgagcgtctgcgcatcgcgaccatagatgtcgtcgtaatagtgaatgatgccgtcggccgtcggccatgccgtgaaataggagacgtaaacgggaacttcctcgggaaccggaacgtccttcttctcaccgcccgcaatttcctgcgcgaccgaatccaccgatgttttcaagacggcggcggccatggctctcggattttccagccgcacgcaaccgtggctgaacattctatcctgcgaagcgaattttccgcgcgccggcgtgtcgtgcatgtagatggcatgcggattggggaacaatatcttcagctggccgagcgcattatcggggcctggcggctgtacgacggcgatattctcgagcggttgcgcccaatcgactttcgccgaggacatcggcttgccgttgaccgataccttgtagccctcgcggtcgaggtaggacggatcccgcttcagatgcggaagcatctcgttcttgatgatcgactgcggcaccccccaatcgggattgaattcgactgtcttgatcgaagcatcgaaaaagttcgtctggtgatcttgctgcccaatcaccgccttcatcgaaagggtgacatcgccgttctcggtgtagtaggccatataggccggctgattgatgaatacgtaccgatccggaaactcctgcggcaaccatcgcagctcctccatggcgacaatcaccttgttcttgttgacggtcgtatccccgccctggcctgatgttcgcaaccagtgcaattcggcggcgagctgggcaaactttggactgctcggcatgaagcggtcgaccgccgacgccaggttttgcgctgctgccaactgagcaagcgtcgctttcaaatcgacgggcttacgcttgaagtcataatagttcgacagcttgttcggatcgatgcgccccctgaaattatcctggagaaacatcagcatattgtttgagagggacagttcgaacgctgccaaagctttggcgcggtcgggcgaattctgctgcaaagtctccggagatggcgaaacggcatagtccgaaacggttagtccccaatcgtcggcctgccgcaagaggtcaagcgcttgcctcgccttggcgttcggtcccttcgcgtcagtccagatgagctttgttttcggctgaccataataggcttcaagcgcggcggcaatgtcgctgttcatcgatggagaaaggccagccatctcccgcaggaccttggccgggtttccagccccgctttcgaacagcgtcgacagcgctgaatcgtcaccgtgaccggcgacatgcacgagccggcgctcgggaacggcatatcccttcgaggcggagagctgcgcagcgggcgcggcgggctgcggctccgcacgggcgcctatcccgcttgccataagcgcgaccacgctcatcagagtgatcttcaggcgtaaagctgatgtgtctgccattccaaatatccccagcactcgacgagaaaagccactccggatgagcacactatcttcgcttgtcgtcaccgcggactagagcggcaacattcaggcggaagctgggcaaaacgccatcacgagaggttgaaagcaggaccacgacaaaaatgtcacgcgtatgaaatgcaggcgcgacagtatggtgggcgggtcatcactcaggtgaatcgttcaccctcgattgattcataagtctcgttggacgccagcacctgcttccccgattctaggggcatgatcgctcagctatatcatcaccatgtcgaacgcacggacgccgagaggaacatggcccggtattacatcatgaagatctccctggcgctattcggcgagatccgcctgacacgcagctggggtcggattggccaaaatggacaaaccaaggagcaccatttcgagcgtgagacggagcagtcggtctgtttctcgcgctcgtccggcagcgggcacgcggttatcggccgcgtgtcgcacctctcagcccatgagaccgggccgcggctggtcgatttgacgccgtgtcaggcgccacactggcgacgcctgacacgatcataggctcagaagtcttcccaggctttgtccacgaccgctaccgcggccggccggccatcacggcgccaggatatgatttcatcgtgcatggatgcagtcccgtcttatattgctgtcattacacggcatgctcccgtcgaatgcaaaagtctgcaaaacctgcgatgcaaaggttaggtgtatcgcatcccacgtcatcgtcggcgacactccgcctctgaacgatcgtgcgcttcagcgatattcggtcggatttaggaaatccctcccaaaagcattctcggacgtcgttgatatggttcccggataggccacgaacgccaagattttacttctaaacgtgcactccgggctttcggatgattgagaacagtgctatttgtggctagacagcctagctagattggagcaaattcatggattggcagctgcaggacgctaaaaaccaattttcgaaagtagtgcaaaaagcccgctttgaaggcccgcaagagataaccgtgcgtggcgagcggacggcggttgtcttgtccgcaaaagactatgacgctttgcgcgcagggcgaccgactttggtcgatgatctgcttgccggtccgccttgggatgacgccttcaccgacgcggtcgacgcgcgggctaaagtctcaagccgcgacgtggctttctgatgtatctagtggatacgaatatcgtctcggaggcaaggcggggcaccccgcaggcagtgtcctggctgcgctcggtcgatcctctcagcgtccacttgagtgcgctgacgcttggtgagatcatgcgcggtattgccttgaaacaaaaatcagatcccaaggctgcggcacatcttgccgaatggctgcgcaagctgcgccacgatcattctgaccgcatcctcacggtgaccgacgagatcgcagtcgaatggggccgcatcgccgcgatccgtccgcgcggagacatcgacgggctgatcgcagccaccgcaatcgtccatgacctgatcctcgtcactcgcaacgtcaaggactttgaggacacaggcgcagccgtgatcaatccatgggaagcgtgagatgagcgacatactcggtggagaagctgtggcggacgagccttccatttccagagcagaaatcccctcccctgccccacaaccggggtccagcctgtcaggccagctgcaagactcaccgatcgcgctcgaagctacgtcgaggcagccagctcgatcaacacccgaaaagcctacgcatccgactggaagcatttttccgcttggtgccggcgctccaatcttcggcacggccgaacgcggcatgaaggcgaattctgtcgcgacgatcgagcgtcgtctctcgtcaatatcctggaactatgcacaacgcggtctgagccttgatcgcaaggaccggcatatcaccactgtcatggctggcatccgcaacagccatggacggccgccggtccagaaggaagctgtcatggcgacagacgtcatcgccatgctagaaacactcgatcgcggcactccgcgtggtgtgcgcgaccgggcgatgctgctggtcggctacgcaggtggacgccggcgctccgagatcgtcggcctcggtctaaaggtggatcagaccgaagacagccgtggctggatcgaaatcctcaataagggcatgctcctcacttgcgtggcaagaccggatggcgggaggtcgagatcggccgcggctcagccgatgcgacctgcccggtcgccgcagttgagacctggatcaagttcgccaagctggctcatggcccgctttttcgccgggtgaccggacaaggcaaagcagttgggacagaacgactgaatgacaaggaagtagctcggctggtgaagcgggccgcaatggcggccggcgttcgcggtgatcttagcgagatcggacgcgccatcaaattctccggacattcccttcgcgcgggcttggcctcctccgccgaagtcgacgagcgttacgtccagaaacagctcggtcatgcttcagcggagatcacacgcagatatcagcgccggcgggatcgcttccgcgtgaatctcaccaaggcatcagggcgttagttggccctcccctactccgcagcgaaatcgaaagaggagatttcagtgccgaattcctcgcttagcgcttcaattgaaatcgggagctaaaagccacagccgtatcgccgcgtgcaagagatgtcatgcgctcgcgcaatctcgcgatcggtgcggtaatcccgcgcgcggacaccagcagggccgccgcgatacttgccgcgaagatgagggtcagcatcgtgagggagatgaaaatcgtcgagcgcgtctgctgggtcagctcgttcgctcgcgcattgatattcttcttcatcaatgtcgtgagatcgcgcatatcggacagcagcggcctgatcaggatatccgcctgcgccagaatcgctagcgcttcggctgcacgcccgcttcccaatttgacggcggcatcggtcttggcgatcacgtcattcgacctcgcgatgaaggcatcgatcgcctcagcatcctctggacgaccacccttggattgctggaggcgagcgatcaggctcccggcgttgtccttgtaaaagtcgttcgccgccttgaaggccggatcccgagcgtcgtaggcaagcgtctggtaggccgcgtaaccgatggaaaccaggcttcgcgtggaggcgacgaggtcgacctctgcctgataatcttgcgcgatgaactccgaataggtggaatcgacggctttgaatttatcggacatgaagagcgtggcgccgatgcccgcgacgcagatgggaatgacgagagatagaattttcgtgcgaatgcgcgcgtttttcagaaacgacatgtgacctctgtttgacgggatcgagtgtcacgaggccgcgaattcccattcgacagcacaacggcgccggcacaacggcacatgacgtgccgaagcgatgcgtatcgtcacgccatgcagggataggtcaatggtttcttggccgccaatccactcatcgatcgggtggggatatcgacatggcagagatcttggccatcatggcgacttgagcggcttctactagttacaaattcggctcaaggctaaggtttccagtatgtcttagaggcaaatcgaaagcacggcgtagcatgcgccatgcctacgcttaaatcatctaagcaaatgcaatctaggactatttactagttgtgagagcgtggccgcgcaatcagtctttactggaatcagttttcataaaaattgaaccaacatgcatcttcccggcatctcaaaacgatgccaggacgcggctaatagccccgatcgaaatcgatcccgtcgggcgggacgccggtcgcgcggtattcgtcgatcctgttggcgacgatctttgccgcggtcgacgggttggtgggcgccgagatatgcggcagcacggtcacgcccgggtgatcccatagagggctctgctcatcgagtggttcggtctcgaagacatcaagcacggcatgcttgacagcgcccgcatcgagcgccgctatcagatcgagcgtcttcacgatgtggccgcgcccaaaattgatgaagccggcattcgccggtagcagagcaaattcacgcgcgccgaggagccccgtcgtttccgccgtcaacggcagcaggcagaccacgatgtcggacgtcctgagcatggcgtccaagccgtccgcgccgaaataggtctcgacaccgtcgacctgcttttcggtccggctccagccgctgaccgcaaaacccgccaaccgcagttgtcgtgcggccgcgcggccgagcgacccgaggcccagcaggccgacccgcgtgtcgggtgccgaccgatagggaagctgccgccaaaggctttggcgttgctgcatgtcataggcgggcatgtcgcgggagagatagagggtccaggcgagcacggcctcggccatggtgcgcgcgagatcaggatcgacgaggcgtacgatcggacgtgagaggcccttgagttccaagaccaaccgctcgacacccgcccagaggctgtgcacccatttcaggttcggcagccgctcgagatcggcggggtcgggattggcgacgatggcgatatcgacgcggccgagctcatccggcgaaagctgacgaatggaacggatggtttcttgcggcgtggctgcgctgagcgccatgagccagttgctttcggctgcttcggacaagcgcgtgacaagcgcgatgagaggcgacatcgatctgctctacatggattgcccggcgtgaagcctggcggcatcagggaaaaatggccgggcactttcggtgcccggccatgcgatcattactgaatggtcttgatcgggtccttcggcgtcggatcgaagccgaccagatcggtcgtcagcttggcgtaggtgccgtcggcaaccatgtcggccagcgccttgttcacggcctcgaccagatgcggcttgcccttcttgaaggcgaagcccttttgaacgtggctgacataatcgtcggtcacggtcagcggcatcttcgcggacttgatggcgtaggcggcggcgatcgcgtcggtgatgacggcgtcgacgttgccgttgacgaggtcctgcatggcgtcggattcggccttgtagcccttggcggtcgcgcccttctcctcggcgatcttcgtccagctcgatgcgacgagcgcaccgaccgtcttgcccttgagatcggcagcgctcttgatcgcggaatcgttcgggatgaccacgcggccgccggattcaagccagccgttcgagaaggtgacctgctgctgacgggcttcggtgatgtccatggcggcgctgatgacgtcgtactggtcagcctggaggccgacgagcagcgagtcccacttgatcaggacgggcgtgtattcgaggttgaggcgcttcgcgacttcggtcatgacgcggatttcgagaccgtcgagcttgccatcaggcgcgcgcatgctgaacggcgcgtaggtgccttcggtggcgaccatcagcttgcccggctgaagcagctcgaggtcggcggcgtggacgatggagctcacggccatgcccgcaagggcggcggcggtcatgatgagagacttcaatttcatggtcagttcccttttatgttggttcggtgcattcacgcggcgtcgcggcgccggttttcgttaacccttcgcctgagcgcgttgggaagcaagcaaggccatcagttccgccatcacggtcgcggccatcaaggcggtgatctgtcccggcccatcgtagagcggattggcctcgaccacgtcgcaaccgacgaggttgatgccgtggagggcgcgcagaatctgcaaggtctcgcgcgccgtcggcccacccgcctctggtgtctggaccgcgggggccgcggacggatcgatgaaatccatgtcgaaggaaatgaaggccggccggccgtcgacacgataggcgatgcgccgggcgagacgatgagggccgagatcgagtgcgtcgtcggtcgtcagcacgtcgtagccgagatcgatcgactggctgatatcgtccttttggaacagcgagccccgcatgccgatctgaatagagtgcgcgggatcgatgatggcttcctccgcgctgcggcggaacggggttccggcgctatacttcttgccggcgaaatacttgtcccaggtgtcggtgtgggaatcgaagtgaacaagtgagatcgggccatggaccttggcgagcgccctgatctcggccagcgtgatcgagtgatcgccgccgatcgcgaaggggacgatgccggcattgaccaatgccgcgacagattcctcgatgcgctccaaggattcgatctcgtatcccggcacgacgttggcgtcgccgacgtcagccacggcaagctcttcgaagacattgatattgccgcgatagggattgatcggacgcagcatcaccgacatggcgcgcaccgcgttcggcgcgaagcgcgcgccggtgcggtatggaccgccggaatcggagggaagtccgatcacggccgcgtccagcccgctcaatgtcgttgcctgcggtaggcgcatgaaggtcgggacaccgcaaaaccggggcgtttcaagcgagtcgatcggcaggacactcatggctgacctcaacccaggttggcatagcgtcgctcaagccaggaagcgacgaatgtaaggatcgtggtcaggacgagatagatgacggctaccgcgatatagaactcgaagggacggaaggttgccgcgatcagggtctgcgcataaagcgtcagctcgacgacggtgatggtcgaaagaagcgaggtgttcttcagggttgagatcgcctcgttggtgactgctggcaggatgatgcgaaagacctgcgggaggatgatcgtgcgcatggtctcgctcgggctgaagccgagtgccagcgccgattcattctggccgcgcgggatggcgttcaggccaccgcgtacgatctcggcgatataggcgccgctgttgataccgagcgcgatgacgccggcggtaaacggcgaaagccggatgccgatctgcggaaggccaaaatagatgatgaacacctggatcagcgtcggcgtgccgcgaatgaaccagatatagaagcccgccgccacgcgcgcggatttccatttggaacgctgcgccaaggcagccagcagcccgcatgcccagctgacgacgatcgtcaggatcgtcaggccgaagaccgtccaggcggcttcaagaaaacctggaccataaagctgaacttcttcgataaaaccgctcattacgcctgcgctccctgaccttgatcgttcgagaaggaatgaccaacgtcgtcatgcaggatgcgatgaaggaactgcttcaggcggtcgctttcggggtgcctcagaatatctggcggcccctcttcggcgatcacgcccttgtcgaagaacaggacacgcgaggagacgtcgcgcgcgaaggcgatctcgtgggtaacgagcagcatggtcatgccctcggacgccagtgatgccatcaacacgagaacttcgtggacgagctccggatcgagcgccgaggtgacctcgtcaaacagcatcagccgcggcttcatggcgagcgcacgggcaatcgccacgcgctgctgctggccgcccgaaagtcgcgacggatagctatggcgcttttcgaacaggccgatccgcgacagtagagcctcggcctcctcgatcgcccgcgcgcggggcagcttcaagagacggatcggcgcgtgcgtgacgttttcgagcaccgtcatgtgcggccagagattgtagctctggaacaccatgccgacgcgcgctcgcaaggactgcagctgcgacggcgtgggaaagaagcgcgaggctggacggaaatcgaaagacaggccctcgaactccatgaaacccgattgcggcatttccagcgcgttgatcgagcgcaggaaggtgctcttgccggaaccactggcgccgatgatcgaaacgacctcgcccgccttgacgtccagcgagacgccttttagcacctcgttgtcgccaaagctcttgcggatttcgcgcagtttcagaagctgctcgctcatgccgacacctccgacggataggtatcgaggatattgaccgccacatcgcgcggggtgcgcgcggcgccgttgatcggcgtgatgtcctgcggacaggccgacaggacgaagatcagatccatctcggcgcgcatgacaacatagtcgccggcagccgtatcgggcggaacgcgatcgacggtgccatcggaagtaacgggcacattcatgaagaggttcaacgacgcgggcgtgaacggcatgtcgatgcccacgtcggagagcgcctcgtggaagttgtcggtgcaactgcgatgatactcctcgcatccgagctgctgatagagctcgcgattgcacgggcaaagcaatgtgtcgtgcctgaccctggcgctgtcggcgaccattgtcagcatggggcggcggcgtgaactcatcagcgccatcccctcggtgaagaagatgttgctgttcatcgaacgcgtgtgatcgagcgaagacgtctcgaagtgatcgctgtcagccaacgcccaagcatcgacaacctggttgccgtgggtgttcgtcaagagggcaaattgcccggccttcatcttgaaggagcgtcccctgctggcgggcacgatatctgcgtctgggctcatttcaaactcgtctttcttcgatgcgatcggcattgagtgagggtcgatcgatcaagtcccagcaaccctattcagtataccagtggagttcaagtagcaatttcaacaaattacagcccacataatcggcttcgtgcgtgtaatttaagcagagtatgattatatcatgagcacatctcgtgagctgatgctttaattagcagaaccgcgcatcgctcgattgacgttcggatactcgcggtgtaccgaaaatcaaggccttaccgcgaaagtgcatacggagtgacatgatggatcgctattttccgctggacgaatacgaggcgcgctgggatcgcgttcaaaacgagatgaagcggcgtgggtttgccacgacggtcgtcttcggacgcggcggcggaacgaccgacaattgcggcgacattctctacctctccaaccactatgccatcagcagcggcatggactcgttgatctggaccgcaagatccttcgcgggcgtcatcttacaggaaggatttgcgccgcagctgcatatcgacgagccggaagttcgtcgcgatctggtatcgatcgatgatgtgctgagcagcaatcatcccttcgaaagcgtcgcccgctcgctcgtcgaacgcggcgtgaagggccccgtcgcgcttgttggcaccaacctgatcccggtgaaatactaccgcgagttggaagccattgcgcccgatatcgaatgggtcccggccgacgaccttgtcagatccgttcggcggatcaagagcaagcgcgaactcgactgttatcgcgtcgcgggcgagaccgcgacggcgggaatgacgatcctgatggaaagcctgatcagcggcatgtcggagcgtgaagcggccggcgaggccgctcgcgaggtcgtccgccgcggtggccgcatccagatgatcggcaccaaccatggcgacacgctaggcttcgatcagcgcttcccgctcacgggctacagcgccgacgtgcctgctatcggcgacatcgtcaccggcacgcttcatggcccgctgtttcagggatattaccttgacccgggccgtacggctgtgcgtggcaaggccaacagcgaacagctgcgcctgatcgaagccgcgggcaacatcgtgcaccgcttgtcggatatgctgagacccggcacgaagctgcttgacgtcgcggccgaaggtgatcgcatgacggcggcattcggcggctcgatctcgccgatcatgaagaacttccccttctatggccacggcatcggtctcggcttcgagttgccgcgcatctcgacgaccatgtcgatgcctgaagatgtcgtggaagagaacatggcattcggcgtcgaggcgtttctatcgctcgacggcgttggtgctgccttcttcgaagacatcatcatcatcggcggggatggcaacgagctcctgacgaagtcgccgagcgtcttctagactgagcgacaaccgcgacctggataaaaaaggaccgggcgagatgatcgcccggtccttttctttttagtgcgcgaagacgctgtcgaagtccttgaagcccttgacttcgatcgggttgccgctcgggtcgaagaagaacatcgtccgctgctcgcccggctcaccctcgaaacggacgactggcggaatatcgaaggcgatgttgcccttttgcaggcgttcggcgagcgcgaaccaatcatcgagcggcagtacgacgccgagatgcggcatcatcaccatgtgatcgccgaccttgccggtgcgcgtgacctcgaacggcttgccgaggtgcagcgagatctggtggccgaagaagtcgaaatcgacccaggtatcggtcgaacggccttcggcgcaaccgaggacgtcgccgtagaagcgtctcgacgcgtcgagatcggtgacgtggtaggcgagatggaagagtgagcgcacggtggtctcctttgtgatggcgatatgatcttgatcagcgaatggtgagggttctgggcaggctcgatagcggctcggcgccgtgttcggtaacgatcaccgtctccgacgcaccgaccgtccaatggccgtatctgcgaagcgtggcaggcaggtggaacaccatgccgggctcgattacgcgcgagacgccggtaaacaggctgaggatccccccctcgccccagtcgggcgcgaaggcgacgcccatcgagtagccgatacgcttgcgaaacgcgacggtgtagccggcctcgtcgatgacgctctgtgcggcctcatgcggcgccgaacacggcgcgcccgggcggatcgccgatagcgcggcatcaagggcgcgcagcgagcaatccatcatccgctgtgcgtcatccggcgggccgccgatccagacgctgcgcatgagcgcggaatgataacgggcatggctgcccgcgagttcgaggaaaacgggatcgcccgcttccaacaggcgccggcgccaggtcatgtgcggcaggccgctgcgtggtcccgacgagacgagcggctccattgccatggcctcggaaccggcctgcgttgcggcccgcagcatggccgcggcgatgtcgttttcgttggcgccaccacggcaggcgtcgatggccgcgatcatgcccgcttcggcataacgcgcggcagcacggatcgcggcgagttcatcggctgatttgaccatgcgcaacggcggcaggatgtccgagccatccgcaagacgctgctgtccaagctccctggcgatctcatccgcgagcctgggcggcaggaaccagccaccgagctcgatcgccggccgcgtgatctcgcggtctcgcagcagtgccaccagcgccgagacagggctctcgccatcctggtagacgacgatgtcggaaagccaggtattggccaccgttccgtagagttccagctgccgcaccagcagcgtgagctcgcccgatgccgtgaggatcagcgcctgaaacgcgaagtatccggcggtttggcgccctgtcagccaatagatcgtctcaggcccggtgacgacaagcgcctcgtggccgctggccaccagcgccgacactgcccgcgcctgacgcctggcgaattcgtctcgcgagaacgaagcctcgcttccgcgaagagcgtccaggccgtcattgggtgccttggattgcattttcattgcctcagctccgcgccagccagcccaggaagcgggcgcgcacgctgtcgaagtgggcctccatcgctagtcttgcagcgacgccgtccccggcttcgatcgcatcgatgaccgcgatgtgctcgagcgcctgctggtcgaagcggtcgtgtgtgcgggtgatcgtgcagcggcgggcgatgccgcgcatctcggtcagcatggccgcgagcaggggaagctcggcggcatgggcgacagcattgtgaaatgcatcgtcgtcgagccagaagtgatcgaaagcgatgtcgccgccattggcgtaggcacgcatgcgttcgcgcgactggatgagatcgggcgtgagcggtcgcgtggccgctgtctcggctgctgctccttcgagcaagcgtctgagctggacgatctcaagcagctgctccacggtcacctggcgcaccatgagcgcgccgttcggcagccttgagatcacgtcctctttttccaggcgggaaatcgccgcgcgcagtggcgtgcgggaaataccggagtcctgcgcgagcgaacgttccgtcagcatatcgccggaggaaaactgcccttccaggatacgctgcttcagatcgcgatagacctgttgtgtcaggttttccttttcactcatcgtgaaccgcccgtctcaccggcaatcgcggcgtacaagatttcgactgccgcggccaaatccgcgttgtccatggcttcatcgggattgtggctgccgttccagttgcgcaggaacaccatgacggagtcccagcccgcctgcgcgaaggctgccgcatcatggccgccccccgacagcatccggcgcggggagtggccgagccgtttcgccgcgtcggcaatcatgttgccgagatcagtcgacagccgggtcggctggctgcgcgactgttgcccgaagtcgaagcgcacgccacgcgaggccgcgatcgatgccgcctcggcccgcagcagcgcatcggcgcgttcgagaaccgcgacatcgtcactgcgcagatcaacgcagaaatcgacgcggcccggcaccttggcgaaggcgtgttcggagctcgccgcatcgacccgaccgaaggtgacggcgagatcgtcgccaccatcgaggatctcaccccagtgcttgtcaatggcaacgatcagatcggccagcgcgaagaccgcgtccgagcgcgcggcgcgcggcgctccgcccgaatgcgcccatgttccgtcgatgcgcgcctcgcgatatcgcaatccgccgcgtacgccatcgacgatgccgaacgcttccttcgcgtcgtcgagcaccggcccctgctcgatatgcagctcgatgaagcgcgccggcgaaaggcccgggccattcaaaatcgcattaggatctccgccttccgcgcggatatggtcgccgagggtccggccgttatcggctcgcttcgcctgcagttcaggcgcggtcaggcgtcccagcgctgcccgcgagccggcgtaggagacaggaaaccacacgctttcctccgcgcgcgtcacggtaacgacaagatcgaccggcggcgcctgcccgctgtccacgaaggcagccgcaagcgcaacggcgccggcgacgccggccgcgccgtcataagcgccgcccatggaaaccgtatctacgtgcgagccgatgtagatcggcggggcgtcgcgatcacgtcccgacaggcgcgcgaagagattgagcgcggcgtcccgggtcacggtcatgcccaggcgctctacttcctcggcgaccacttcatgcgcgcggctttcgagtgggctgtaggatgggcgggtgaagcccgggccgggatcggagatggcgttgatgcgatcgagcagtctatcgatcgtgtccctgatgattgcgctcacgcggatgcctccggtagaaattcaatggtcgtggccggcttctcgccggaaagcgccaggagcacattgcgggcggcgccgaccgcgacccgctgcaacgcctcgggcgtcgtgccgccgagatgcggggtgaagatgacgcgctcggtggcgcccagtggaccgctcggtgcttctggcgaatagacgtccagcgcggcagcggcaacgacgccgctcgcgagcgcctcggcaagtgccctctcgtcgatcaagccggcacgtgccgtgttgacgagaatggcgcccggtttcatggccgcgaaagcaattttgccgatcattccgcgtgtttcctcacgcatgggggtgtggagcgagacgacatcggcctgtgcgaggccctcggcaagcgtgcccgctcgctggaacgaaccggtatccgcgcttctcggcgaaaagacgagaacccgcatgccgagcgccgcgtgaagcatccgccccaatccggcgcccgtcgcgccccagccgacgacgaacgcggtcttgccggacaattcatgaaacgtatgggcctcgcgaaagccgcgctcaccggaacgaacagcacgatcggcggccggcaccagccgggccgcggcgagcataagccccaatgcgagttccgaaaccgatttcgcgttggcgccgggtgtattgcagaccagcacgcccttctcatgcgccgcgcgcttgtcgaccgcatcgtggccggcgccgtggacgacgataaccttcagacgatcgctcgcgagaatgggcgcggccggcaggcccgcatcgcgggtgatggctgcgtcgcagcccatgatcatcgtcgatacggtctcagcatccggcgacgggcacaagacgggttccacgcccgcctgccgtaggagatcaaggccacccttgtgaatgggctgaacgatcaggcacttcatcgcgctgctttccgctcgttgtgttcaagccgcccaacgattgcatcgcgggcattgaggacatgtcggctcatcagttttccagcctgctcgccggccttggcgcgcagcgccgcgatgatttcgaggtgctcctcgcagcccttcagatagcgtgcgggaacgaggctgtggtcgaacatgcaggtccggcgcctgagatcgctgatggtgcgcaccatcatctcgttggacgtggagcgggccagcgtcagatggaaatcgtcgtcgacccggcgctgctcgtcttcctcgcccggtccttcggtcatcagggcggtcacacgccgttcgagattgtcgaggatagcgggcgcgaccgccgtcgcatggcggcgcaatagccttcgatgacacttctgagaaagaagatctcgttcacctcgcccggggtcagcgtgcgaaccttgagaaagcgcccgtcctgaacggcaagtccttcggcctcgatacgcttgatcgcttcgcgaaccggggtgcgcgacatggcaagttcctcgccgagcttcgcctcctgcaagacgtctccaggcttcagcccgccggcgaggatcatctcgatgattttcgcataggcctgcttggcaagcggttggctcatgtttgtcggtcctccacctttgccgcgtcccctggtttttcctcgagagaagcaaggatattcgcgagcgcgttatagcgcgcgatcagcaaatcttccgcctcttcctgtgatatggatttgaagcgaatggtgctgcccgtcgccgtctgcgccaatcttggcaggtcgaccgaggcaacggtcgcgatcttcgggtagccgcccgtggtctggcgctccgccatcagcacgatcgggcgcccggacgacggcacctggatcgagcccgccaccgtcccatcagagacgatatcgtgaccggcgaaggcacggatggcgggaccatcgagaacctgcgccatccggtcccggcttggggtgacactaaagggttcccgcaggaaattcttccaggcggccgcgtcgaaatgatccgcctgcggccccggaacgacgcgcaccggaccgttcgatcgcgagaacggcttgcgcaatgcaaggagcgaagacttcttggtctcgccaagcggcagcgcatcgccgatcgcaagacgccgtccgtcaatgccgccgagaccggagcgaagatgcgtcgagcgcgcctccaaaaccttcggcgtatcgatgccacccgagatggcgagataaccccagacggcccgccgcagggcgccgatcttcagcacctcgcccggcatgagccagtggctttcccaaccatgcctgagctgaccgtcgacggtgatatcgatggcgccgccggttaccgcgaaacgcaccggtttttcggccacgaacgccccgccgacatgcgcgaactccagcgccgcgtcactatccgcggcgccgaccagccggttggcgatcagcatcgacgtcgggtccatcgcaccggcgccggagacgccgaggtgcatgagcccggtgcgtccgagatcctggaccgtcagcatggggccggcttgcttgatatggagcatggtcatggtgcctcccactcctccaccgcctcgcctcggctgatggcggcatcgaggctttcggcctcgtcggcgccgacaggacgaaagcgcacgcgatcgcccgcgcgcaaaaggaatggctgaggtcgcgagggatcgaacagcttgagcggcgtgcggccgatgaagcgccaaccgcttgggccgggaacggaattgatgctggcctgcttgcctccaatgccgatcgcgctcgcgtcgatccgctggcgcggaacggccaggcgcggtgtatgcaattgccgaggcaggccgccgagataggaaaagcccggcgcgaagccgatcatatagacgcgataatcggcggacgcatgcaacgcgatcagctcctcgcgcgacatctgcttcatatccgcgagttcatcgagatcgatcccgacctcctcgccataaagaacgggtacggtgatccggcgcgcggttgcgccgcccaccgacagctggccaagcaatgtttggagcgaagaggaaagcgtcttcccgcgtatgatgacgggatcataagcgacaaggagcgaacggtaggttggaacggtttcgatgacgcctgttatcggccgcgtcgccagcatgtccgccaaggcaatgacacgctcattcgtatattcatcgatctggtcggagaattcgaccaccagcgcactgtcaccgcacgcgataatgcgcggatagttgggatggaccgactgcatcatggccatgggcgcgactttacctgcaagaagggcgcggacgcggtaacatgccgctccagaggcctaggtgccgagcgcaaacggaaagcgagagatatttccaccatcaccatcaaacacgtctcgacaagcgagattctcaatcgacaatgcccttgtcatttcagtacaccaactgtatgtcaagcactatcacaccctcagcggcgattgacgaatggccggcggcgccctcgcgaacaaggagttcagccatggtatcagtagatttgaactgcgacatgggcgagagcttcggcgcctacaagatcggcgacgacgcggccatgatggagatcattaccacggcgaacgtggcctgcggtttccatgccggcgatcctattgtcatgcgcgacacgatcctgaacgccaagaagcatggcgtcgccgtcggcgcccatccatccttcatggacctctacggtttcggccgacgcagaatttcgggcgagcggcctgaggatatagaggcgcagatcatctatcagatcgccgcgatccagggcatggcgtcggcgctcggctggccgatcactcatgtgaagacgcatggctcgcttggcaacatggcggccgaggatgcggaactggcggcggtttgcgtgcgcgccatccgcgccgtcgatccgaacctcgtcttcatcaccctcccctattcgcggaccatgcgggccgccgaggccgccggcctcagcgtcgcctgcgaggtctatgccgatcgcagttatctcgaaaatggcatgctggcgccacggcaaatggagggcgccgtcattcatgatgtcgaccaaagcgtcgaccaggtgctctcgatggtctgcaacaacaagattccgacggtcggtggcgcaagcctcgacgtcaccgcggccaccgtctgcattcacggcgatacgccgggtgcggcggtaacggcgcgcgccctgcgtgacaaacttatcgccgctggcgtggatatcgcgcccttttccaagcctgaaatctgaacgaggactgatcttgacccgcaccgtatatctgaatggcagctggctcgccgaagctgacgcgaaagtctccattttcgaccgcggcttcctgttcgccgacgcgatctacgaagtcaccggcgtgatcggcggcaagctgctggagtatgccggtcacgcggcacgcctgcagcgctccacggccgaactgggcatcgcctgcccgctgacggaagacgaactacttgaaattcatcgcgagatcgtccgcaggaacgatcttcgggaggggcttatctatctgcagatttcccgcggcgccgccgaccgagacttcgccttccctgagaacgcaaccccgacgctggttctgttcacccaggccaagtccgtgctcgacaacccgaaggtcaagacggggatttccgttgcgctcgttcccgaccagcgctgggctcggcgcgacatcaagacggtccagctgctctatccctcgatggcgaagatgcaggccgcatccgtcggcgccgatgacgcctggctggtcgaggacggcttcgtaaccgaagcaagcgcggcaacggcacacattatcagcaaggatgggacgttgatcacgcggggcctgtcaaacgcgatcctgcatggcatcacgcgcctcagcgttctcgacatcgcttgcaacgccggccttcccgtcgaggaacgcgcgttcacgccagaggaagcgaaggatgccaccgaagccttcatcacctcggcgaccaacttcgttctgcccgtgacctcgatcgacggacaggcggtcggcgacggaaagcctggaccccagacgctgaagctccgccagctctatatcgaagacaagctggcaaacgccatctgacccatcgttgtcgcccgtttacgggcgacaaccgctatttcgccggtgtcggctcgccgagcgagagcatgaggcggttcgcccagttgaagaaggcggcgccgtgaatgacatcggcgatttcgagatcgtcgagaccttccttatgcagctggtcgacctgctccgcgccgaatgctggcggtgtcgcggtcaaagccaccgaggccgcgaccacggccttccaacgggggctggcgagatcggcgccggtgcctttgtcaagcagcctctgaacctcttcagtgcgcttcgaatgatgcgacgcaaagcgcgaatgtaccgaggcgcagaagatgcacccgttgctgcgcgaagcggccgtggcggaaagctcacgctcggcacgcggcaaacctgcctcggtattgtagaaaatgtccttgtcggtcttggtgcgggcttcgaggatccccggatcgcgcgcaaggagcatgaagtacggagacttcgaccgagaggcgtcaacgaggccggcccagtgccgttcggtgagctccccctctgaaagcggctcaagccagggcgtccagccgattgcttcctgggtaaagctattcgggggattttcaatccgcggatgaatgacgatatcggtcatgacgagctcctcattccgcggccgcgcgtggagcgcgcgcctgtacggcggtgccgagcgccgagagcgcggcgacgacacggatctggaaagagaggaaggcaacgagttgcgagagggtgacgatcgccgttgtcgtccatccggcgtcgagcagcgtctgcaaggcatccgggctcgcctcgcgcggtcggaaaacgaggagatgcgcgtgctccaaagccgccgacagtctggcgccgaaaacggcgcggccgaaatcagataccgcataggcaggccccgacctgtcttcgacggacagcggtccctccggataatgcccgtaggggccttccgccgcggcccggagcaattcagtcctcaccgctgccacaagtgacgcgccgccactggcttcactcaaaccggcgtagaactcggtggcacccgcggcgcgatgcaggccggcaacaaacgccgcaagcgcaagccgttccgggcgtgtgacatcgatctcactcaccgggtcgaagagcgcgagataactcttctgcgcgttgatgcgcgtttccgggcgctggttgcggatgcgatccagaaacgagcctggctcgattgccgccagaagatcgataatgtcgggtgtctgcgcactcatattggttcctttcttatatcgtcctaaaccgtggcaaagcgtcgttcctgggttttcgtttccgagatccagccgagcgcgggcgcgacgtcgccggcgatcagttccagtgatcgcaggatgtagtcgtgcggcggatcgacggagtggacctggaagacgagatcggtgacgcgctcgagcgccgtgtctgctttcaaggaggcgatcacatcctctggtgtgccaacatgaacgtcgaacgcccggatgagatcttccgtcttggtgctcgcaaccttgtgtccgctggcgatgaagcgctccacgccgcgctgaagccccagttcggcgaattgaagagcctgcttgcgatcatccgccacgaaaaggcttcgcgatccaagaatgcgcggcaccctcccccgcggcaggttttcgagataggcgtcgatgatcgggttttgcagctcccagaggggcgtgtctggggcatcggcggggcgcggctgcgttcgggacaacatcagcccatcgccatcgcgccctgctctgtcgccaccaccaacagagaaggttgcctgccagacacgatccagaagatgtggcgccgttggatagagccggctacctcctgcaagcgggcgtcccgcccaggcgtctcgaacggttgccaggctcttggcgtagacggcggcccgcgtgctgctctccagtccgaagggcaggaaggacgacggcgttccacccgtcccgaagccgatctcaaggcgattgcttgagagaatgtcgaggacggcggtatcttccgccacgcgcacggcgctttccatcggcagcgtgatgacgccggtcccaagcctaatccgcgaagtccgggccgcaagctccgccaggaaaatcagcggcgatggcaggccaccttcctcgccatcgaagtggtgctgcgccacccaggcgctgtcgaatccgagtttctcggcatgaacgatctgctcggcaaccagccggtaacgcgtggccgcatcggtttgatcgagcacgcggctgaaaaagcccaggcgcttgggcgcaattgccttcgtcatcgtttgcttcccgtattcgtcaaggtggatggccgccgtgccggggcgaatgtcttgcccggaatcgcggcgatgagttcgcgtgtgtagtcgctcgcggggttgccgaagacctgatcgaccggaccgctgtcgaccagctttccgccgttgagcacggaaaccgtgtcggcgatctggcgaacgacggcgagatcgtgcgagacgaaaaggtaggtcaggccgagctcgcgctgcaggtcgccgagcagggaaagaatttgcgcctgcaccgtgacgtcgagggcggaaacggcttcatcaagcacgaggattttcggcttcaatatcaaggcgcgagcaatcgcgacgcgttgccgctgcccgcccgacagcgcttgcgggcgtctgcccagaacatcatccggaagcccgaccttggcgatgattgcctcaacccgcgccatccgctcgccacgggccaccggctcgaagttcaaaagcggctcctcgacgatgcgccggatcgtctggcggggatcgagtgagccgtaggggttctggtagacgagctgtatcgtcttgcggaacagccgcaacgtctcgccgcgtagctccgaaagcggcaggccgtctatgaccaccccacccgaggttggcttctcgaaagccgcgacgatgcggatgctcgtcgtcttgcccgaaccggattcgccgaccagtgcatgggtcgtgccccgccgaaccgcgaacgatatgtcatcgaccgcacggaagcgcccatccccgccgatgccgaagtccttgaccaggttctcgacgacaatgatattgtcacccggttgctcccttcgaggcgtggcaacgatgcgcgggcgccggttgagcgatggcgcatcgaggagcagctggcgcgtataagcgctcatggggttggccacgacatccactgtccggccctcctcctggattctgccgttctttagaacgatcaggcgatcggaacggtccaccgccacgccaagatcgtgcgtgacgagcaggatcgccgtgccatattcccggcggagctcatcgatcaggtcgagaatgtgtttctgcaccgtcacgtcgagcgcgcttgtcggctcgtcggcgatgatgagcgcgggcttcagcgcgatggcgatggtgataagcacacgttgcttcatgccgcccgagagctcgtgcggatattgttgcgcgcgcagcctcggctcgctaaggcccacccgcgtcaggagttcgacggcccgcgcataggcgaccggaccggatgccttgccatggatggcaaggatctccgcgacctgcttgccgatcgtcttgacgggattgagcgagttgcccggatcctggggcacgaggctgatgaccgcgccgcgaatgccatcaagccgcccttgctgccaaccggcgatctcctcgccatttagccggatgctcccggcttcaagcctgccgtcaccgggcaggagaccgatgattgcttgggcggtcgaactcttgcctgagccggattcgccgacgagcgcgacgacttcgccgggattgacgtgaaagtctatgccgtgaacggcagtccgccttccgccatggccttcatagctgaccgtcagcccggcaacctccaacaccggcaatgggtggagcaaattccttggcggatcgttcggtcttatcgtcatctctctcctcctccgattgcctggctgatgcggtttacgcagagcaccacgagaacaacgacgacgccgggcgccgcggtgagccaccacgcggtcgcgatgtaattgcgaccctcggcgatcagcagcccccattccggcgtcggcggcggcgcgccgtatccgagaaagccgagcgtcgacaattgcaggattgctgaaccgacctgcagcgccgcgaaggcgatcaccgaggtcagggaattgggcaggatatggcgccagaggacactcagaaacgtgccgccgctgccgaaggcagcttcgacatattcgctgcgccgaaccgtcacgacctcggaacgcacgatgcgggcaaagctcgcaaccgaggtgatgccgaccgcgatcgcggcgttgagcgtaccgaaacctaggaggatgatgatgctgagggagagcagcagaaccgggatcgacagcaagacatcaaccagccgcatgataacggtatccgtccggccgccgagcgatccggcaagcacaccgagcgtggttccaagagcgagcccgatcgcgacggccgccagagcaccggacagcgaatgaacggcgccgtgcaccaggcgcgtgaagagatcgcgcccgagtgcatccgtgccgaggatatgcgtgaggctgggcgctttcagctgctggccgggtagccccttgatgggatcgtaggatgtaaagagcaacggaacgatagcccacaacagcacgatggccagcacggcgacggcaagcacgaggctgacatcaatacgctgccggcgcggcgcatctgccggatcgccaatgatcttggcatcgtcgatttcaagcgggcgttcggcgacatcaaggcttgtcatcgggcagtctccggcttggctttgagccgtgggtcgagaatgggatagagaagatcgaccagtagattgatggtcacgaaggcggcggccgacagcacgacgattgcctgcagcaccgccacatcctggaagttcacggcctgctcggtgagactgccgatgccgttgaggccgaagacggtttcggtgatcacggcaccggccagaagttcaccaaacaacacgccacccacggtcaacactggcaagattgcgttcttcgccacgtgccgccacaggacaccggcatgcgaggctcccttggcgcgcgccacggcgacgaacggccgcgttttaacctgatcgatattgcgaagaaggatttgcgccagcggtgccgagatgggaacggcgacggcaagcaccggcagtatcaaaccttcccacggccccggattgatcacgggaaccaatctcagacgaaacgagaaaatctggatcaacatgatcccgagccagaaggtcggcaccgatacgaagagcgaaggcaccgactggatgatgcctcgtagcctgccaaagccctggatattggcgaggactgccagcaatagcgcgatcaagacggcgacgacgaaggcaaagccggcgaggcggaccgtgggaggcaggttcgttgcgagctgggcgctgacggcgacgcccgcctgcaacgagtagccgaaatcgccaaccaggaaccgtccggcggtgtgcagatactgcgtgaacacagagccatcagctgcgtacgccgcgcgaatgccggccagctgctcggggctcaggccatattccgggttctggaatttgatcagcacggcatctccaggcatcgcctgcaaaaggacgaaggagatggtgaacgcggcccacagcaccaaaagcgcctgacctatgcgtgacgtgatatagcgggtcataccgatcccttcgcgtgagggtgtgcccggctggcgccgggcaccttgttcagtgcgcggctatccaggtgccgtagaagctcgggcggccgacggcttcgaaggcgacgccattcacataaggggcgccggcgaaggcttgcggctcctcgaagatcgggatcgcgtaagcctggtcgatcacgtagttctggacatcgccggcgatcgccaaccgcttggcgcgatcaggctccgaggataattgctcgagcagaccattcagcttgtcgtcgacgaaggacttgaccttgtcgcttggcccgcctttttggcgaagaacgtcgcggttcttcggataatattggctcttgatgacatcgggatcggcgcggccgaccatcgcaggggagaccggcgtcttggcgggatccaggtcatcgacggtcttgctgccggcgtcgccggcaaggacgttgagcgtcacgccaagcttggcccattgctcggcaaccagctgaagcgtcgccttgttctgtggctggggcggcgattcataagcggtcaacaccagcggctgaccatccttttcgcgaatgccgtttgcaccagccttccaaccggcctcgtcgagcagcttggcggccttgtcgccgtcataggccagtttcggagacagatcgacatagccctgcgcggtggaggcgatgatcgatttcgcccgcgggtagtttgccgagaacaatgtcgagataatctcggcgctgttggtcccgtggagcagcgcctgacgcaccctgatgtccgacacaagcggattgtcgggccggaagacgacgctgttgttcacgccccgcgtcggagcggcgtagatcttgtagccttggctttcgacctgctcctcgtcataggcttgaacctggcggatgaagtccgcctggcctgagagaagcgcaccgatccgcacgctgtcttcgccggtgatgatgtacttgatgccatcgagataggcgcggccctgatgctcaagctttgccggcccccagccgtaatccgggcggaccttcaagctgagctccttgccgagtgtctcgctgtcgacgacgaagggacccgagccgacgatcttcgtcgcgtctcccaactggtcaaacggcaaagccagcgtcttcagcgacacgagtccggatccgatgaccgacgtgccctgtagaaagcccggcgacggcttcttgaaatagaacttcaccgtcagcggatcgataacctcggagcgatcataattgttgatcacctccgacaccggttgtttcagttccttgttgccaagaccgaaagtatcgaaattcttggcgaccgcgttggcatcgagcggtgagccgtccgagaaggtcacgcccttgcgcagcttgaacgtatattcggtcgcgttttcattcactgtccaggattcggcgatccacggctcgatctcgagcgtcttcgggttctggtaggtcagcttgtcggtgatctggttcagtaccccaccgttcggataaaagccgccggccggcggatagaggttggtgtgaggttgctggtccagatagatcaatgtgccgccttccactggcttggaagactcctcgccccaggcgctggccgccgtggccgcgatcgtcccggcaagaagaaggctctttatcgtcgtcgtgaagctcatcgattttccctctgaaacagataggaaaacgataaacggataagcatacagtatatagaattagtattctatattcagcaaactcctgaaaaatcgccgacgcgtccgacacaagccattggaattttaccccgcgatgctgtcgctgatccgtcgcgcgacagcgcgcgcctgtgcccggatatcgggaacagccgtgatctcccagaactgaccggccgtcagcgcgcctaccgcatgcatcggcactgaaccgggattaccgcccacaaccctggaagcctcgtccactccaataccaagctgaagggggtcggccttgatcaaaccctgccgcatcatctcccgcagcaagggcgaatgagcgatgccggcgcgttccacgcccgtacagttaaccagccaatcgcaggtaatatccctcgcatcgtgcgttcctcgcctgcggtagtggagcataagctgatttcccgcctgctcgacgctttgaagatatccggcatgaaccgacacctgaccgctcgccatcatgccgcgaaacctgtcgtaaacatccggcgccacgcgatggcgatgaatgttccaccatgcaagaccgtgacgcagaaatctggagcgctccgacggcggcagccgctgccacaatgcctgcgtcttcggacgcaaggtgtccatgacgctgcgccagtctccggagcggcggctctcgcggcgcaattcgcgcagaagcgcactcatgctgctcggcaggctggccggatcaaaatccgccggtggttttggtgtccttgcgtgcccgtgcggcacaaggccccttcgcgacagcacgtcgatcctgccgcggaacccctgggcaaacaaggcaaggacctgatcaatcatcgtgagtcccgagccgaggatgcagacactgtcatgtgcctccacgcgacgaagccaagagaggcgccagggattttcgacagtcctgtcgtgtgcctccgcggaaagtccagagagcttaacgggcatcggcgcgttgccgacgccgagacatagcaccacgtttcgtccgacgatctcgtcgccattgtcgagcaggaagccaagcgtggcgctatagcgctccacgcagccggtggccttcgcgcggatgaaatcgaccttgcagcgtgatcgcttatcccgcagcagggctgcgagcgtatctcgaacgtagagcccataatcttggcgcgaggcgaaatcgccatcacgcagcggacgcttgcgctcggcaagccacgtcacgaacgcatccggcctgtcgggaaagaggctcatcctgccggccggcacattcaatctgtgcagatagagctccgagcgataagcggttccgcgtccaaagcccggatcatcgccaacaacggcaaccttggccgaagcgggaagatgctcgatcagattgcagacagtcgcgattgccgaaaagcccgcccccaccaccaccacgtcatagctcatgcgcatctccctcgcggcccgcataaagacgtggtttctccggcgggagtttcaagaccgctacagcgagcggttgacgccacgccagtcggcgacagcttcggaccgtcgttcccaacccaaacgctggccgggaacaaccggccagaaaattcgttgtgtcagcatctcggaataaaccccatccgagactctcccgtggcgaagcgcgtgcagcgtcgggtgcttcgccatcgggatccgtggaaaggagactaagatgatgaaccgcgccaagcagacagccgacgagtatcgccaccttggaggacggcggttggcggcttttgacgacaacaaggcctcaacgcgagcctgggacaaggatacgccggaagccgagcgtttttggcagacgaggattgcgaccctcccggataaggagcgcgctgaggtccagtcgttcttgccatcaatcgttgacgagaccgacgagccacgcggccgacactaacatcctgtcagcggttttgaaactttctgattttcagaacgtttagctggtcatgagggacgatgatattgatccgaccaacgctggcggcacccaaccgggtgaaagagaagatccggcccaggagaacacgccaacgcctgatatcgcccctccaccagaggtcctgaaacccgaggaagacgtgacgcccgaggaattcgaggcggcacgaagggcttatcttctcaagcggttctggatcagcgcgcgcggttactggacgcggcgcggtgacaagctggcttggccgctatccatcggcctgctggcgctgatcggactgaacgtctgcttccaatacggcataaacgtctggaaccgcggcctcttcgatgccatcgaaaagcgcgatgcgcccacggtctacttccttggcgcgctctttccgccgctagtgctgggaagcgttgccctcgtcaccattcaggtctacatgcgcatgaagatgcagcggcgttggcgatcatggctgacgaaagcgctcatcgggcgctggctggcaagcggtcgctactatcagcttaatctcatcggcggtgaccacaagaatccggaggcgcgcatttccgaggatatgcgcatcgccaccgaatcccccgtcgacttcgtcgccggcgtcatcgcggccttcgtttcggcttcgaccttcatcgtggtgctctggatgatcggtggagcattgtctttgccgatcgctggaaccgtgatcaccattcccggctttctggtcgtcacggccgttctctacgccatcatcacatcaacctcgatcgccttcatcggccgccatttcgtcaaggtctcggaagccaagaaccaggtggaggccgaatttcgttacacgctgacgcgtgtgcgcgaaaatggcgagagcatcgccctgctcggtggcgaggacgaagagcgcaacgacctggaaaagaccttcggcaacgttctgcatcaatgggccctgctggcgcgtcagtacatgcgaacgaccctggtttcgcacggttcgatgctgatcgcgccggtcgtgcctgttctgctctgcgcgcccaaattcctcgacggcagcatgagtttgggtcaggtcatgcaggccgcatccgcgttcaccattgtccaaagcgcgttcggatggctggtcgacaactatccgcggctcgccgactggaacgcatgcgcaaggcgcgtcgcgtccctgatgatgtcgatcgacgggctggagcgggctgaacagagcaatgcgcttggacgtatcaaacgcggcgaaaccgaaggcgatgcgatcctcagtttgaacgatctctctgtctcgctgggcgacggcacggccgtggtcaaggagacggaggtggagatccagccaggggagcgggtgcttgtggcaggcgaatccggatccggcaagagcaccttggtccgggcgatcgccggcctgtggccatggggcgatggcgccgtcaatttccgccccgacaaacgcctcttcatgctgccgcagcgaccttacatcccatcggggacgctccgcagggcagtgacttatccggcgggcgccgacacatggacggtcgaggagattggcggtggccttgagcaggtcggcctcggtcatctgaaggacaggatcgaagacgaggcgccttgggaccagacattatcaggtggcgaaaagcagcggttggcgtttgcaaggttgctgttgcacgatcccgatatcatcgttcttgatgaggcgacctcggccctcgacgaaaagagccaggatcggctgatggaaatgctgatcggcgaattgccgaaggccactatcttgagcgtcgggcatcgcgtcgaactggaagcgtttcatagccgcaagatcacattggaaaagcgcgatggcggtgcgaggcttgtgagcgacgtcgaccttatcccgaggaagaagaaaaagcgcaacgtcctgtcacggcttgtacgaaatcggcgtcggcgccgtgatggcggaacgcccgtgtccggcggagctgggcaatgaaccacccagagctcatcagcccgggccggtcgagcgcgcgccgacaagctccaacacatccaccttgcccgcccgccccttgagccgcgccaggccgagcggtcgaaaatcgaaaccaccgccgaccgcatccctcaccgccgcgctgaccaggatcgacgtgttgaactccttgttcagcccttcgagccgtgacgccacgttgatcgtatcacccattgccgtgtactgctggcgcgaagcggcaccgaaactgccgacaacggccggcccggtgtgcagtccaaatcgcgtcaacagcagcggacgtccatccctctcattggcatcgttcaacgcatccacggctgccttcatcgcaagggcgcaccggcagccctcttcgacatgggttgcggtctcgacgggcgcgttccacatgacgaagatggaatcgccgagatattggacaaccgtcccgccatggcgctcggcaatgctgttcagcagttcgaaataggtggagagcgtttcgacgacgtcttccggcgagtgctgctcggagatggtggtgaagtcgcggatgtcggtgaacagcgcggttatttcctgccgcttggcggtgacgatggccggcccgcccggccccacgatccgccgaaccacctcacgtggcacatagagcgcgaactggccgatggcccggcggcttgccgcgagagcggtcgcgagcgtattgatctcggtgatcaaggaatgcgaggtggtcttttcgtgaacgtcgaggttgccgatctcccgtgcctcctccgccagctggttaagcgagcggctgaccatgcgtgacagaagcaccgacgcgacgacacccgcgatgacaaagccagcagcgataatgagattgtgcatcagcgatcggtttgcttgctccacgaggtccgccaatggcacgacgatcgccgcctcgcttcccgcgaacaaaccggacacgctgatcggcgcaatctggatcagatagcgctcgtcatcgaggtccagccgcgcgagccctccggcgccgagggccgaatctcgccgcaggttggccacggtggccaggctggtgtcgaaaccgcttgccgtcgcgccgatgccgccggcgcttcgagaccatagatccatcagtctattcatgatgtcggggtctgaatgagcgaccagctgatcttcatcgtcgataatgtaggcacgggcgcgtgacgaaatttggctggcatccaggagacgactgatcgtcctcaggtggatgttgataccgaccacgacgttgccgtcgtcgcgcatgggtgccgcgatcgtcagcgtcggcgtcttgagggttccagccacatagggcccgaccgaaaccgcctttccatcctggacgaccgcctggtaccaagcccgctgccgcggatcgaaggatgcgtactcgaccgatctctcctcgatcacgcgagcgttggcatcgagaaaacgcagcgttgacacggcgtccggccggtccctgccggcgatcgtccggatcgcgaaagccgttccatcgggcgccgacagcgtctgcctgacgtcatcgcggatggcggcgatcacctgcaggtacgagccatcaggatatccggtgtagacgcttgtcgcattggggacgttgcgcagaacctcgagaaagaagccctctttcgcgctgatatccgccggcggcgcggaggcgagctgccgcatggtcgaggccagcgccaccgcttcggtgccttcctgcaatgtgtttcggtatccctcgatcagccgcaggctcatctcgcgcatatgttgcgcccccgcggtgactgccgcgctcgttccctggctgaaggccatccagatgattggtaccgatgtgcagagaagcgatccaacgaccagcacgccaagatgcagcctaagcggccgggaccagtccacaagccccttggacgtgccatgccgcttcatgccgaccccctcatccgcgctcccttaacaccagctaagcgtgttttaagccggcgcacaagatgggcaaaggacggacggtgcggaggtcaggaagtgtttgccggcgtcatgtcacgaactaccgcgatgttcgacatggggctcgaccaagacatgtctggcttcgcgtctgccatcgatccgctcaagcaacatttgcgtcgccgttcgtgccaactggacggggttctggtcgacgcttgtcagcccgaccagcggcagcgccgagacgggcgagttgtcgtagccgatgatggccaggtccgagggcacgccgatatctcgcatccgcgcgatgttgatcagcggcacggcatcgagatccgaccagacgaacacggctctcgggcgatcgagagcggatagaaaatcgttcagggcggcggttctgtcggcatcaacaggcggaagccgcagcacgcgcgcctccaagccggccgccctcatggcgtccagataaccgagctctctttgcacggcgacgatggtggccggtgagccctctatgtcgtagccgagcatcgcgatatcgcgatagcctttcgagagagcagcctcgacagcgaggtaggcgcccgtccggtcgtcggaattggcggtgtcgtaggtctgagcgtccggctcgtgatgcgcgatgaccacgatcggaatctgcttggcgtagcgctcgagaaccttgccggaaatacggggagcgatgatcagaacgccatccatgcggttgtcgatcatcgactcgatcattgacgcctcgatcggctgagcagatcgcccgagcccgaccagcgccttgaagccgctgtcggcgagcgtgttgctggccgcctcgatcaggccgggcaggaacgggttagagagctcgatcgccagcacgccaatggtgttcgtccgcccccgcatggcgcgggcggcaacggatgggcgatagttgagcttctcgatcgacgtctcgactttcgtgcgcagaagcgcgctgacgccatatgcgttgcgaaggactttcgataccgcggcgaccgagacgccggcgtcttccgcgacatggcggatggtgacccgcgctcgcgctccgtcgttatccttctgaaaggtctgcataattttccgttcatatcaatcttgcccggagtataggcatttttctgttgcacatcaaacaggaatgtagaaggatatacatataacgatacacacttcgtttgatggtccgcctcaagcggatcgggaggggacatgaatattatgcaagggcgcgcgagcgctgccgctggctcgtcatttcaattcaccgccgcgatggtggcgccactatgcgatgaaggccaaggcaccgccggcaccttcgtgtcccgcgacttccagcttgagcatgcccctcgcgaagccgtgctcaccatttcagcgctcgggctctaccgcgcctttatcaatggccgccgcgtcggctcggacctgttgacgccgggctggacctgctacgacgatcgcatcgcctatcagacctatgacgtcgccagcctgcttcagccgggcgagaacaggatcgagatttggctcggcgacggctggtatcgcggccagctcatgtgggcctcgaacccgatcttcaattgctggggcgaccgcacggccgccattgccgaactcagcgtcgatggcgccttggcgctgaagacagattccacctggaaaagtggactgacccccgtcaccaggaacggcatctattacggcgaggactatgacgcccgcttgagggcggaagacgcgttcggcgttgaagaactcgccttcgacaaaaccttgcttgtgccccatgagacggccgccgttgtcgagctcgccccgttcgagccgatcgacagctggacggaagaggatggccggctggtccatgatttcggccagaacgccggggcgtatatccgcatcgaggcccaaggcgaggctggcgcgagcgtacgcgtggagcattccgaagtcctcgggccaaaccggttcttcgacaaccgcaactaccgcagtgccagggccgagttggtttacacgctgtcgggagatggcgtcgaaatctacgcgccgctgtttacgttcatgggcttccgctacgctcgcgtgaccgtcaccggcgatgcgaagcttctctccatcaagatggtcccgatcacctcggtcccggtcgcgacaggcggcatcatgaccggcgtgcccgccgtcaaccgccttgtcgagaacacgatctggtcgcagcgatcgaacttcatcgagataccgacggactgcccgcagcgcgacgaacggctggggtggacgggcgacgcccaggtctttgccggcaccgcatgctggcttgccgacagccagtcgtttctccggaaatttcttcgcgatgtgatgcacgatcagagagagaacggggcagtgccgcacttctcgccggatccgacacgtctgcatccgatcagcaaccgcggcgattgggccggatcgaccggttggggcgatgcgatcgtcatcatcccatggcagctttatctgcattatggcgacaaggcagtcctgcgggagtgctttccggcgatgttgcactggctggattacctctggggtatttccaacggcccgatcatccgccctccggcggtttggggtgagcacggcttcacctttggcgactggctgcagccggtcggcgacaatcgaaagccgcgcccgaccgtcgccgacgattgcgccgcaacactctatcacttcgtcgcaacgcagctgacggcgaagatcgcgcgggtcctcggcgatacgagcgaggcacggcgcctcgacagcaagctcgaggacatccgcgcggcattcaagaacgagttcttttccccatcagggcgcattgcccataacgaccagacatcgtgggcgatcgcctttctccatggtctcgttccgctggaatatgaagaggcaggtcgcggctatttccgccgcgtcgcggaagagaccgatggcgtgatcggcaccgggtttatcggcacccctgcgttgctgccagccctcacccggctcggcatgctcgatctcgccgaaaagatgttcctcaatcgcaaggttcccggctggctctaccaggtggagcgcggagcaacatcgatctgggagcgttgggatgcgcttgccgaagacggaacgatctacgatcccgatatgaacagctacaatcactatgcctacggcgccgtttgccaatggctgttcgaggatgtggctggcatcaggccgcttgaagacaagcccggtttcgaggaaatcgagttcgatcccgctatccttccggcgctatcgcccgttgcggcctggcacgacacgcgcttcggccgcatcgaggccggatgggatatcgacggggggaaagtcacgtgccatcttgaaatcccagatggcataaccgtgcatatacgcggtaatcgtgcaaggaagaacctgacggtgaacggcgccaacgtggtggatgacgagcgtgtccagatcggacatgggagccattcgatcaccttcgacatctgatcaagacggcgcggcgagccgcgcacgacgtgactgatcttaacggtaaatcgcaagtcctttggaggaggagacgaccatgcggatgaccaagtgcagcatcatcgcggcggccactttggcgctggcgagtagcgtcgcccacgcagacgtgacattgagcgtattgatcgacacgaacccggaaaccatcgcttccttcgatgccgtttccaaagcctatagcgagaagcgtccggatgtgaccttcgacgtggagcagcgagcgggcggttccgagggcgacaacatcgtcaagacgcggctggcgaccggcgagatgcctgacattttccagtataacagcggctctctgttccaggccttgaagcccgagcagacgatggctgatctctccgatctcccatccgccgccggtattctcgaaagcttcaagaaggtggtcagcggatccgatggtcatgtgcgcgggatacccttcggcccggcgatgggcggcgggattttctacaacaggaagatctacgcggagcttgggctgcagccgccgaaaacctgggccgaattcatgtccaacaacgagaagatcaaggcagccggcaaggtcgccatcgcccagacatacggcacgacctggacatcgcagatcttcgtcctggcggacttcttcaacgtccagaccgaagttccgacctttgctgacgattacaccgccaacaaggtcaagtacgccacgacacccgcggcacttcgcggtttcgagcatcaggaagaggtcgccaaagcgggattcttcaacgaggatttcggcgcggcgagtttcgatgacggtatgcgcatggtctcgaccggtgaggcagcgcactaccctagcctgaccttcgggatcggtaacatccagcagaactttcccgacaacgttaaagacgtcggctttttcgcggaacccgggaccgacgccgcgaagaacggtttgacgatctggatgccggcggcactctatctgtcagccaaggccgagcatctcgacgaagccaagaagttcctcgatttcgtggcctccaaggaaggttgcgagctgatggcgaaggccgttccgtcgggtccctacctgatcaagggctgcgagctgccgaaggacgtgccgcgagccgtcacggacatgctgccgtatttccagacggaaggccgtgccggcccggcgctggaattcctgtcgcccgtgaaaggaccggcgctcgagcagatcaccgtcgaggttggaacaggtatccgttcggccaaggacgctgccgcgctttacgaccaggacgtcgccaagcaggccaagcagctcggcctcccgaactggtaacatccagacgcaccttgccaggcaaatatccgggcaaggtgcttaggaaccgccatggttatacgcaagtcaccctacccctattggttcatcctgccggcggcggtcatttttaccgttctgttcctggcacccacgatcgcatccttctggttcagcctgacacgttgggatctgttcacgacagagttcatcggacttgagaactacaagcagttctttcgcgagcctttcctcatccaggggctgaccaacactgtcatctatgcggtggcgacgtcggccgcgaagacggttctcggcctgcttctggctgtgctgctgacatccggcctttgggctcagggtcttcttcgaacggtaatcttctttcccgtgctggtgtcgaccatcggcgtcggcattaccttttcggttctcatgcatccgacgcgtggcatcatcaatgtcgcgctggccgccatcggcatccacggaccgggctggctgacggatccggcgctggcgctctattcgatcgtgctcgtcgatctctggaagggcatcgggcttgcgacggtaatctacatcgccggactggcatccatcagcgccgactactacgaagccgcgcgcatcgacggcgcaaccagaacgcagatgctctttcgcgtcaccataccgctggtcaagccggcgacgattaccgtcatcaccctgtcgctgatcggcgggctgcgcagcttcgatctgatctgggcgatgacaaagggtggccccggattttcctcggacgtgctcgcgagcgtgatctacaagcaatatcaggctggcttttacggcctttccaccgccgggaacgtcatactgttcgtgctgatcgcggtgatcgttctgccgctgaccttctggcttaatcgcagggaggtcgatgtatgacccggcgccagttttgcaccggggcctcggcgctcgccgcatgctgcgtgatcttcgtcatgccgttcctgttcatctttctgacggccgcgaaaaccaagcaggatgccgcggcgcttaaattcacactgccaagcgaatggcagctctggaccaatttcgtcgatgtgatccaggcccgcaattacatgctgctgctggcgtacttcaactcgactgtgatcacggtcgctgccgtcacgttgctcgtgctgttcggcgcgatggtgggctatgtgctgcagcgccggccatcgcgatggaacgcggtgatctatgcctttgtgctcgccggtttgatgatcccgccagccgtggtaccgacgatctgggtgttgcaggcgcttggcttgttcaagacgatttccggcatggtcctgatccaggtcgcctacggcctgtcgttcaccgtgctgctttttcgaagcttcatcgcgaccatcccgcgcgacctggacgaggcggcgatcatcgacggcgcaaagccgctgcagatcttcttccgggttgtgcttcctctgctgaagccggtgaccgtgaccgtcatcgtcgtccagtcgattgcgatcttcaacgatttcaccaacccgctctactatttgcccggccgggaaaacgtcaccgtgcagctcaccctctataatttccagggacagttccagacgcagttcaacctgctgttcatgaacatcctgcttgtgaccattccgccgctgatcgtgttcatcttcttcaatcgacagatcgtggcgggcatgacggccggcgcagtgaaaggataagccatgaccagcgttgttctcgatggcgtcagaaagagcttcggtagcctcgaagtcatcaagggcgtcgatctcaacatcggcgccggagaattttgtgtgttcgtcggaccttcgggctgcggaaagtcgacgttgctgaggatgatctcgggcctggaaacatcaagcgccggaaagatcgtcatcgacaacaaggatgtgaccgatgccgagccctccgagcgtggcatcgcgatggtgtttcaatcctatgctctctacccgcacctcacggtcgccgaaaatatcggcttcggtctctcgctcgcgagacgcccgaaggcggaaatcgccgagaaagtgaagcagaccgcggacattctgcagctctcgcatctgctcgatcgtaagccgaaagcactttccggcggccagcggcagcgcgtggcgatcgggcgagcgatcatccgcaatccgaaggtgtttctgttcgacgagccgctttccaacctcgacgcttcgctgcgctctcagatgcgcatggagctcaccgagctgcatgcccgccttggcgcgacgatgatctacgtgacccacgaccaggtggaagccatgaccatggccgacaagatcgtggtgttgaacggcggtcacatcgagcaggtcggctctccgatggcgctctacaacggtccgcggaccgcctttgtcgcgggcttcatcggatcccccaagatgaacctgttcgacggagccctggccaaggccgaggggtgccgggtttacggaatccggcctgagcacctggcgctttgctcgaccgatggtaaatggcggggcacggtgcggcatatcgagcggctgggagcggattcgatcattcatctcgatgtcgacaccctcggagccgtgctcgtaagggctgatggcgacagcaccatcggcgttggcgacacggcatttgcctcgcccttgccaaacaaggaacatcgtttttcttgagacaggttcggaagcaagcgccggccatcgcggatggaatcggaagctattcgtcttttcgggcttaagccacgcgatcccgcgccggccgcactctcgagaccgttcgcgtcaacgacactttccttcctttgatcgcggtgtcggtgcgtccttccctcggaagagatatgatcgccctcaagccaggatcattggaacggagagtgatgtcgccaccgtgctggcgcgcgatcgcccgtgcgatggacaagccaaggccgacaccacccgcaagcgactgcacaatatgcacgcgcgctttcccaccgtagcgcacggcgttttgagcgcgattgcgcacagcgcgccgcaatccatccgggcggcatcgatatgtcatcgcggggccctcgacatttcgacggcctggccgagatcggagagatcgtcgcagatgctctcgagtagggtttcaaggaggcggcgacttgacgcgcaaccggctcgtccgacagttcgctctggcttgcacctgctctagctgtaggcgaacgaggaactcatgcggcgacgaaaacgtctttgagacctttccgatcaccttgaagcccaggatttacagatggggtgtcgcagatatttgccatcgaaggactagattgtatcaagctgtcgcagctgccgacgccgtttggccgatcgttagtgctttttgccgaaagcgggcggcacaaccggcgtcgcaccatgcattagtaattcattaaccgggcttggatagaaattgttaaccatcccgtcgatgcatggcgggtgcccgttagcctcgaccgaaccagatgaaatcaccgctctcggcattctcccgccgcctaggcttgttcacggcacttgcatcggtcacgctgccggcgcactgccttgcccagtccgcgtggtccggtaccgcggacaatgagttcagcaattcatccaactggaccccatccgcgcccgggtccagcgacaccgcgcgcgtggattcaggttccccgcaggtcacgacggacgtcacgatcggccatctcgatgtgggtggtggcaacgttaccgtcacctctgacggtacgctcaatgccgcgagcggcatcacgatcagctcgggcagccttggcatcaaccaggggggcgtcgtcaactcggatgtcagcctggacggcggcagcctctctcttgatggcaacctcggtggccagctaaacctcaataacggcaatgtcaccgtgaccggcaccggcacgctcaccagcgccgaggtcaaggccgggacggcccttaccaataatggcgccaccggcgctgtgaacatctccgccggcggaacattggtcaacaacagcggcgcgacgatcgcgacggtcaccaatgccggtacggcgtcgaatgccggtgcggtaggcagcctgaccaatacggcggggaccttcaccaataacgtcggcggaacggttagcggaaagacgaccatcacgggtgggatcgtcacgaacaacttcgtcatcaccgatgcggatgtggccgcgaccgctgccttcatcaacaacgccggagcctcagccggcgcgatcaggaattccggcaccgtcacaaacgcgggaacgatcgcctccatccagaatgaggctggatcattcaccaacaatacgggcggcatcgtcaccggtactaccaacgtcgacggcgggaatgtgacgaacaacgccacgctcaatggggttgaggtcggcacggcgggcatcttcaccaacaccagcggcgccatcgcgggggcggtcacgaacgccggcaccacatccaacgccggcgcgattgcgagcctgaccaatacggcgggcaccttcatcaacaacgccggcggaacggtgaccggaaagaccaccgtcactggcggaaccgtcacgaacaacttcgtcgtcaccgatgccgacgtcgccgccaccgctgcctttatcaacaatacgggagccacggccggtgcaatcaggacctccggcaccgttacaaacgccggcacggtcgcctccctgcaaagcgatgccggaaccttcgtcaataatgcaggtggggtcgttagtggcaataccagcgtcaatggcggcgtcgttacgaacaacgccacgctcaacggcgtcgaggtcggcacggcgggcatcttcaccaacgccactggcgcgaccgccggggatgtcacgaatgccggcaccacatccaatgccggcacggttgccagcctgaccaacagggctggcactttcaccaacaacgccggcggcacgattgccgggcaaaccgtggtcgcgggcggaaccgtgatcaacaatttcatcgtcaccgacgccgacgtcgcggccgtggcctcgttcgtgaacaacagtggggccacggcgggcgcgatcaggaattccggcagcgtcacaaatgccggaacgatcgcctccgttcaaaacgacggtgggagtttcgtcaacaacgcgggtggatcggtaaccggcaacacgacagtgagcggaggtgaggtcgtcaacaatgcgacattggccaacgtcgatgtcggcgcgcggggcaccctcatcaacaacaatggcgcagtggcgggaacgattacaaatgccggcagcaccgcgaacgacgggactgtcgccgcattggtgaacaatggcggcacgttctcaaacaccggaaccatagcgggaacggcaacggtttcgggcggcgcgctgatcaacgacggcattatctcgggcgcggtcgacgtcaatgacggcggtctgctatccggtagcggcgccgtcggcgagctcgtcgtgaatgctggcggctcgttgtcaccaggaccgggtatcgcgacgctcagcgtcaacggcgatctgacgtttggcgccggctcgacctatcaggtggacatccaggccgacggccgctccgacagcgtcaatgcgacaggtgcggttgccatccagggaggcaggctcgacatcagagcggctggcggcaattatgcgacgacaagcagctacacgatcctgaccgccggaagcgctactggcgccttcgatacgatctcaagcgattttgcctttttgtcgccgacactcacctatgatgtcaccggcatagacatgacgctcgatcgcaacaatgtgcgctttgccgacgtcgccgatacggcgaatggtcgggcaaccgctacggccgtggaagcatcaggctcgggcaacgcggtctatgacgcagtgttgtcattggatgacatcaccgcgaaaagcgcattctcgcaactgagcggcgaggttcatgcctcgctcaagagcgccctcctgtgggagagccgcttcgcacgcgaggcgatcctcaatgacatcgcttcacgcgaggacgacgcggttttctggacctccggctacgcgtcgtccaaccgttggtcggacaatggaaatgcggcgggaatcgataccggcgtttccggtgtcgtgtttggagccgatgcgccgatctccgatcaatggtgcgttggcgcgatagcaggttacagcagaggctccttggaccaggcggacgcggactcctaccacgccggcctttatgccacgggcgacttcgggccgataaccctcacaagcggcgccgtttactcccataacgaagcttcgatacgcagggacgtctcgtttggaacattttcgaatgaactgaacgccgagtatgcgagcgccaccagccagctgttcgcagatgtctcgtggacgcaacaatggaatgccgtcaggttccagccatttgccaacctcgcttacgtcaacctcaagaccgacgcgtttcaggaaagtggcggcgctgcagctctgtcatctgggggcggtaacgatgcaatcgccacatcgacggttgggttgcgttggtccatggattggtcgcaaggcgacgtgcctatcctgttctccggcatgttgggatggcgacatgtcgcgggtgatgtgacgccatattccagcctcgctttcgccggcggttcgccattcctcatcggtggcgtcgatattccggaaaactcggtcgtgacacagtttggtatttcggcgaagcttgccaagtcggcgcgcctgacactcgcctataccggtgagtttggcaaggatctgcgctccagtgcggcacagatcaattttgtcacacgtttctagaggccgagccctcaagggcatcaggcgtagcccttggccagagccggtgcaatctgaagctccgcaaagagcgaacaaccgatgtcgatcgatttattgaactcgccgtctttggcgcgacggatgtatcgcttattcgtccctgtatcgacgagttcgcgttttgacatcattttctcctcggttgaggatttgaaacgcgcaagattccaaaatgtcgcgaactgctcagcgggctacgctcaaccagctggatgcgccactggagctccgccatgcgcaccagcgctaaaggaccgggccgtccgctacgtctgtgcgcccttgcaaagccccgcatatcgccgtgcctttagagatcatcattgccgagggagctcatcgggacaaaagggcatatcgccgatcgcctcttccgcggcggccacttcgtccaagatgcggcacgcatgggcgtagaacatctcacccgtctcggtcaggcgaagacacctcgtcgagcgctctattaagacccggccgacttcggcctctaacctcgccagagctctgctcacagacgacttaggcattttgagtgaacgcgcagcaccggaaatgcttttaacatccgcgatcaacgcaaaaacggcgaggtctgtaaggtggaacattcaacaaggctcacatgtttaggcaccgatgtccaccgctcgttgtgttattcatcgatgcaggaataatgaaaggctagaggatgagaaacgttttcatcgcaatcggcatagctcttttgaccacaggctcggtccacgcgttcgatgctaagggtaagggcgggtacgacagcttgctcggaggtgacgcgaatgtgtgtcaccgcgaaccgtggcgctgtacaaaacaccctgagagcgccgagcgacgccattaccgcgaccgagatttcagagaaaacaaccgtcactacgatcggcgcgatcgcgactggcgacgtcgccatgacagcgactggtacgaatagcttagggcactgtgtccgttttctgttagcggttgatcgtccacgaccgaggagttccagaccggcaagctcgaaggtgaagctgggcaccggtatcaccgccacgggcgaacgccccggcgacctggaaaacggcttcttcgtcgatggctacaccctggatgcgtcactcgcctacaaggtcaacgagcatctggatttctcgcttatcggtcgcaacctgaccgaccaacgctacatcgaaaccagggcgggcataacagaaactacgcggggaggccgatcaacgtcatggcatccctcaaggcgagtttctgacaggttaaagggagccgttcctcccctcccaacgctcccttttatacgccaacatcccgtgatctgcccgttcagcccaggcgttctcagtccgccgtgcgcgggcacgcggcgatctacgggacgaacgacctcagcgacgaacgggcggcatcccggtgacacgttcccagaactcatcggcccgtttttcaaatgtcgatgcgccgcgcgcgtcgctctgatagaaggctccccgggggatcccttccgcataggtctgctcgacccagcctcgagcatcatcatgcggaaactggtatccgacatggccgagcgaagcagcccccttgtaatgcgcatcacgcaaatgcggcgggacgctttccgggggctgcgaggcgacgtactgaagagcaagccctaggcctcgggaagccgaactcgacttcggcgcacgcgccagatgaagggcggcatgtgccagaatcgtctgcgcttccggatatccgattttctcgaccgcctgtgaagccgccaccgcggtttggagcaccgagttatcggccaatccgatatcttccgacgcatgaatcatgatgcgccgggcgatgtagcgcggatcctcgccgccgtggatcagccgtgcgagccaatagagcgtcgcgtccggatccgaaccgcgcatggatttgatgaaggccgagacgatgtcgtaatgggcatcacccgaacgatcgtgattgatgggggcagacgcgtaagcttcgttgatcatgtcatctgttatgacgatgtcttgatcgccagcgtgaccgacggccaggctctccaatgtggtgagagctcggcgggcgtctccacccgaccggccggcaatcagccggaccatatcgggcgtcaggacaatcggaatgtcggtcgcgtgcagatgatcgatgccgcgccgaacgacctgttccatttcaccaagcgtcaagggctcgagccgaatgatcgtcgagcgagagacaagagcgggtgtcaggacatggaacggattgccagtcgtggcgccgatgaagtcgacgagcccctcttcgcaaagcgccagaagatcgtcggtttgggtcgccgagaagcgttgaacctcatcgacgaaaatcagggttggatggatgcgggcgccgtcggcgatccggcggatatcggcaacgcccgcccgtgtcgcattgagaggtcggaacgtcttgccaagcatgttgccgacggcgcgggcgatcgacgtcttgccgaggccgggaggaccgtagagtatgatgcttcccagccggccggccgcgatacgccggcgcaggatggagccaggagcaacaacagcttcctggccaatgatgtcgtcgagcgtcgctggcctcagcgccgcggcaagaggttgcggattcatccgtccagcagtgtcaaacaggtcgctcatcaggtcatccggcgggtcggcaatcactcatccgtggctcgtcagccattttgccgctcacaacgcgccgtgatcggcagatgcccggtttaagatgaagataccggatccgcaagacatctggcgcaaggccgatatcgcgcagcacctgcccgcgacatgctttcgcctgcgatccggtccgtggacttccagcacttccagcaaaagcgcgacggatggggcgaaggcctatccttgatcagcaatcacgcacttgctgccccaactgctgcaacagcttgaaagcgtcatatctccgcaggtgaatatcggcggccgggcccgcggatggcgtgaacgttccgtcgaccatcgtcagcatgctcatcgcgtcgcgaacatcgcggtaacggccactggcgaccgcgccaaggatagccgcgcctagcaacaccggttcatcggctgacgtcgcgacaataggcttgccacaggcatccgccaaaagctgacgaacgaaagcctgctgcccggccccgccgctgatgacgaccgtatcgatctcgacacccgcctgcgcttgtgcgtcgatgatctgcctgagcccataaccgatgccatagagccccgccacgtacagccggacgaggctgtcgatatcgcgttccatgccaaggcccgcgatcagcgcgcgggcgtgcggatcggccagcggtgcgcggttacccaggaattcagggacgacgtgaaggcctgtcacgagcgaggcggcatcggttcccgctgtgctggcggcgaggtcggcaagcatgatgggaagcggttggcctttgtcctttgcaatttgcgtcgcttccgccgcggcaggatgaaaggagagaagctgttcgatcgcagcacccgcggcactctggccgccttcattgagccaaagcccaggaaccatcgcggaatagtagggtccccatacgccctgcacgaaggccggttcgactgttgatgtcatcgtgcaggatgaggtgccgaagacatagccgaggttcgccgtcggtccgtccccgaagccgaccgtcccgatcccgccggcatgggcatcgatcagtccggcggcaaccgccgtccccggcaacagaccgagttccgccgccgcagccggcgtcaggccgccaccaagcgccgagcccggttcgacaatcgtctggcctatgcgggaaaagccttcatccgccagcgcgccgaggccgacttcctcgaaatatgtcggatcccagcgtttctcgtgcgcgagataggtccacttgcaggtgacggtgcaggtggagcgcgagaggtcgccggtggcgcgccaggtcagaaagtcggcgagatcgaagaactgccaggccgcgtcgaatacctcgggccggttctccttcagccacagcagcttgggtgtctccatctcgggagagatgcggccgccgacatagcgcaggacctcatggccgagcgcattgatccgctccgcctgggaaaccgctcggtgatccatccagacgatgatgttgcgctcgggatcctccgatgggccgaccggcaagggcttgccctggtcaccgaggacgacgagcgagcatgtcgcgtcgaagcccagtccgacgacggtctccgggcttacgcctgcatcttgaacggactgacgcacggcgtcgcggaccgcccgccagatctcgttgctcgactgttcgacgatcgaacccgcgtcgcggtaaagcgagatgtcgcgcttggcggaggccagcatccgtccaccgagatcgaacaccccggcgcgagcgcttccggtgccgacgtcaacgccgatcacgtagcgcggtgtttgtacttcgtcgctcatggtctctcatctttctggcatgaatggctgacacccgcgcaacgcgcggagatcacgatttttagaggtcgacgctattcgggaggatcacgaggtcgcggatggtgacgttgcggggccgcgagagcatgaagagcacgcagtcggcgacttcctttggctgcatcaggctgccgttggcaagcgcctcttccatcttcgccttcggccagtcatcgagcagcgcggtcacgacaggacccggcaggacggcgccgacgcgcacgccgtgttgcgcgacctggcggcgtgtggaatgcacgaatgcctgcaccgcgaatttcgacgccgtgtagatcggctcccagacaaccgggaccacaccggcgatcgagctggtgaacaggatgtcgcccgacttctgggcgatcatgtgaggcaacacggcatgaacggagcggaaggcggcgttgatgttcaggttgagcatccgatcccacgcatctgggtcgccctccgcgacctgcccgccgatataggcgccggcgttggcgtggaagatatcgagcctgccggcgatctccagtatccggggaaggatgcccgagagctgcttgccgtcgagaagatcgacgacgagaggaaatgcgcgctcgccgaactcgccgcagatttcgtccagtctgtccttggcgcggtcgatgagaatgacggtagcaccttcggcgtgcaatgtgcgggcgcattcgaggccgatgccggatgccgaaccggtgatggcggcgactttgcctttcatgaggtcggtcatgaatttactccttgaagtttgatcaggcgcgtccgtggctgacgcgggaacggcgggcgagcgagtcgacgataacggcaatggcgagaacgccgcccgtgatcatgtagcgcaaagacgagctgaggttgagcagcgtcaaaccgttggaaatcgcctggatgacgatgatcccgagcagcgcggaataggcgctgccgcgaccgccgaagaggctcgtcccgccgatcacggcggcggcgatggcattgaggttgacgtcacccgtgcctgcctgctggctggacgaggcaagacgcgatgccgaaaggatgccgccgatggtcgcaagcgtcgagcaaagcacgaaggcgctcaggtagatgcgtcgaacgttgatgccggcacgccgtgcggcttcgcgattgccgccgaccgcaaacatcgagcgtccccattgggtgcgggtcaggccgtagttcaacaccaccgcgatggcgacgaacaggccgaacatccacggaatgccgcggccgaggttgagataatagacggcgaattcgagtgccgcggtcaatacgacggccttgatggctgtcgcggcaaagggctgcgaggacaggttgacggcagcgcgctgctggcgcgtccgcaggcccttggcgatgatcacggcgcctggaatgagagcaagcagataggacagccaatcgggcatgaccaggatctggccgaagcggacgagcggggaagcatagggaaggttgatgctgccgctcgggccgaggatatagagctgcatgccgagcagcgccaggaggccggcgagcgtcgccacgaagcttggcattcccaaccggttgtaaagcacggcgtagacagttccgatgaccgcgccggcggcaatggcagcgatgatcgcgacgacgaacgggacgccgttattcacccagagcacaccgaggatggcggatgacaggccgctcatggaaccgacggaaaggtcgatctcgccaagcatcagcacgcagacgatgccgagcgaaatgatgccgacggtcgcgcagtcaaagagcaggttgacgaggttgttcggcgcgagaaacaccggattgagcagcgagaagaccgtggagatgacgatcagcccgaccgcgacgggaagcatgccgaggtcaccggatttgacgcgatcgatgaaggccccgaccatcgccatcatgctgtcgtcgtggcggacgcgttcgtcgctgcgatcgagcgtcgtggcgggtgcgagtgttgtatcggatggtttctggctcatgccggtctcccgctgttttcctgcgccgtacctgtcttgcgctcgatgcggcgcgagacggaattttccgtggcacccgtgatcgaggcgacgagttcctggttggaggcatctggcgtgaagacgccgttgttccggcccaaccgcaatacgacgatgcgatcggcgacggcgcggacgtcttccatgttgtggctgatgatgatcacgcccaggccgcgatcgcggacgcgctcgatgagattgagcacctcggcggtctgcgcgacgccgagtgcggccgtcggttcgtcgagcatgatgatcttcggattgaggaggagcgaccttgcaatcgccaccgtctggcgttgaccgccggacagagaggcgatcggctccctgacggatgggatgcgcgcggccagctcccgaagcagtgtccaggctcggacctccatcgccacctcgtcgagcgaccacggcgagagctcatgcccgaggaacaggttggcgacgacgtcgaggttctcgcagagcgccagatcctggaagacggtggcgatgccgagttccagcgccttgccggggctgtctagcgatacactctgaccgcagaactcgatcgagccggacgatggctggtgaacgcccgccaggacctttaccagggtcgacttgccggcgccgttatctcccaccagggccacgacttcgcccgccttgacgtccagttcgatatcggtcagcgccgagacggcaccgaaattcttcgacacgtttcgtagtcgcaggatgggctgcccgcgctccggtacattgcttgctgtggtgctcatggctgagggcctttgtacgtccttgagaaaccggccgcacgcggtgcggccggaatggcggatcggcttttagttgccgatgccgagcttcttgcagccctcggcatattcgccggtgcagatctgctcagccgtctggatcttcttgtcgaagatttccgccttgatgttttcggcggtgacgacggccgggatgaagagttgcgacggcgtgttgtagagcgtcgtcttggcttccggcttctcgcccttgatgagctggacagcgacctgcgcggccgccgccgctacgatctcggaaggcttggagatcgtgttgtactggtcgcccgagatgatgagctgcagtgccgcgatcgtcgcgtcgttgccggtgaccggtgggacggggttgacacccgccgccttgaacgcggcgatcgcgccgccgccggtgccgtcattggcggcgaccacgcccttgatatcggcgccgaagcgcgtgatctggccggcggcccattcctgcgccttcggcggcgcccattccggcgtgtcgaattcggcaagcgtcttgtacttggattccttcagtccgcgatggatgccgtcgcgaataaggccggcggccgcatcggtcggcgagccgttgatctcaagcacgccggctccgtcaggcacaccggccttcttcagatgctcgacaagcgacttggcaatcgcgtagccgataccttcattgtcgaaggaaacatagaaatcggcaggtttgtccgggatcgggcggtcataggcgataaccttgacgtcctgggactgcgcgagttccacgaggcccgcggcggcggccgagtcgaccggatcgaggaccacgaccttggctccctgcgcaatcaccgagttgaactgttgctgctgcagcgacgcgtcgccattggcgttctggtagacgacagtacacttggcgcacagtttttccatttccgccttgaagcccggaaaatcgtgctgctcgtagcgggttgatgcctgatcgggcatcaggaacgccaccgtggacgcttcctgggcgaatgctgctccgccgagcgccatcagcatggtcgccgacatcagggaaagtttgcgataggtcatgttctcctccttaattgaccaacggcaaggttcggccattgccgcaacatcggcctgatgcgcgatgcgtcatcgcctcaagccgcggctcgacgagagccgcacggcaaagaggactaccaatagctgcgaaatcacctcccggtgccagcctcctagctgacacgtatcatcgattgagcgcacttgctcaatcgatgaagcaagatttgccacttctctggtttgatgtcaagttagcgcccgatacaggagatgagaattttgagtctggacaggcagcagaagcgaacaacgatctacgaccttgcggaactcgcgggcacatccgcgagcgcggtcagcgctgtcttgaacggaaactggaagaagcggcgcatcagcaagcagcttgcggagaagataacgcgcatagccgaagagcagggttacgcgctcaacatgcaggcaagtctcctgcgtcgcgagaagtcgaacatcattgggatgatcgttcccaagtacgacaaccggtatttcggttcgatcgtcgagctcttcgagacaatggcgcgtgacaagggcctcttcccgctcatcacatgcacgcgacgcgaccccgcgcttgagatcgaggccgcccgaacgatgctttcgtatcaggtggactgcgtgatcgcgacaggtgcgaccgacccagacaggatcaccgagctttgcgccgccgccggcgtacgcacgatcaacctcgacctaccgggcaaactcgcgccttcagtcatttccgacaatttcgccggcgcccgcgagctgacgcgaagaattctcgtcagttgccaacaacgatttggcgccatggaggcgctgatgttcgttggcggacgcggtggcgatcacaacacgatggaacgcttgaggggctttcgccaggcacatgcggatcacggcatcgaccttgaggacgacagggtcatcgcctgtggctacgcccccgaaaaggcgcagaccgcacttcaggagcgcgccgccagcggtttgcccttttcgagaggcatgtttgtcaactcgacgattacactcgaaggtgtgctgcgctgggtgcggctcgccggacctgtcagcgaacaggaattcgccctcggctgcttcgactacgaccctctcgtcgccctcctcggcgacaacatcgagatggtccgccaggatgtgccggcaatgctgacacggatgttcgagctcattgagctcggaaactttgagccaaacgtgtccgaaatcccgcccgttctaaggtaagtgttaccgtgcggcccagataaagctggaactcgctgagcgtcgcgtctgaaaaactctccggcatgctcgtattggtgcggggctctctgtggctggtggtgggattagcggcgtgctcgccgcgctgcgcacgacagggcgtgccggcacgcttgtggtggttggatacgaactgatgtacaatgtgcgctcggccctgctcgacggcgcgctgaccctatcgaaatcgcatccgctcgcgcagctcgccggcgaggcgatcaccgggatggtcagcgcggtcgcttcaaaggaagcgaatgccagttatacgaaaataatatccttcaatctctatacgcgagagaacgtgtgagatttcgcagcgcgccctagtcgtcattgcgcaagacgttcatgcgcgcaatgcgtttgcaaggtgaaacgcaaagacattctcgctgcaatataatatatagattttatcgtcttttattttgatgagacttcttgcacccctattccttcaatccggagcgaaggaaacggcatggcacgacatcagatagatcgaattgaacaacggtcagcacgcctgacaaatgaggaggaggcgatttcggcggctcgcgtgttggcggaacgcttcaaaattgaagcctcgttgcgcgaccaggagcgcttgcttccccatcacgagctggatgccttatcacgggcaggtcttctggcgattacggttcctcacgaatatggcgggatcgatgtttccaacagcgtgcttgccgaggtgaccgccattcttgccgaggcagatgcatcgattggccagatcccgcagaaccatttctacattctcgaagcgcttagaacggatggcacggaagaacagaagcgcttcttcttcgcacgcgcgctggccggcgaccggttcggcaatgccctgtccgaacgcggcaccaagaccgtcggacactataacacccgaattatccgtgatgggctcggctatcgcatcaatggccgcaagttctattcgaccggcgtcatatttgccgactggatcacggtcttcgcattggacgagaacgatcgattgaccatgtctttcgtgcagaaaggaagcgatggcgttgagatcgtcgatgactgggatgggttcgggcaacgcacgaccggcagcggcacgaccattctggacaatgtttacgtcccggccgatgctgtcgtacaccatcacaaaggtttcgagcgaccgacgacgattggttcggtggggcagatcatccatgctgggatcgatctcggcattgcccgcgcagctttttcggacatggtcgagttcgtgaagactcgatcgcgaccgtggaccaacagtggcgtcgacaaggcatcggaggatccgttgaccatcgccaaggccggcgaaatcgcgattagattggaagcggcgtccgcgctggtcgaacgcgccgggaacaaggtggacatcgcccagatcgacaccaccgaggaaaacgtcgttgcggcaacgcttgccgtggcggcggcgaaagtgctgacatcggaaattgccctcgacgcatccaacgccctcttcgaactcgccggcacggcctccacgagcacaggcctcaacctcgaccgccactggcgcaacgctcggacgcacacgctgcacgacccggtgcgctggaaataccatgttgtcggcaactatcatctcaacggcgcggtaccgccgagaagcggagcgctctgagaagcgaaaatagccccgccgctagcgacggggctatatagggtcggggtggccaccgtttaactatagaggctgacttcggggatcttgtcgttgagaataaactcgccgacctccttggccttgtagaagacgggatcgtgcagcgtgtgcgttcgaacatttctccagtagcggtcgaaacgataggattgcgccgtcgagcgggcgcctgtcagctcgaatacacgggaggtgatgtcgagcgacacattggtcgcatgcaccttggccgcataggcttcggcggccgcttccccgcgctcgcgcgccgtgacatcaacacctcgagacaacgcagcctggaccgcgccggccgcctgatccgccaaggcagcggcggccttcactgaagcagtaaactctccgactcgctcgaggatatagggatcgtcctgtgcgcgggcgatacccgacgtgacccaggggcgcgtggtcgtcctgacatagtcgaccgcctgcgcaagagcgccttcggcggtgccgaggtagaagttcacgaacacaagctggatcagcggtgtgttgaagctagccagcactgggggtgctgctccctcctccgtcggtgcgccaatcaagtcctcctcataaacggggaagtcccgaaactcgacgctgccgctgtcggagagacgctggccgatgttgtcccagtcgtcgttggcgatatagcccggccgatcggtgggcaccgcgaaactcgcgatctttccgtccagcgtggcattggcgttgatgtaatcggagatccgcgccgccgtggagaaggacttgcggccgttcagcacataaccattgccgcgtctcgtcagtgtgaggcccggatcgcgaggattgacggcggcaccccagtaaaggcccttggcgaccgtgtcggtcccaagcgcattggcacgagccgcgttctcgatcgcccagtagatgtactggctgttgacgaagtgatagccgagcagctgcccgatcgagctttctccacgggccaggatgcgaacgagcttcaagccatcgacccagtcgaggccgcccccgccgatcgccggagcgtgcagcgcgttgagcagcccggcattcttgagcttgacgatctcgctgagcggcgggcggccgtcacggtcgagttcggcgcctcggcttgcgaggtcagctgaaatctcctccgcccgcgcgaaaagctcggcccttgtcgcgcctcgcgcggcgacgtgaatgacattggattggctcatcgaaaactcccattgaaaatagagcagtccggcaggtgatccgccggactggtgtgcctgcggtcagaaaagctttgctggaatccagggagcggtgaccacgtcgctggtgttgaactcgggcagcttcttcgccagatcctcgatcgtctttacgttcgccgacctcagcgccgcttgcgtcaacagggttggcttcaccgtgatgttgtggggaacctcttcgccggcgatctgcagggccgcggcgcgaatggatacggcgccgacgacagcgggattggtcgcgacggtcgccacccaggggcttccctcctcggtgatctcctggatatcggcggtggaaacatcggcggaatagatcttcagcttggatgcgatgccgaggtcgttggccgccagtttcacgccgcgcgcgaactcgtcatagggagcgaagacgacgctgatgtcgggattagccgtcagcgccgccttcgcctggtccgccgtcgatgtcgcggtcgtgtcgctcacactgccgaagcgtgccttctcgacaacgccgttgttgtccgccttgaatttttcccagacctcgttgcggcgatcgagcggcgcgaaaccggcgacataaacatagcccgcattgaagctcgcgccgttttccttcaccgcctgctcgagcgcctgcttggcaagctcgtgatcgctctgctcgacctgcggtatcttggggttgtccaaattgacgtcgaaggcgacgaccttcacgcccttgtcgagcgcctgccgcacgacgtcgccgagagattccggcaagccgtgatcgacgacgatcccctgaacgccgaggttgacggcctgcaggatctgctcgcgctgttcggcggcgttctggcggccggggaagacgcggaggtctatgccgagcgcccttgcctgcgcctccgcgccggcctgataggcctggaagaaatctccggcagaaatgtagctgatcagggcgagcttgacgccgcccttgtcgaatggcgccggcgcgccggccagcccttcggcgcgagcaccactcaaggcgacgaatgagatcgcggcggcggaaagcgccaggcggctgaaggtcttcatgatgcgctcctaaaaagatccaagctatcggcggcttttcacccgcattttcattagggtatattttctacctttttagtagataaattgctccgatatttccgctgaacaggaaaaactttgtgcgatttgcgtgcggggcgggaaacgccttgcctgtcgcgacaccggtttccggtgcaacttgtcggcaatgaaaccggtttcattgagggcagatcggaacgaaatagctcgcgtaaaagacatctaaatcaaggtgatgcctcccaacagtcgcctctcgatcccccctcactcgtggttcgcccatgtctctgctctcactcgaaaatctatcccgaagctttgactcaacgcgtgcgctgtctggtgcctcgctatcgatcgcccgcggcgagatcgtcgcgctcatgggcgcgaacggcgcgggcaaatcgacactcgtgaaaatcctctccggcgtgctctccgccgatggtggagatgtgacgcttgatggtcgacccttcgcgccgcgaacgccggcgcaagcagcggcgcgcggcatcgtgaccgtgcatcaatcaaccgatctggtcggcgcaccggggctgacggtcgccgatgtcttgctcctcaatcgcttcgccgaccgcagccagccgttcttcgtctcaagacgcgctgtccgcgcgcgggcaaaggccatgctcgacacggctggctttgaccttccgctcgatcgcgatttcgcggacctcggcgccgccgaccggcagttggtcgcgattgcgcgtgcccttgccaacaaggcggacctgctgatcctcgacgagccgacagccagcctgtcgatcgaggaaagccagcgactgttcgacatcctgctgcgcctgcgcgtgcaaggtctcgccgttctctacatctcgcaccggaccgcagacctgcgggcgatcgccgatcgggcgttggtcatgcgcggcggccgtgtggtcggcgccttcgaaaagccgatcgactttagcgccgcgatcgagacgatgatcggtcgcaagctggagaaagcccggccggatacgcgcgctgaaacgggccgcgtcattttcgagatggcgaatatcaagcttctcgccaacagtgcgccattcgacctttccatccgcgagggcgaggtcgtcgccatcaccggcgtgctcggcgccggcaagagccggctactgtcggccatcttcggcaccggaacgctggcctcgggcacgatgacactcgacggccacatctaccgaccccgcggtcctgccactgccatcgcggccggtgtcgtgatggccgccgaggatcggcatcattcttccctcatgccgtcgtcatggccgggaaacagcgtggccgcgacgatcagccttccgcacctgcgcaaatggtatccgcggggctttttgtggggcaaccgcgaacggcgcgaagccgagaaggcgatcaagaggctgcgcatcaaggcccccggtccggacgcatcgatatggaccctttccggtggcaaccagcagaagaccgttctcgctcgctgggaagcggaaccgagccggcttctgttgctcgacgagccattccagggcgtcgatgttggcgcccggcaggacatcatcgaggcgatcaggggacggcgcgatcgcgccacgctgatcgcgacctccgatcccgaagaggccttcgaggtcgccgaccgcatcctcgtcatcgatcaccacagcgtccgcccggcgcaagaacacgaagaccaaaccgctgccgaaggaattccagcatgagctccatccaggatgaaaccattggcgagacgccgtcacggcaaggcacaggtccgtttctaagccgcgcggccgcggtcattcgctccggcgcggtcttcctgctcctcatcgcgctggtaatcggcttcaccgcggcccaacctgccttcatcaacatcaacaacctgatgagtatcctgcaggccgtatcggttgtcgccattctcggcgccggcgttaccgtcacgctcgccgtcggcggcttcgatctctcgatcggtgctgttgccgcctccagcgtcatggccgccagctattcgatgatcgtgctgggcctcgacgctttcgcgactgttccgctggtgcttgccttcggcgcgctcatcggcctcatcaatgccttcgtcatcgtgcggttgaaggtgccggatctcttggcgacgctgtcgacgatgttcctgctctcgggcctgcagctgatcccgaccgcgggtcgttccatctcggccggcctcattctgcctgatggctcgacggcacccggcgatccacgcttcttgctgatcggccgctacagcatcgccggcaccgttccggtggccgtcgtcctgatgatcgtggtcgccttagtgctctacgtcctgacggaacgcacgcgcatcggccggctgctgtttgccaccggcggcaacgaggtcgccacccgcctcgccggcgcgtccaccacgcgtctcaagacgctggcctacgtgatctccggaacgctggcatcgctcggaggcatcatcgttgccgcccgcgtcgggcgcggcgacgtgtcctcgggcggttcgctgctgatggatgccgtcgcggcctcgctaatcggcttcaccgtcatgggtctccgccgcccgaacgtgctcggcaccatcgtcggcgccgtcttcgtcggggtgctgctcaacggcctgacgatgctgaatgcgccctactacacccaggatttcgtcaagggcgccgtactggcgggcgcgctggcgctcacctacggcctcggccgcgccaatccatgaacgaacacgaatgacacgccatagcccaaggagaggctgacctatgaagaccacactgaaatccttcgccgccgcgctcatcgcgggcgcgttacttgcaagctccagcctcgcggctggcatcgaaggcgcgccggcgccgttcgacaagcgccaggtcaatatcgcggttgtcagctatctcggcggcggcgactggctgcaggccttcgaggccggcgtcaagcggcaggccgacgcgctcgggatcaagacgacgatctcccaggcccgcaacgacaacgacacggaacgcacgctgatcgagcaggcgatcaaccttggcgtcgatggcatcatcatcaacaacggtcgccccgaggtgctcaaggacgtcgcgcagaaggcgctcgatgccggcatcaaggtcgtggcttacgacgttgacctagacaacccggcgatcccgcagatcgagcaaagcgacaaggacatggcgagcctcgtgctcgagcaggcggtgaaggacaagggtgacggcttcgtcggcggcgccgtccatgtcgcgggcttcgcgccgctcgatcgtcgttatgccgtgtggaaggacttcgtcgccaagcacaagctgacggaaaaggccgtgtggggcgcggtcaacgacacggttccggcctccgtggctgatcagacgaaggcggtgcttcgcgccaatcccgatatctcggtgatcttcacgccctgggacgaattcgccaagggagccaagcttgctatcgacgagctcggcgtcgccgacaaggtgaaaatctacggcgtcgacacttcaacggctgacatccagctgatgatcgagcctgacagcgcctgggtggcgaccgccgccaccaacgcggccgtcgtcggcgaagtctcggtccgcgccgtatcgctcgatatcgccggccagttcccgggccgctcggtactcctgaagccgacgctggtgacacgcgatgatctcatcaacaacaagatcgccaagatcgaagacctgcagcagaagttcccggccttcctgaagagcgatgcggcgaccgctccgtggatccagccactgaactaacattcgagacaatcgagcgccgcccaccgaggcggcgcttttccatgttcaattcacattttacaggtgaccacatggccgacggcctcgacctcccacgcccggatttcgcccgcaacatgaagctgatcgggcactccgacattggtggacgtggcgacggattgcagctgatggttcatcggggacatgcttatgtcgcccatccctggtcgcggggtttctcgatcgtcgacgtgcgcgaccccaagcggccgggcgcggttacctatgtccccgcaccaaccaatacctggaacattcatctgcagacgcatggcgatctgctactggtcatcaacgcgctcgatctcttcgccgatgtcgagacgttttccagcgagaaggactactacaccaaatcgatcggcgagactgtcgcgggccgcaagaaaggccgatcctggacggccggcatgaccgtctacgatatctcgacgccggacaagccgcgcgggatcggccagttggatgtcgagggcgtcggcttccatcgtctctggtatgtcggcggccgccatgcctatgcatcggcgctcctcgacggcttctcggactacattttcgtgaccatcgatctcgccgatccgacgcgccccgagatcgtcggccgctggtggctaccgggcatgaaccgcgcggccggcgaaacctccacggcgccggaaggcaagcgccatgcgctgcatcacgcactggtttccggcaacacggcttacgcctgctggcgcgacggcggtttgacgctgctcgacatatccgaccacgccgcgccgaagcttatcgcgcaccgcaactggtctccgccccatggcggcggcacccactcgcctttgccgttgcccggacgcgatctgctcgtcgtcgccgacgaggctgtggccgacaatgaagaggatggtcgcaagcacacctggatcttcgatatccgcgagccgtccaacccggtcagcatctccaccttccccattcccgacgaagtcgactacaccaagaagggcggccatttcgggccgcataaccttcatgagaaccgccctggttctttcgtgtcggagacgctgattttcgcgacctggcagaatgccggcatccgcgccttcgatatctccgatccctaccgtcccatagagaccggcgcgctcgtgcccgccgcgccgaaagccatgaccgacaagcgcccaggacgcccacaggtcatccagtccgccgacgtcttcgtggatgcatccggccttatctacgcgaccgactacaatgccggcctggagatcatcgagtacggcggctgaacagcctgacacgaccggcggccgatctggatttggccgccaattcccatgctgcatgccgctcccgccaccctcaacatcgccgccgaaaacacctagcgactcgccatcttccctcccgttcatttcctcccgacatcgccttttggaaaagcgttcctctcaattccatttaatctacttattctatggatattgattattgagggatatcaagatgactgaacgaaccttttccggcctcggccgccgcgaaatcctgaagcttgccgccgtggcaggcgctaccttcgccgggaccagcctgcttgccagcgccggcaccgcggccgccgcggacgatgaaggcctttccctgaagggcaagcgcatcgccatcagcgccaccggcaccgaccactatttcgacctgcaggcctacaatgcccagatcgaggaagtgaagcgcctcggcggcgagccgatcgccgtggatgccggccgaaacgacggcaagctggtcgcgcagctgcagacgctggtggcgcagaagcccgacgcgatcgtccagatcctcggcacgctcagcgtcatcgatccttggctgaagagggcgcgcgatgcgggcattcccgttctcaccgtcgatgtcggttcgaccaactcgatcaacaacacgacgtcggacaactggggcatcggcaaggatctggcgctgcagctggtctccgatatcggcgccgaaggcaacatcgtcgtcttcaacggcttctacggcgtgacgccttgcgcgatccgctacgaccagctggtcaacgtcgtcaaatacttcccgaaggtgaagatcatccagccggaattgcgcgacgtgatcccgaacacggtgcaggatgccttcacgcagatcaccgcaatcctcaacaaatacccggagaagggttcgatcaaggccatctggtcggcctgggatattccccagctcggcgcaacccaggcgcttgccgccgctggccgcaccgagatccgcacttacggcgtggatggaagccccgaggtgctgcagctcgtcgccgacccgaattcgccggccggcgccaatgccgcgcagcagccggccgagatcggccgcacggcgatccgcaatgtcgccaagctcctcgccggccagacgctgccgcgcgagacctatgttccggcactgctcgccaacaagacgaacgtcaacgacgtgaccaaaaagctcggcatcggctgatcgcagacgggtgatgcggcaagcaccgcgtcaccctcttctccactggggtttccgacatgacggcaacaattcctccgcagcccgccgggcggcctgacgacatcatccgcttcgaccgcatcgtgaaacgtttcggcggcgcgcaggcgctggccggggcatcgctggcagtcaagcgcgggacgatccacggcctcgtcggacaaaacggcgcgggcaaatcgacgctgatcaagatcctcgctggcctgcaccagcaggacgaaggttcgatcgagatcaacggccagcggatcgatcacctgacgccgcatctcgccgaaacccacggcatccatttcatccaccaggatcgcctgcttgttccgaccttcaccgtcggcgaagcgctgtttctcggccgcgagccgcgtcttccgggaacaccgttcctcgatcgccgcaagatgcagcggcaagcgaacgagacgctggccgattatttcgggatcaagttgcccacgcatgacctgatcggcgagctctcgatggccgagaagcagatcgtccagatcacccgcgcattgctcgatcatcccaaggtactcgtcttcgacgagccgaccgcggcgcttgtgcggcgcgaggccgatatccttttccgcctgatccgccgcctgcgcgacgagggcgtcaccatcgtctacatctcgcattatctcaacgagatcgaagagctctgcgaccacgtcaccgtgctgcgcaacggcatcgacgtggcctccacaccgattgccgagacatcggccaacgccatcgcccggctcatggtcgagcgcgatatcgccgacatgtttcccaagcggcgggtcgagttcggagatgacctcctcaaggtcgaaggactgacagccgcgaaccggttttccgacgtgagcttcaccgtccggcgcggggaagtgctcgggatcactggcttgctcggctcgggcgccaaggatcttgtacgcacgttgttcggacttgaacgcgcgcagtccggccacatcgaggtcgcgggcgaggcagaccgggcgcgcacgccggaggcagcggtcgtcaggcagatcgcgctggtgccggaagatcgccggggccacggcgtcgcgctcaatctcagcgtcgcggaaaacatcacgctcgccagcctcgaccgctacacaaatttgggtgtcctgaacggcaagcgcgagaagcgcgacagcgacgatctcatcaagcggctgcagatcaagaccgccggtcgcgatgcgctggtgcgcacgctttcaggtggaaaccagcagaaggtggcgattgccaaatggctgagccgccactcggaaatctatctgctcgacgagccgacggtcggggtcgacatcggctccaaggtcgagatctacacgctgatcggcgagctggccgagctcggcgccggcatcatcgttctatcctcggacctgccggagctgatcgggatcaccgaccggatactggtcctgtttcgcggccgtgtgacgcgcgaattcatctcctctgaaaccacaacggatgaagtgctggcggaatcgaccggcgcctcggaaagattgcgccatgtcggctgatatccacatcggcgatctggccgactttaccgctgaacagagcaaggaacgctcggcgcgcaatctggcggcggcatcgctgcgcttcggttcgctgatcgccttcgcggtcatcctcaccgttttctcgctgaccgcaccctacttcctgagcatcggcaatatcggcaacgtcctcggccagtcggccatctcgggcgtgctggcgatcggcctcaccatcgttctcgtcgccggcggcgccaatgtcgtcaccggagggatcgacctctcgctcgccgccaacatgggcctcagcgccgccgtctacgcgacggtcacgcagcttggctataatgaccctgtcgcagttgccgcaagcctgctgacgggactggcgatcggtgcgttcaatgccgccgccgtcgtcttcgccggcatcgtgccgctgcttgcaacgcttgccgtgatgaatgtcgtggcgggtctcgagctggtgctaacgcaaaatacggtcgttccagcgtcgactgatttcttgaccgcattatcggcctccgacgcgctcggcattcccgtgctcgcctatgtgctgctcggcttcaccgccgtggtgaccgcgatcgtgcaatacacgccgctcggtctccggctttatgcgatcggcgaattccccgatgccgcgcgcgcggccggcttgccgctgaagcgcctgctggcaggagcctttctggcgagtggcctgtgcggtggcatcgccggcatattgtcggtgtcctatctgagcggcagcacgacgggctcgagcgagatgctgctaccggtggtcgtcaccgccttgcttggcgcggtgttctcccgcaggcttgtgccgacgataacaggcacgctgctctcggcgctcctcgtcggcttcctcgtcaacggcttccagctcctaaacctctcgagcacgctggtcagcggcgtccagggaattctcatcctgatcgtcgtctcgacgacgacattgctgcgcaagcgggagatctgaccatgtcgctttcggcctcccactctcccgtcgcgccctggcaccaccgtgtgctctccagtctcgcgcgctacggcctgatcctggcgctcgtcgtcgtctttgccgccttctccctggcaacgccgacattcctgacagccggcaatctgcagagccttctcgtcaacaacttcacgctgcttgcgatcgtctccgtggccatgaccttcgcggtatcggccggcggtatcgatctctctgtcggcacggcggtcgatttcgcgagcttcgccttcgtctcgctggtccttgccgggcaaccggtagcgatcggcctgctgggaggccttgccgctggcgcggtcgtcggagccttcaacgccttgctgatctccggcatcggcgtctcgccgtttctcgcaacgctcggaacgctgttcatcggccgcagcgtccagcaactgctgaccaatggcggcaacccggtctatctgccgccatcgggcgtgcccgacgccttccgcttcatcggccacggcgcgatatcaggctttccgctgccgttgctgatcgcgatcgtcgtcattgccgccgccgcgttcgtcttcgcccgcacgcgcttcggccgcgtggtgctggcgatcggcatccagccgagcgtggtgcgttattccggcatcggccttggccggcacgtcgccgtggccttcattctgaccgctctcatcgcggccatcgccggcctgattctcacggccaccgtcaccgtctacatcccctcctctggcaacgcgtttctgctgaacgcgattggcgcgagcttcattggcacgacgctctcgccgctcggccggcccaatatcgcaggcaccgtgctcggcgtgctgctgctcagcatcgtcgccaacgggctgctgctcaccggcctgaatttctactggcagcaggtcggcaccggcacgctcatcttcgccgtgctcgccttcagcttcatcaaccgaaagaccggtggcgcctgattggcgcgccccgacatatgcaggaagaatgacatgagccgtgaaatcaggttgaacgccttcgacatgaattgcgtcgggcaccagtcgccgggcctctggcgccatccgcgcgacaagtcctggacctacaaggacatggactattgggtgcatctggcaaaaacacttgagcgcggcaagttcgatggcctgttcatcgcagacgtgctcggcgtctacgatgtgctccacggcaatgtcgatgcggcgttgcgcaattccgcgcaggtgccggtcaacgacccgctacaattgatcccgaccatggcctatgtcacggaaaacctcggcttcgggctgacggcgtcgctctccttcgagcacccctacaccttcgcccgtcgcatctcgacactcgaccacctgacaaagggccgcgtcggttggaatatcgtcacctcctatctcaacagcggtgcgctcaacatcgggcaatccgcgcagaccaagcatgacgaccgctacgatctcgccgaggaatatctggaggtctgctacaagctctgggagggcagttgggaagacgacgccgtcgttcgcgatcgcgccgccggcatctttacgcacccggagaaagtccacccgatcaaccattccggcaagcacttcactgttccgggcattcacctcagcgaaccctccccgcagcgcacgccggtgctctatcaggctggcgcctccagccgcggcaaggatttcgccggccagcacgccgagtgcatcttcgtcgccgcgccgtcaaagccggtgctgaagcgctatgtcgcgaacgtccgcgaagcggccgagcgcgccggccgcaatccgcgcgagatcctcgccttcaacctccagaccgtgatcctcggcgaaaccgatgcggaagcgaagaagaagttcgacgactttcgccgctacgcctccttcgaaggcgcgcagacgttgatatccggttggacggggatcgatttcggccagttctcgcccgacgagccgcttcgccaccgttacaccaacgccgtacaatccgccgtcgaaactttcaccacgatcgatccggacaaggtctggtcggtacgtgagatggccgactgggtcggcgtcggcggcttcggaccggtcttcgtcggttcgccgcagactgtcgccgacctgctgcaggaatgggtcgaggataccgacgtggacggcttcaacctcgcctatgccatcacgcccgagagcttcgaggatgcggtcgatctgctcgtgcccgaattgcagaagcgcggtgtctacaagaaggattatcgccagggcaccttgcgcgaaaagctctttggtcacggcccgcgattgcaggcgccgcatccgggcgcgaactatcgtcggttcgacagacagagaacgctggagcgacgaacagggtaacctccctttgccatctcgaaatgccgcggcaatccgatcgcgatggagaggatgttgttcacgcaggcaaggacatggctcgcccgagccaataagtccaccgcctgaaagatgcttcgcaaatcttcctcggagcggggcgaggctctatttcaggggcacaggttcacccagcgtatgcatcagccggttggcccagccgaagatcgaggtggacatgatcaggtcgaggatttccacctcgtcgagaccgacggccttgaggcgcgccatgtcctcatccgttgcagccggcggaaaggcggagagcttgacggcgaaatcgaagatcgcctgctcgcgctccggaagctttgccgccgtctcgttcgcgaagatttcctcgacgacctcggtcgtcttggtcgcctgattgtaatgacgggcatggactgcaatgcaatagatgcagcgattgacgatagacgagccgattgcgccgagttcgcggctgccgcgatcgagcccgtcgcggccgtacatgatgccgttgaacagcggcgagcgatgcagcagcgattccggatcatgcgcgagcgtcagcacgtaatcggagatcttcttgttcgccggcgtgatcttcatcgcctccatctgctccggcgtcgcctcgtcgagcctgactggggtgacgaaggggcgccaatcgagaacttcggtcgtgtaatcctggacagcatcgctcatcggctcatctccatcaggcgaaggccggcgacaaggcgggcctggtatccgagaaaggcggcaagttcggcaagccggacgatatccgcatcgccgacgccggcggcaagaagcctgtttatgtcagccttggtcgccgtgcgcggacggcaggtcagcatgtctgcatggtcgagaaccgcctgtagccatggatcgtccgatgtagcatccgcatcaacgaggccgacgagatcatagaaatcctcgcattgggtgaaatgctcgtaatagtgatccttcatcctgacgtcgccaagtcgctcggacgcgcgcacggcaatcagcgcccgcagtgcatgcgacaatccaccgggttccgtcggcgtcagcaccgccttgcggctggcctccgtcaaggccatcagctcggcgcggcgcgcaagaagctgtttcaaccggtcatcgaaggcatcgccgaccagggtttcgatcaattcagtcatcgtcaactttcaagaaggaaggggcacggggggaagaaagggtagccttgtctggaaggttggccggtgtcgaaagccatcacacctcgcgtccgtccttgtagcggtaccagggcaggatgaggcgggcaaaacgggagacgaaggggtgaaaaggcactggcggcggcgcggtcggcctcagcgccagcgcctcgtccggcacgccttcgatcgcatcggccagaaccggcgccatggcgcaggccagcgccagaccgcggccattgcagccgatccaggcgcaaagcccgtcatcgcgcctgtgaagccgtggcaatcggtcgaccgtcatggcgatgcgcccaccccagaatgaggtcatcgggttgtccggcaagagcgggaacatctctttcagccgcttgccgaccatcttcggcaggcggcgcgacgcggcaagctggatcgccagcgccccgccggaaacaagctgtccgtcgcgggtcttgcggaaatagcgcaagtccatgcgggtgtcggacgatgcctcgtcattcggcaggatcgtgtctgcgagtgttccgagcggctccgtgccggcctgataggaggtgacgggcacgatggaccgggcaagttccggccagagatctccggtataggccgccgtcgccagacccacttttgccgcacgcacacggccctgcggcgtttcgacgatccagccctcggcatcacgcacaagcgccaaggccgggctgttttcgtggatcacaactccctccgacgctgcgccgcgggcaagaccgacggtgaaggcgtaggggtttatatggccgccacgacgatgttcccacccgccgcaatagacggctgtgccaaggcgttgcgcaacctcatcgaccgacaatgcgccggtctccgcaccgcttgccgcccattgcgcggcaaggcctgcgacacgcttggcgcggcccggcgtatgtgccggctgaacccatccgcttcgccgcgcgtcgcaatcgatgccgtagcgctccaccaaagcgtagagctggtcggcagcgcctttgacgagagtgatgaaccgttcgccccgttcaccaggccagactttcctcacgccatccggcccatggcgggtgagcgcggatatgacctgaccattggcacggccggacgcaccgtaaccgacacgggccgcttccagaacaatgacgcggcggccgcggcgggccagttccagcgcagtcgaaaggccggaaatacccccgccaacaatgacgacgtcggcatccgcttcatcctgcagggccggcgcctcgaatttttcacgcgacagcgacatccagagggaagaaggtttatcggcaggccacgcactcattctgcgaggatctccagttcgacaccgcaggtttcgcgaagatcatgatgtcccgcctgggaacccgacaaaagaaacttgctgctgccgggcctgatcgagacgccctcccccgtgccatccttcggcaagtccgacagcgatgccgcctgcggcaggatgacggacgcgagacgtgcagtgccattgggatgcaccagcgtttccggcagccacaaaagctcggccgtatggtgctggcaaacaaggcattgcagaccgggcgtggatttcgggtctatgcgggcaacggagaaactcaactcgccgaccgccgtcaaacgtgaaaaatgtcgcaccggctccgcgccgacaccagctgacgcaagcgctgcggccgaggcctctatatcacggcttccgagcgcaatgccgcgaatgccggctccctgcgacaggagctctctccatgtcgtattggcgtccgtctcggcaacgatgcccatgatctcgatatagctgccatgcaacatgacgcagcgattggcggtacccatggcggcgctgtgcagcgtcttcggtgtcacatggaaaccggccgcctcgaatgcctgccctgccgcgtcgagatcggccacgaggacaacgacgtgatcgagagcaagcgagatcatcagccggtcaccgtcatcttttcgatgccgtagacgcggtcgacgacgatgagggcgacgacagcgagcaggagttgcaacgtgctgagcgctgcgatcgtcgggtcgaactggttttccatgtagctcagcatcaccaccggcagcgtgttggtgccggcgctgccgaagaaatagctgatcggcaggttgtcgaaggaggtgaggaaggaaaacagcgagcccgccatgatgcccggccggatcagcggcagcgtcacgtgccagaaggtcaaaagcggattggcgccgaggatggccgccgcctcttcataggagcgcggcatgcccgcatagacgcccgccaccgtgcgaacgatatagggcaggcagacgacggtatgggtgatcagcagcgcggtgaacgaaatgccgacgccaagccaggagaggaagaacagcgaggcgaaaccgatgacgatcatcggcatggacagcggcgacagcagaaacgtcatgacggcgctcgcccaggcgctgcgcgagcgcgccagatagatcgccgccggaacaccgatcaggcaggaagcaagcgttgcgccgatggcgatctggaaactgacaatcagcgcatcgatgaacggctggtactcgaaaatccgcccaaaccacttcatcgaccagccggggatcggaaacgagacatagcctgcggacgtgaaggacacgacgacgacgatcaggatcggcgccagcatgaagacgaagaagaggacgacgaaggcggcaaggccgatattgatccagtcgcgtttcatcgctcaggctcccttgcggcgcacgaggcgcaattgcaggaacaggcaggcgaccgcgatgacgagtagaatggtgctcatggcgctcgccatgccgaaatcgcgcgtcgtgttgaactgctgatagatcatcaagggcagcgtctgcatgccaccgccgagcaggaccagcgtgacgaagctgccgttggcgatcatgaagacgaggatggcgcccgtgccgatgccatcgagcgacagcggtagcgtgacctcgaaaaaggtgcgcaaccggttggcgccgaggatctttgccgactcttccagccgtgtatcgatgccctgaagtaccgtcgcgatcgacagaaccatgaagggcacaagaacgtggacgagcgcggcaacggcgatttccggcgagttggtcaggcgcagcggcgccgacagaataccgagctgatcgaccaggagattgttgacgaggccgcggcgggcaaacagcacctgccaaccgaaggtgcgcatgatgatcgaggtcagaagcggggcgatcaaaaggaagatgatgagacctgcccagcgtccggccttgcgcacgaggaaataggcgaccggataaccgatcaggatcgagatcaccgtcacgccggccgacagagccacggtctgggcgatgatgccgagatagaaactgtcggtcaccagagagacgtagcgcgacagggtgaaactgccatcttccgccagcacgctgcgcatgccgttgtcgaaaagcggcaggacgaagaagacagccaggaacagtaaggcaggcagcgccatgagatgcggcgtcagcagccgcgggcggcggcttgtcggggcctgttctatgctggtctggctcatgttttcctatccgttggcgcgcggcgggctgcgtcgtttcaagacgcagcccgaccgggttttagcggccgatctcgcggttccagcggtcgacccactcattgcgaacctgggcgatctgctcgtagggcgggaaggcggtgttctgccagggcgtaatgcgcggcttcagcttatcgctgtagactacgtcggtattggtcacgccatagttcatgatgtcggcgaacttggtctggttctgggcatccaggacttcgttgatataatcccaggccagcggattggcattcttcggcttctgcacggccacgccgttgagcgagccgccctcttccgggttgatgaagtcgatccaggtggcgccactgtcatagtggttccaggtgcggccatcgaaatagatgccgcaatcggcctcacccgaagacaggtggttgaagaaatcgttcggcccgccccagaagacgaggttggacttcattttctccatcgccttgaagaatggatcaacattgtcgacaccgccacccagcgcctttgccatggcccagatcagcatgatcggggtaacggcataggagatcgacggaacggaggcaacgagatcgcccgaggatacgcgatcgacgaattcggcaaacgacttcggcgggttcggcaggcgctccttgtggaaggtgatgccgccgacgccatagtcgaacagcgtacccttgcccatgacgctgtcggtcagttccttcgggatcttggcaaggttcggcagcttgtcgacggtaaagtcttcgacgaggtcggccttggccgccgtcagcgccaggtcgggcgtcatgatcagcacgtcgacaggtggcttggcggcattggcctcgacctgcgccagccattgcggcgggccaccgagggagacgtttgccttggccttggtcttggcctcgaacggggccacgaagcaggtgcgcaccgcctcttcccagacgccaccgaaggcggtgacggtgatttcgcccgcctgcgcattcgccagacgcggcaagccgcccgccatcaggcccgcgccgagtgcagcgctgccaccgaggaagtgtcttctcttgataatcgtcatcgcagttctccaaatctggaatgaggtggcatcagcatttcattggcatgcgtatcaaaagctgccgcggcagcctcaagcttttgccgggcggccctcactgccgcctcgcttgccgcaatacgcggaaaaccatccggcagttccttcagcaccgtatcgaaaatctcgcggcggcggcgctggcgaacggcgccgggaagcgccacgaggccacggttcaagcggtccatgacgctcgccgggaaggcttcgtcccaacgctcacgctcggctccttgcgtaacgccggatgtgctttcacccatcgccttgcgcagggcttcggtcgcggccgcatcgacagcgcttgcgacaatcgccacgccataatcgctctcggcggcttcaactgtgacgaaaccgttgatcacgtctcgcagcaccgcctgcggatcacggccggtcggatcgccccagccgccggcgcccggcgtcaggaaggtaacggtatcgccggcattgacggtcaacacgtcgatcttgccgagatgacgttcgccggccttgccacggttgagaatgagctggcccggcatgccgggcttgccgccattcgagccccaggggcggaacagaagacgttcgaggccacggccgagaacattgctgtcatccgtcaaaacgcggaatgtcagttccatgccgcaaccgccgcgccactgaccggcgccgccggaatcagggcgaagcgcataggtggaaatctcgatgccaagttcggcctcgaccgtttcgaccgggttgttggcaaggttggaaatgccactgtcgcggccgtcgataccgtcgcggcccttgcgcgcaccggtgccgccgatcatcggctcgatgacctgcacgcgccgtccgccatggccatccggctccgccatgacaacgggaatgaccgtaccggaggaagccgccggcatgacatccggcagcgccttgccgaaagcgccgttcagcacgtcgttgacgcggatggcggcggcatggcgcacaccgacagccgccggttcctgcgggttgacgaggctgccttctggagccgtaatcttgaccggcgccagcatgccgacattgagcggcgtggtcgggtcgagcgtattaacaagcgcaagcacgcgcagcgtcagccaggcatgcgggcgtccgcgcgaaggaatgttcatcgcggtcgcgacctgtgggtcggtgccggtgaaatcgagatgtacctcgccatcctcgaaggtcgcagacagggcgatgcgcaccggcaggcgggtcgccgcatcgtcgtcgagatagtcggagaagctgtatgtgcctgctggcacgcgtttcagcacgctgcgcgccttttccgccgaataggcgacgagatcgacggcggcggtgacgacggtttcgacgccatgctggccgatcgtctgttccagacggcggcgaccggcggcgagtgctgccagcatggcacggatatcgcccatattggcatccggcgtacggctgttggcattgaggaagagggcgacgtcggggttcatctcccctttcttcatcagcttgaccggcggaatgcgcaggccttcctggaagatttccgtattgaccggcgagatgctggacggcacgcgaccgccgacatccgagcaatgcacgaagcaccagccataggcgacgatcttgccctcatggaaatagggctcgatcatgtgcaggtcgggcagatgggtggcgagaccttccgaacgatagggatcgttggtcaagatgacatcgccgggttcaagcgtgccaacggcggcgatcgacggggcgcattccagcccgacaaagccggacacaccgatcgagcgcggataggcgaagaagcgaccatcaagacctgccagcgcgcaggcgaaatcggcggtttccttgacatagagcgtgcggccggtgcgctgcagcgtcaggcacatttcttcgctgactgcggcgagcttgttgccgagaatggcgagcgtgacgggatcaagcttcattgcgcatgtctttcgagatggaggtttccaagagcatcggcacgcgccgaccagccgggaagaagaacggtcgtcgtatcgtcctgttcgatgatggcgggaccggtgatccggtccccggcgccgagcgcgctgcggtgatagacgccagccgaaacccattttccgccgcggaagagcggccgctcgcccttgggtgaaggcgcgcccgtgccggcggcaatttccggctgggtgatgttttcggtgacgccgacgacggccagacgcacggtgccgagttcgaccttcgtctcggtatcgcggaagccgtagatacgctcgtgttccagatggaaggcttcgcagatcgaggtggcgtcgcgggcattctcgtccagcttgacgcgcaactcgtaagcctgaccggcataacgcatgtccgcgccccgctcgaagcggcgggtctggccggcatcgccttcgcgatcgagccagtcggagccttcgtcttccagttccttcatcacgtgcaacatctgcgcggcgctcgtctcgtcgacggcgcggcgcaggctgcggacgaagtcgcggcgcaggtcggctgccgccgcgccaagcgcgcaaaacgtgccggcggccggcggaatgactacgcggccgataccggcctcttcggccagaaggttcgcatgggtcgggccggcgccgccgaagggcacgagcgcgaaggcagcaggatcgagaccacgcgaggcaagcgtcttgtagagttcggttgccatgccggcggtggtgacggcaagcgcaccttcggcggcaagggctgcgccatcgtcaccggtcaggccgatgcgccggccgacgtcggccagggcggcgcgtgcggcgtcgatatcgagcttcatgcggccgccgaggaagccggcgggatcgatataaccgagcgccagatagcaatcggtgacggccggctgattgccgccacgaccataggaaaccgggccgggcatcgcgccagcgctctgggggcctaccttgaggagaccgtgggcatccacccaggcgatggaaccaccaccggcgccgatggccgacacatcgacgaccggcagaaccagcggcaggccgccgatatctgtgcgtgtcgcaagctccgccgaaccggcctgcgccaccgcgatatcggaggaggtgccgcccatgtcgaaggtgatgatcgatttcacttcagcggcttgcgccagacgggcagcggccatgacacccgaggcgggaccggacagaatggtttcgaccgggcgttcatcggccgagacgaggctgagcgaaccgccgttggacgccgtcacaaggatcggggcaaccacgccatcgcgttccagccccttcgtgagaccggcgaaatagcgctgcatcagcggctggatataggcattgaggcaggcgaccagcgtgcgctcgtattcgcggatttccggccagatggcggcggcagaggtgatcgacaggccaccggccttttccgacagcgttttcgccatgccgatttcgaccgacggcgtcgtatagccgttgatcagcacgagggcggcggcatcgacgccgagcgacttgagttccgcggctacgcggtccagctcggcctcatcggcggctttcgtgacctcgccatgtgcggacaaacgggcatcgacctcgacgatgcgcaagcgcggcaccagcggctcttccttgctcgcatggaagtcgaacgacgacggcatgcggctgcgggcgatttcgagaatgtcgcggtaacccttgctgacaacgagcgcaatggtggcgccgcggcgctggatgatggcgttgaggccgatcgtcgtgccgtgcatcagcgtgccgacatcggcggatgtcatgcccgccttcgtcagaaggctctgcagtccctcgatcagcgcccgcgacggatcgtccggcgtcgatggctccttgtgataggtcaggctgccgtcattcgggttggagagcacgaagtcggtaaacgtaccgccgacgtcgatcccgatgcgcgcaccagtctttgacatgtttgtcactttcacaattactccgcgctgacgacgacgccgtcctgcggcgcccagtcgagtgtcacggcctggccgagatggtaggtggtggcgccgagcggaccatcggcctgccggtaaacgaaaatctcccggcctagcgagggaacctcgacctgataggcggcatagttgccgcggaagagcgcgccgacgatacggccggaaaagcccttgaccgcctcaccggagaccagcgagatacgctccgggcgcaccgaaagaagcagcgactgaccgacagcctgcggctccggaagaggcagattcacgatcccctgcggtccggccacggcaagcacaccgccaccttcacccgcggtgccttcgaaaatattggaagtgccgagaaactccgccacaaaacggcttttcggtcggtcgtaaatgtcggcaggcgcgccgatccgcaggatacggccaccattcatgacggcgacgcggtcagccatcgacatcgcctcttcctgatcatgcgtgaccagaagcgccgtgatgccgagacgctgctgcatgccacggatttcgaactgcatgctctcacgcagcgacttgtcgagagcaccgagcggctcgtcgagcagaagaaccttgggattaacgaccagcgagcgggcaagcgccacgcgctgctgctgaccaccggagagctttgatggataaacgtcgcccctgccctgcaattgcacgagatcgagcatttccgccaccttaccgtcacgctccgccctcgacatccctgccatgcgcaggccaaatgcgatgttttcggcgaccgtgcggtgcggaaacaggctgtaattctgaaacaccatgccgagctggcgcttgtgcggaggcaattgcgaaatctcctccgccccgatcttcaccgaacccgtgtccggcgtctcgaagccggcaaccatgcgcagcgtcgttgtcttaccgcagccggacggcccgagcagcgcgacgagctcaccggtagccacgtgcagctcgagatttctaacagccgcaaccttgccgtaggatttatgaatccccgccagcaaaagcccggtatcggcctgacgccctgctcccgtcatcaatgtcccggcctttcctctacgcgacgaactcaaaaagatatattccaatccatcttttgtagcgctacaatattctgcgcgtgacttctgtcaaggattgcttttctgactttgccgcgatttatagcagtgcgtatttcgtagtcacctcgatgtggaattcagctcaaggcatgccatgacgaaatctcggaacgatgaagccatcaccatgcagtcggtcgctgtcgcggccggcgtatcgccgatgacggtctcgaacacgttccgctatccggagcgagtgcaggaagaaacgcggcggcgtgtgctcacaatcgcggcggaattgggctacgtgccaaaccacgccgccggcaatctggcctcgggccaaagccgggttatcggcgccgtcattccatcgatcaagaattcgagcttctacaactatgttcgcggcatgcaggatcgcgtggcgagccagggttaccaattgatattgaaactggcggatacggttagccaggaagcggcggcgatccggactttcgtgggcctgcgtgttgccggcgtggcgctcgtgggcgacgaacatgaaatggatgcgctgaccctcctgcggaagaccggcgtgcccgtcgttgagtcctgggtatacaacaacccatttgacatggcggtcggctattccaccgccgatgcaactcacgcaattacatctcttctcatcgaagcgggacgccagcggatcgggtttgttggctatgacggcgatgtttcccgtcgatacacagagcgtgtgccggttttcaggcggtgcgtggagagtgcaggccttgatagccaccggatcgttcttgtcgatcaggcagacggcttcagtgccggagcgaaggcgcttgaggggctgtgcgcgatcgacccagacatcgatgcgatcgtctgccctactgacattgtcgccgccggtgtgctgtttgaatgtggccgccgcggctggaaggttcctgaccgcctcgctgtcgccggctggggcgactatgagattgcgtcagaaatcacccccggaattaccacgatacaaccccatagctatgaaatgggccagcgggcaatgacattgattgtagagcgggcaagcggtatcgaccgtcgcggcgtcagccatgacacgggttttcaagtcgttcggcgcgaaagcgtgtgacagcgggcgcttctgagcggacgcgaagattcgacagcttatttgcctatcgcagccatggattgatcacacttagaccggcggcctcgaacgggctcgtatcgcgagccgccaccccgaaaccattcgcggccgctgttgccgcgatatatccatccgctttggcaatcgcctttcccgacaaacgagcacgcgccatcagttgcgcataggactgcgacgccgcgagatcaaaagaaaggatacgcccagcgaaaagcggaagtacctcaccttcgagccgatcatgaagaatgacctggcgtttgcccgagggcagagcagagatcccaaaacgaagttcagcaatcgttacagcggaaagaaaaagcgtctcaatcgcttgagcatccaaccagtccaccactgcctggtcaggaactggcttccaaggctcggatatcacattggtgtctagaaggatcattcgaaagtcataggttcggcaggcgtatcatcacgggtgcgccacagggcttcgacatccgcattggagagctctgcattgcgaccaatacccaccaacagagaaccaagcttaacgcgctgagaagggcgaaccgcggcctcgataatatcgcggatttcagcctctgtgctgcggccattgtgagccgcgcgcgcgcaaagcgcgatgtgtttcatcaggaagattgcggatcgttactgccggcattgatatcacctcggctttagtgatgacactgatatcaatatatgtgaagtgacaccaacttccaaacagaatttgggttgcgggcaaagcggctctggcgggctcgcccgacggtgaaacgcgcaatcacatcggctggcatgacggtctcgtggagtttaacatcacgaccccaaccagtcacgacgagctcctatctgggctccgggttgtgcttaggaggcgcctctccgtttccctcggcgcgatcccggtgcaaggcagcgcgcgccagcatcatcagcgtgatgggtgtcgttaccgtcacgaaaatgccgatcagaatctcgtggatcgccaatcgcgacgacgccacggaaaagaaaatcatcgagccgagcatgacgccaccaattccccagctagtcccgagggtgggcgcgtgaatgcgttggtagaagcttggcagacgcagaaatccgatcgcgccaatcagcgccaaaagggcgccgagcacgagaaagaaggcgaccagcgccgccacccaaacaggcatatccatagccgggtgcatcattcgatcacctctccgcgcataaggaatttcgccagcgcgacggtcgcaacgaagccgatcatgccgatgaccagagcggcctcgaaatacaccacccgtcccgttccgacgccgaatgttaccagaagcagcatggcattgatgtagaacgtgtcgaggccgaggatccggtcctgcgcgcgcgggccgacaaacatgcggatcgagacgatggccatggcagcgacgagcatgatctgggcgaccgacaaggccgtgaagaggatgattgcactcatgcgaatatctccagcaacagcgcctcgtagcggttcttgatcgtatcgcgccagacggcctcgttctggatgtcgagaacgtgcagcagcaccgaatgatcgttggaatcatattccagccaggcggatcccggtgtgctcgtcaggatgacggccagtacggcgagcgcgaactggctgcggagttccagattaatcgtgataaagccgggattgtgccggcgtttgccgctgcgcaggatgatccacgcgacgtcgatgttcgacttgacgatatcgcggaaaaccaaaccgaagagcttcggcaggagataccacttcttcagccgtatcggctccggctgcagcgacgccatcgcccaacccgcaaagaccgcaacgataaggccgagaatgaaatggccgagggtgaagccgttgagcagcaaccacataatgaggaggcatgtcgcgagaatgggatagggaagcatcactcgccctccgttccagctttgacgcccttgatcggcagcgcgttgttgaccgcgtcgatgtagatcgacggcttgctcagcgtccggatcgtcgtatccatgtattgcatcgccggcccggcccgcacggtgagtgcaagcgtcagggccaagaggaacatcaccggcacgatctcgatcaccagcacgcggggaaccgttccctcgatcgagctccagaaggtgcggatgccgacgcgcgtcatggaaatcaatgcggcgatgcccgagagaatgacaagaacgaccagcgcccagatcgcggccgtgggcggcacgccgatggagccggtgcccatcatcgccgaaagcatggcgaacttggcgacgaagcccgagagcggcgggaggccggacaggaggataccacaggccgcaaagcagatgcccaaaacggccatggtgccgggcatggtcacgccttcttccttgttttcaggctcgtcgtcggcctcgccataggcctccatggtcacggctagcacgtttgcgccggcatcctggccgcgctcgacgagttcgatcagcatgaagaaggcgctgatcgtgagtgtcgagctgacgagataaagcagcgcgccggaagagacggcgccgtcgttgatgccgagcaccatcagcagcgtgcccgaggagaccagtacggaaaagccagcaagccgcccgagcgcctgcgacgcgagaacgccgacgatcccgaagatcagcgtcgccatgccgccataaagcagcaccggcgcaccgaacccggccgaaggtccctcgccgaacaaaagcattgtcagccgcaggatcacgtagatgccgagcttgctcatgatcgcgaagataccggccaccggcgccgatgcggcgctataggcggtgggcagccagaagcacagtggccacatgccggccttgatgaggaagacgacacccaatatgccggcgccggcctccatcagcatacgccggtcaggctcgatctcggggatgcgggccgcaaggtcggccatgttgagcgttccggcggttccgtagatgaggctgacgccgatcaggaacagcagggcggccacgaggttgatggcgatataatgcatgccggccttgacgcgcagcggaccggagccgtgcagcaggaggccataggatgctgccagcatgacctcgaagaagacgaagaggttgaagaggtcgccagtgaggaacgccccgttgacccccatgaggagcaactggaacatgctgtggaaatgcgcgccaacggcatgccagcgcgccagcgagaagacgagtgccgacacggcaagcagcgcggtcagaagcagcatcatggctgataggccatcgagaacgagcacgatgccgaagggtgccgaccagttgccgaccagataaacgccctcgaagccgttggggccgctttcgatcctgaataggatgaaggcgatcacggtaagcacgatcgcggaggcgaggctgaccattgccttggcgacccggcgacgctcgtcgatgaacagcaggagcgcgctagcgatcagcggaattaggatgggcgcgacgatgagatgatgggaccaaccgttcatttcggctcgttccttccgtcgacatggtcgctgcccgtcagcccgcgcgacgccaggaggacgacgagaaacagcgccgtcgtcgcgaagccgatgacgatcgcggtcagcaccagggcctgcggcacaggatcggcgagaatggacggatcgtcattgcccaggatcggcggcacgttggccttcacgccgccgacgccgaatatgaacaggttgacggcgtaggagagcagcgaaagcccgataatcacctgataggtgcgagggcgcaggataagccagaccccgcagctcgtcatgatgccgatggcgatcgacagaaccagttccatcaccgctcctccgatttggccgcttcgatcgtgcgcaagcgattgatccgcagtgattggtgggcaagggcgacaaggataagcacggtcgatccgacgaccagggagaagacgccgagatcaaagagcagcgccgtcgccgccggtattttgccgatcaggggcagctcgagatagcgcgaatgcgaggtcaggaacggatagccgagcaaccaggcgccggcgcccgtcaacaccgccgtcaacagccccgcgcccatccagcgcagcggcagaatgcggatgcggtcctcggcccagcgcgtaccgccggcgagatattgcagcagaaaggcgatcgagagcgtcaatcccgcggagaacccgccgcccggcaggtcatgcccgcgcatgaagagatagaccgagaaggtgatgatgacggggaacatccactgcatgatcaccgatggcacgagcaggtagtcacgcaccgtgtcgcccgcggaccgttcgggccgctcctcgtcgaagcgattctgaacctgttgctgctccggcatccccatgctgtcttcagccgggcggaaacgacgcagcagaccgtagacggtgagcgagacgacgccgagcaccgcgatttcgcccagcgtgtcgaagccacggaaatccacgaggatcacattgacgacgtttcttccgccaccgagcgaataggcatgctcaaggaaatagttggcgatcgcgtcaggcaccggcatcgtcatcacggcgtaggcgattgccgacatggcgacgccgcagatgacggcgagcgcgaagtcgcggaagcgccggaaccgggcgcggatcgtcatggattcgcgaatgtcttcggatcgctttggcagccaacgcagtcccaacaggatgagaacggtggtgacgatctccaccaacagctgggtgatggctaggtcgggtgccgaaagccatacgaaggtgatgcagacgatcaggccgacaccgccgagcatgatcagcgcggccagtcggtggtatttggccgtgtaggcggttccgatcgccagacacactccgatcatccatagcgtggcgaagacaggatcgacgccggaataggcaaagggacgatgctcaaagccgcgcgagtaaagtggcagagcgccggcaagcagccccgcgagcaccagccaccgcaattgcggctgcaacttgcgtgttcccaatcgccgctcggcaacgcgcgcccagcgccaggagacttccacgaggattcgctcgaaaatgcgctgccccttcagccgccggataaagggcggtccatcgtcacagcgagacaggtaacctttcaatccccagtatatcgcggttccagcgatcagcgcgatgacactcatgatcagcggaagattgatcccgtgccatagtgagaggctgtattcaggcgtgtcgtctctcagaacgctgatcaccgcgctatggagaaatggtccgatcgagagtgctgggacgataccgacgaccaggcacagcacgacgagaaactcgatcggaaagcgcatccagcgcggcggctcgtgcggatgcgcgatcggcaggtctgtcggcggcggcccaaagaaaacggtgtgaatgaagcgcagggaataggccacgctgaaggcgctggcgagcgttgcgacatagggcagtattctgtcgaggatggaatcggcatgggtctcgaccgcttccgcgaagaacatttccttcgaaagaaacccgttcagcaacggcacgcccgccatggcggcgctggcgacgacggcaagcgtcgccgtgatcggcatgaaccggtacagcccgctcagcttgcgcatgtcgcgcgtcccggtctcgtggtcgatgatgccggccgccatgaacagcgacgccttgaacgtcgcgtgattaagcatgtggaaaatcgccgccaccgtcgccaatgggcttcccaggctcagcagtgtcgtgatcaatcctaaatggctgattgtcgaataggcgagcagccccttcagatcgcgctggaatatcgcgaagtaggcgcccagcagcaaggtcatcatgcccgcggcccctaggatccagaaccactcgtaggttcccgacaggacgggccagaaacgcacgagcaggaagacacccgccttcaccatcgtcgccgaatgcaggaatgccgacacgggcgtcggcgccgacatggcgttgggcagccagaagtggaatgggaactgggcgctcttcgtcagagctccaagcagaatgaagatcagcgcgggcacatagaggctatgatttcggatcaggtcgcctgagttcaggatcttgtccagatcgtagctgccgacgatcttgccgagcaggatcagaccgatcaacaaggagaagccgccgatccccgtaatcgttagcgccattcgcgcgccatcgcgcgcggcggaattgttgtgccaatagctgatcagcaggaaagagaagatgcttgtcagctcccagaacaccgacagcaggatgacattgcctgatatgacaatgcctatcattgcacccatgaatgcaagcaggaacgagaagaaccgcgggaccggatcgtcttccgacatgtaatagcgggcgtagaggatcaccagaaagccgatggaggtgatcagcatggtgaaaatccatgcaaatgcgtccattcgcagcgtcagatcaagaccgagctgcggcaaccattccgcgttaaagcgaatgacgtcaccatcaatgacttgcgggtaaagagaggcggtgagcaaaagggaaatgaggacgacgaaaccagctagaccagcgggcagacgacgtgatgccgttctcaagaaaaagaccgatagaatgcttccgatgaacggcagaagcagcagcgcaacgagcatgaacggttcggctgttatcccaatgcgtcgatccttttcgaattatgatcccccggctgagcaccttaggtacccacctagaaatctctctgaaattagcctatatgatctatgtcaaccaatatgggcgatagtcgaacatgggtcaagcttacgaccataagattttgtcaccggctctttgtcgagcggcccgcggtcttctggactggacacagctcgagctgtcggcgcgtgcgggtgtgtcgcgaagcacggttcgcgattatgaaggtgggcgccacgatgtccaccgtgcgacggcggcacaattgaagttcgcgctggaaaatggcggtgtcaatttcattgctctggatgacggcaagatagccgtttgcgccaaccaatcgccggggcagccttgacgtatggtaaaatgtggatctttgcgcatgagtaagaaacccgaccactccgcggaccttcttgtgacggagaaggacggtgtggtggcaaggctcgtcgtgcgcggcgcagcgcgtcgccccgatgccttgcaaggctttttgaatgcctttgcctcggcaatgctctcctccaacgcctgtccaacggcaagcttcatcgcgggaaaggtgcttcagcgaacggaacgaacggggattttcaatctcgaggaaacggcgtcgcgcaagcaatccttcgaaacggcattgcgccacgctcgccaatcatccggctttccccaccaaggcttggccaatgaactcgctcagctgagcccatatattgcctggcgaagcggtcgctccggtccgtttgcgagcgtgaacttctcgaaagcgcacgcgcacagcattttgatcggtccgtcgggcattgaaactcgaccagacatccggatttgtttgatcctgatggagccgtatacgcggtttcccgataacgtgcaggcccgctccaaggctttcctgcttctaagcccctcggaaatatgcatcgatggtgaagcttggttgagggctgacgcaggatcggttttcgcggtcgaggcagggcagacattcgcgatacggtgcacctctcaaccgctactcgccatctggtgccaacttgaagagggcttcaagtagccgctcgtttccagtccctcccctctttacgcaaacgattttgccgaaggtttcggaccgagatacggagatgccgcgcggctttcgcggtcgtcgattccggatccccttccgctcattcccgagcatgctcctccagcgtctcgccgcaggtctaatatttggtcgactgcttcgggcctcccgcgaatagcttgtgaaaatcgagctatcgcgggctagtggcaaaatagccgcgcgcgaaaaatatgaattctataatcaactttaatattgcgccgctccgctcttggatgctagcagcgtcctatgaccagcgctcaccgtcctgaaattcttgatacgtttcttcacgtgcgaacgcgtctttcggctgtcatctaccggcgagtgaaatgctcggcaacgaccgcggacctgttgcaggacacattccttcgattttgggagcggcggtcgttgttgcgagaggtcgctgacctagctggatacttcatgacgaccggtcgcaatctcgccgtggaccatgagcggcgcaaaaggatcgcgcccttcgttgatggcatcgatggattggagggagtatccgatccctctccatccgtggagcagatagcgatcggggtgcaggaactgagacgtatctccgcgatcattgaccacatgccgcctcgcgccaagcaggtcttcctcatgtctcgtatcgacggcctcacctatgtggagatcgggagccacctcgggatttccccgaagacggttttcagccatatggtggttgcgcttgaacgtcttgggagcgaaatggcgtcgggcaagtaaccaccggcaacgggatcaacacacgggcgggtgggaccgtgagagatatgcacaaagacatcgggaaatcgcagcaaccatcggtcgatgcatcgacaggcgccgcagagtggttcgcgcgcttgctggatgacagtgcgacgccgaacgacctggtggatttcaggacatggctagaagccgacccgtcgaatgctgcggcctatgctgaaattgaaaggctttggctcggcgccggcatggtgccggacaaatcggaatcagatcgcctgtcgcgacgaaagctgctgaaatcggggggcgcgctcgtggtcgtcgcctcatccgccctggcaacagccgcgtatttacgcaccttgccctcagacttcaggacaggaaaaggcgagaccaaaatcattactctaccggatggatcgatcgcagaactctctacggagtctgcaatctcgcttgactatacggcgacacagcgcgccgtctcactggtcgagggagaggcatttttcaccgtgacaaaggacagttcccgtccctttgtcgtcaatgccggaatactgcggaccgttgcactcggaacgcagttctcggtttccgaagaagacgaccgcatcactattgctgtcgccgaacattcagtccgagtgtcttcgccgtttgaggctttcgaggtgcaggaggggcaatccgtcgtgtatgccaacgacaggatctcaaagccgtccgaaaccgatattggatcacggctttcgtggcgcgagggcaagctggtcttcatttccacgcccctggaagacgtcgttcgagcactgtcgaaatggcgtcgtggcaagatgatcgtcatggaaagcgagcttgccagacggccggtcacggtaatcgtcgatatcaggcgagccggcactatccttcagacgcttgaaaacggactacctatccgcgtggacacctattcaccctggctggcgctgatctacccgagataaaatagtttcaaaatgtactcaggttttttccagcctacgtcgtcccctttttgaagccccacatcattgggggtgcagactatttttcaaggggacgtccgtgtctgtgttgaaatatttcgcaagagatcaccgaagcaaactgaagatggctcgcggcgttcttctggcgacctgcatcgtcttcggcccgcttgccgcggcgacacttcatgcccaaacagccggcaaaggctaccaattctcgatcccggggcagtcgctatcggccgcgctcgtccgctactcgtcaatcacaggcgtcgatgttgtgttcgatggggcgatgcccggcaatctgcgtacatcagggctctcgggcgacatgccagctgaagccggactgtcgcgactcctggcggggacgggcctctcctaccgcttttcatcagcgaatacagtcgttctggtcaatccagccggaggagtaagcgtcgtcccctccgatggttcaaccgtgctgcagccaatcagcgtgaccggcgaacaagcgctcgggcccgtcgacggcattgtcgctagacagagcgcaaccggaaccaagaccgacacgtcgctcaaggaaacgccacaggccatcaatgtcgtcaccaaggatcagatgacggcacaagggtcggcgacgctgacgcaggcactgcgctatacgccgggcgtgatcagccagtacggcgacgattctcgctatgactggttcaccatccgcggtttccgcccgggccgttatctcgacggtctccgcttgccgttcggctcgcgtggctatgcgcagccgcgcgtggaaccctacagcctcgagcgagcggaagtcctgaagggcccctcgtccgtgctctatgggcaaggcgagccgggtggcttgatcaacatggtgtcgaaacggccgagcgcgacggccaagaacgagctcgaactgcagctagggaccggcaaccgcgtccagacggcttttgatctcggcggccctgtgaacggcgacgatgcgttcctctaccggatcgtgggcgttggccgcatcaccgatacgcagtacgatttcgtcaaggaacggaaggcctatatcgcgccgtcgttcacgttccaaccggacgacgcgacatcgctgacgattcacgccggctatcagaagatctattcgcccggtggcggcggcgcgccggcgctgatcgcaaacggaacgctctacaccaacatctatcccgagttgccgcgtagcacattccccggcgaacccggatatgactactacaaaagcgatcaagcctcggtgggctacgaattcgagcacgagttcgacgacacgtggacggttcgccaaaacctgcgttactcctacatcggaaccgacacgcagcgcgttcagccagcttgcgtcttggcttgcagcccggcgggatttgatcgctacgcctgggcctttccggaaagcgctcgcgccgtcaccgtcgacaatcaggcgattgcgaagttctccaccggcgcgcttgaccacaccgctctctttggtctcgattactcgtatgagagcagccgctacgaggaatccgccctcaggttcattcctgcgccactcaatggctacgacccggtttacggcgccactaccattacacgtcccgctattgcgacgagaatcgatcagcatcgtagccagctcggcatctatgctcaggaccagattgaatgggaccgtttcgcgttttccatcggcggtcgctatgattgggccaacaccgacacccggacgcggacaagtacgtccaatacgcttgtcgatcaaaacgacggacgtttcacctggaagaccggcctcgtctacaactttgacgatggaatttcaccatacgcgggctactcgacgtccttcaaccctgccagcggcaccgatcgtctcggaaatgtgttcaatccgaccacgggcgagcagttcgaagtcggcgtgaaataccagcctgacggcatgaacagcttcgttacgctgtctgcatatcacctcacccaggacaacgtactgtctccggatccgctcaacaccaatttccgggtccagacaggccaggtcaccatgaagggcgttgaggtcgaaggaaaagccgagctgaacgatgccttctcggtgattgcctcctatgcctataccgacagcgaaatcaccaaggacaatccgaatgctgcaggcgtcagcaacgaaggcaaccgcttcgccttcgttccacgccaccaggcgtccctctggctggactatgccttgcagagctcgaccaactgggacggcctgagcgttggcgcaggcgcgcgctacaccggccagacattcggcgacaatgccaacaagttcgacatcccgagctataccgtcttcgacgccgccgtccgctacgatttcggcaaagcgaacccgaagctcgaaggcctgaaggcggcgctcaacgtcagcaacctgttcgaccggaaatacgtctcgacctgcattgccgcgacgggatgctactggggcgagggacgcaccgtctatgccaccttgaagtatagctggtgacgttgacaaagcctcgacacacgcgtcccgttcagctgacgcggcggcaatttgccgccgcgttcggtgcgtttatgatgccgcgtatcgcttgggctgaacgcccttcttccaagatcgctgtcctggactggggctgggcggaaagcctgcttgcgatcgacgtcgcgccgcagtcggtcgcggaggctccgctctatggcgaccgtgttgtcgtgccggcgcttcccaaggacacgatcgatctcggtcttcgttcgtggcccaacatggaactgctgaggtcgctacggcccgacctgatcctgtcgcaggcgaattacggcgtctctcaagcgcgattgcaagacatcgcgccaaccatggcgctgccactttatacggccgagcaacagcccctgcgacgatcgcacgaggctttggtcgcgatcggtgagcgtatcgaccgctaccccgcagccgaagccttccttgatcgcagctacgcaaggctcgccgccatcaagacggagatgactgcctatgacggacgcaaactcctgatcgtcaaattcaccgatgaccgcgtgatcgacatctatggcgccggaagcctgttcgacgacgtgcttgcgaagatcggaatcgcaaacgcctggaacgaacccaccaacaattggggtttcgcgaccgccggcctcgacgccatcgcccgataccctgaggcgcggttgctgatcatcgaacccggtccgcccgatgcgtttctcagaagcgcgctctggcggtcgctacctgcggtgcagcgcggcgatgtcgccaccattccgcccacctgggtgttcggggcattcccatcagcaatgcgatttgccgaagttcttcgaaaggcccttggtcttgcatagaaaccaattcgtgacgcccgcccgcgtgtactggctggccatgaccctcacgctctccttctgcgccctgggacaactgagatacgtttcgccggcgcacattctcgacgcgttgtttcatccagatagcgcctcgttcggtcagacctatgttcatttctcccttctgcctcgcattgtcgttgctttgcttgccgggacagcgcttgggtttgcgggcacgatctttcagcaaatactgaaaaatccactggcggagccatcgacgctcggcgtgctctccggcgctcaactggcaataatagtggtatctctctctcttgctggcgtctccgctgaacagcgagaactcgccggcgtcagcggcgcgttggctgccgtcgcgctcgtctgcggactttcctacagaagcgggttcgcgccggtcaccctactcctgtcgggaatgatcgtgagctttgcagccggctccgcgtccgtggtgatggcgttattccaccacgagtatctgcgaagcgtgttcatatggggaagcgggtcgcttatccagaacgacttttctaatgccaccgcgctttcatggcggatgctagtgctgattcccgcgctcctgcttttcgttcgaccgctcgcaatcgctgggcttgacgataccggcgctcgaagcctcggtatatctccttcgaaactacgcctggccgtcctctgtctggcgacagtgctgtcggcgatggttgttgcccggattggcgtgatcgcgttcattggcttggccgcccctcacatcgcgcggcttgccggcgcccggacactgccgcaaaggcttctctggggagcgttgatcggcggcgccgtgttgctgatggcggatggtatcgtgctgatcatcacccccttcatcggagaggtgccgacaggaacgataaccgcactcgccggtgcggttgcgatgctttttatgctgcgcgaagtgccaccggccccattccaggcaggcgccgagggtgcccgccacgtcgtggtcccgatcaggcgaagcctggcgctgccgctgtctgtcgtgttgatggtcgttgtcgctggcctgtcgctgaccgagcatgtcttttccaatgacatcgacatgtcggttctcgtacaggggcgttggccgcgtgtcctcacatccgcgtcagcgggcggcatgctggccttggcaggagccgttctgcaggcggttgccagaaacccgatggccagtccggagggcctgggcgtcagcggcggtgccggcttgggcatcatcgcagccctgttcctcggcggcatgagttcacccatcatgcccttggcgggcggcatcatcggcgcgctccttgcactggccataatcctctttgtcgccaagcatcatgatttcgcgcccggcccagtgatgcttgcaggcgtcgcggtgggcgcgttggtcacgtcagtcatttccgtcatcgtcgccagtggcgatccgcgcgcaacatacgttctcgcatggacgatgggaccgacgttccgcgccaccggcgtggtcgcaatcatcgccgcgattattttactcgttgcacttttgctttcgcccctgttccggcgttggatcgagatcctgccgatgggcgacgcattcgcgcgatcgatcggcatgcacccggtgcgcattcgcgcaacgctcttgttgttttccgcaacgttgactgcggccgctacgctcatggtcgggccacttagctttgtcggcctcatggccccgcacatggtacggatgacgcgcccgcggggacccggatcgttcatgctgatgtcgggcgtcatcggagggctgctgatgatgctcgcggactggattggccgaagcgtcgactttccttatgaaattccagcgggcgttctggcggcatttattggatgcccgtattttatcctcttggttttccgacaaggcgccaaaagtagataaggaaaccgggactgccgcaggctcggttctcgcacttttaaagaaatcgaaccatcggttcccttgattacggccgttgaagcatattgccggccggcatcatcgcagactatcttcagattgctcagatcagctctccaaatctctggcatcaactgtttaagctcttgctccaattttcgcggagagctcaggctatacatacccgcaccgcgatgggcgcgggatcgctgccgagcgatattccggttgagatcgaggtcgaccggagagaacgcgctccagccatgatgaacgcaatccggtgcgttgcggtcacggatgccgcgttagcctcgaaacataggtgaagcggtcgcccggatggatgctgattgaagcgagtacgagttcactggttcccaggaaatagcggcgggtgatttccagcgcgtggccgtcgactggcgccttcaacgcttcggcatattgggccggaacgccgacgccgcgaagtgcttgctccacctgcgagataggccggcccgccgcctcctccaccagttctgagaccgctcccacgtgcagcgccatgcggtccgacacgaaacttgcatatcgcctgtcgacgtacacgtcggtccagcagatgggcggtgcggtgttcacaagcttgtcgacgcggcggtaggagatctttagccacttcgaaccgggattggtctgcaggcggctcgcgagactatcatccagcacaatctgctcaaacgtcaggccgtcccgcagcgtaatcgcagcatattggacgatggcctcgatcgagctgaaggtctgcgaaaagctttcacccgatgtcaacggctcagatgcctcgatgcgcgtgccgaggctcggtcgccgtgacaccatgccgtgtttctgcaattcgccaagcgcggcgcggaccgtcgagcggctgacgcccaatgcttcggccaagacgggctcgctgggtagggtcgaccccaccggatagacgccatttgcgatgtcgagagacagctgttgagcgatctccgcataacgcttgcttgccttcattcgccgaaaatctccatctttactgaatgttataggcagcgcagggggagcagacaagtcgacctgattttgttcgtacaaaatgttttgttcggataataacgggggactaaataggtgcccaaaccggcctgggcgcgcgcgagtgcggcttccgcatcaagacagccgccaaccagggcttcatccctgaagaccgcgcacatcgcggccgtcccgaacatatgaacagcagagagtcgaataccgtgcttgacaccattcccgcttccgccggcgaggcgatagatgccgcacgtgacccgcgatggtattgccgaagtcgtaactttcctcggtctcgtcaccagctcgctcgccgagatcgccaccgacgtcatgctgatgatggcgaccgaactcggcgaagtttcggagcccttcattcccggtcgcggcgcgtcttccacgatgccgcagaagcgcaatccgatctccagcgaactcatccttgcggccgccaaatcggtcttgaccgcttccgcattcgccaatgcccgctacatgctggatggggctggcggttcacgaagagcggatgcgcgccaatccggacctcaccaatggcctgatcgtgggggaagtcgtaatgctggcggccgcccccaagctcggccgccagcatgtgcatgacgtggtctacgaggcatgccgcactgcaatcgaacacgcctgagaccccgccgatcgagagatgccgaggctgtcgcggaatgtcgcagaacgacgcactaggtttcgaacctagaaagatcatagccttagcccggtcccggtgcttcccttgaaggacaccggtaccgcgtttgccgccgctcccgctgcccagcgcgctgcccgaagaaaggagcatgaccatgtcccgacctcaaggactgacggaacaacacatctccaaattgcggccggcacgaaccccaagcaggtacgacgtccccgtcggggagacgccgaacctgtttgtccgggtcggcgcgccgcagacgatgttcgtgctgctcgcccggttcggttgcaggaaaaactccagccgccgcgccatcggcgtcttcggggtgatgtcgccggagcgggtccgggcgattgcgacctcccctgttgtccgggatgtaacgcggcgtctgagcgaatggcctcaacccacccacagcaaaactaaaacagatttaataaaatgcgaacaatgcctttgaagtcatggcttcatgcaaaggcaccgcatctgctgctatgctctctttcagcacgcgcagggccgcgaaagggctgcgtctcgctcttcagtgtagggtcgaagtggggcgacgggctgaaatgaccttcgggacggcaccgacgaggcgtgcggtcgacttcacgatttcgcttgctacatctgcagcaagttctttgatcgacgtggccgcggcgctcactaattctgctaaccgcttgctatcgtcacgtagttgccgggcgaatccagccaagacctcactgaattagaggaggacagtcctaacctcctcggtcgtcgatatcccgcggcgagaattacatcccctgccctccgtgattgtatttcggatgcaaaaaggtcgggtgactgttggcacccgactttcgactgtcgcgaaagcaccctaattcaatagagagcgaactgcatttgataagtggtcgggaactcaattcgagttttgcacggacgcgggggtagacacttgtccggagcccgccgatccgcccggggtgggtgatgttgggctccgaggcgtgaacagaagaagaaccgcgatcagtccaaggaaaacgacggcggcggccaatcccaaccgcgacctgtccctgagccgccgtgacacagctggcttggtcgcctcatacgtcgtggcctgatcaacagaaccgtcgggatcacctcttttgatagccataactgcctccgttacgctaacgccattttcggaccgcagttcccttggtgccgctgatcttcgaggtaatcgctccgaggccggatgagcaaagcaaatgcggtcgcgcgaacaccccgaattggggtccagtcgagtgaagcaccctgtcgctcgtgacatcggttcattgaggcgctcaggctcgtcgaaagtcctgctgtgcacaacttaacggccgtaattgcagctgccgcgaattgtaatatttttgtgaacttagacgggcctcgctcgttgagtcgcattcgatccacgggatagtgccagcatgccgtatgaagatggaatgcagatcgtatttgacctggtcgacagaacgatcgtcgttgcgttccgtgacgaggttaaaatgcttgggccgttcagagatcagaagacagccgtgcgcgctggcgagcagtactgccgtgatcgcggctgggatgatgctgagacatcaaaacggcgacctcactaggttggtacgtcggcgtcattcggaagaaatggccgcaactgcgcgggcatgggtcaacgctgctcaccggtcgtgcccctacaaaaatcgacctatgccgcgtccggtaacgtcctcaaaagcgcgctttcctcatagggcttgctcaggaaggtgatgccttcaccaatatccgatgcgcgcagcgagacaagtcccgaggtcactataactcgcgtttcaggccagagctgtcggactttcgcagcgagaccaagtccgtccatctctcccggcatatttatgtcggtgataaccgcatcgaccctgtgctttctgagccatagcaacgcttccgatgcgttcgcggcctccatcgcgacatagcccgcatcctcaagcgtacttacggctgcgaaacgcaaaattggttcgtcatcgacgattaggaccttgcgatggagttcgagcgcaccctggttgggcgcgaggagttccactcgtgtggtgaaccgatccctcctttcgagtacttcacgtccatccggcgaggcgcgggtcatttccatgtggtctctttctgaagcggcctgcagccagtattcttgatcgcggccccattgacgtccgttttcttcccacagcccgtaagcgcgtttgctgatccactcgtgacgttcgtcagacatgatgacctccgcatgtcgaatagcgagcggtttgacctgctcgaaatgtgagcccaatgccgtgtttgccggaaagtttccgtgcgatggcgcacagatgcacgtgactgctcattcgagcgagcgcgaccatgaatggagaaatgtccggcaccgtactacgagcgcaaccggccaaaaagagagtacactcattgcttaatcctcggtagtcgcggcttggaaaagcaatatgcttatccgacgcttgaaggcgggagcatcaagatgttgcaatccttaatttctttgtccgacgatgagatcgagctggtcacagatgctgtcaataagtggtgccgagcgaaccattgcgcgatcgacagcagcgacggccggcgcgccctcaccgctgcaatcgatctcgtccagtttaggcaagatgactcccttctcctggaggagctcacctcgcgtttgcaccccgaccaggaatttctcaaagaaactgtccatggcgcaagccgagtttcgcgataaactcgaacttaacacacgagatcgcgatctagatcatcaagtctcagcgcgacgctgggaatgcgaaggcggctcggctgcgcgaaatgcgttgcaaaacgatgccaaggcggcctctggcccacgaacacggacaacaccaggtttagctagcgttcgtccgcccttggcgttctgaagatctagccgcggtagctgtaaagctttcgattactcggcctgtccctcagctctcgacggcgcttttgcgacacccgccgcagccgcagtggaggcaggctggcagccagaagaggtcgccgctgcaatgatcgagattgcccacgatcacatgctccggtccttgccaaccgcggcctcgagcgcaatcttgcgatcctgaagaaaaggagattgtaagcggcatgtgcggtaggttcacgttcgagcatgaatggtcggcgtttttcgatctctacaacctcccatgggtttccgaacgcggtcgaaacttggcagcccggttcaatatcgcgcccactcagcatgttctggtggttcacaacgacgcggaaggccgccgacgccgtttgttccacgatggccccccgccgcgccgataccgcacccttaattagcctctcctcaaaattcttcccattgctctgcccgagtttgcttggacagcggacgattggcgtccgccagaaaaggcacgcgtgagctcgctggccagtgccctggctggcgacgggaccgaggtttcgttgcggatcactacccttgctccgggaactgcgctcacgttgaccaatcgaaactgctccaccaactccttgagcttcgcggattcggaggctagcgtcgcgccagccgcattggcttcctcgaccatagcggcgttctgctgggtcacttgatccatctgattaacggccgtgttcacttcggccagtcctatagactgctcacgagcagacgtggcaatcgaatccatatggtggttcatcgtgacgatgtgggcttcgatcgtccgcagtgattcaccagtctggctgacaagccgaaccccgttttgaacttcgtcgttcgagttccggatcaggtctttgatctctttggcagctttagccgaccgctgagcaagttcacggacctcctgggcaacgacagcgaaaccctttccagcatcccctgcccgtgcagcctcgacacccgcattaagggccagaaggtttgtctggaaagcgatttcgtcgattacgccgatgatgttcgatatctcgttggaagaacgttcaatcttgctcattgcgtcgacggcattctgcacgacctccccggactggcgtgcactctggttggcctccatcgcgacagtgcgggcttcctcagcccgttttgacgaattcgaaacgttcgctgtaatctcgtcaagggcggcggcagtctcctccaacgcagcggcctgctgctcggtgcgcttcgagagatcatcggcgctttggctaatctcacgcgagccgctctcgatagaacttgttgctcccgcgactgatgtcagcgtcgaccgcaactgctcaacagcacggttgaaatcagccctgagtgtttcaaaatcgtccgcgaaacgcgcggtgagttggaagctgagatcacccgacgcgaggtgcttgagaccgtccgcaaggccgttcgttgcttgcgccatttcctcagcacgagtccgatctcgctcgctagtggctcgccgctcgtcttccgacattgctctttgatgtgcggcgtcttcctcgagttggccggtgcgcacggcgttgtctttgaaaacctgcacggcgcgggccatcgccccgatctcgtccgagcgggtgctaccttcgaccgtcgggctgaggtcgcccgatgcaagcttcgccatcgtcatcgtgatccgggagatcactccgccgagagctctggcaaagaagaaaaagcccaacagcgaaagcagggacacgacgatgataccgataacggtcatcctgatcgatgccgacgcttcctgggcgacctcactgacattggaggcaacctcaaggacgccgatcgtctttccggagaaattcttgaatggcacggcgttgactagaagagtcttgccaccgttttcgatctcaagctccactgcctctccgttgaaagctgacgtcaactgctcctcagacgtaaacggcttggcagcggtggatgcctggactgagaacttcccgtcagccgcgatataaacagtaatgtctccatccagcttggcggcaataggttcgaaataagcgttcgtcagcccggttccgatatcgacaacgccgaccgctttaccgtcggcgataattggagccgacgcaaacatcgagacggcagacttaccgggctcgatcccagcaacaagttttccagaggccagcgcttcaacgacggtcttgcggcgaccagtcatatcgtctccgaatttctccggtgtgtggatacgagcgagagcaacccccttggcatcggtgaacgtaatgttctgaagaccgccgctttccttgatcgccggcatggcgctcacatagcgagcgatgagttcatcccgagagttcgaagcgaccaatcgagcgacatcgggttcacctgcaagtgcgagcgcgagtgatgaggccgccttctgttgtgcatccatgtcggtccgaataagggcaagatcgccggcggcttcgcgtgtcatagattcatgctcggctagggtctgcctgtaaaggacgctcgcgcctatagcgacgctcgagaacaggacagcggcaaagccgcaagctgttattgtgatccaaagaggtcttttgactacgacgtcttgcattcgactccaccccaccaaaattgtggctaccaagtaccggcagaacttcaaatattttgttaaacgtttaagcaatttccgctaggtgacggctcgttggtctgttggtgatcacctttctctgtgaagaattttgtgatcggccatctgcggattacatgagtaagttctaaataatgggttgccgtaagcgacgaggatgataccgtcgaattgcttgagatgacctccttcgaccccactgcggcctgcggcggggtttcttttgtcagctcgctttcctgagctcatccatgtcgtccggaagcacatgcatgccagccgcgtgagctgccgtcacgaaggcggcacgggccgcttccggctctgccgcaaagaccatggcgtcaattgatcgcgcaagcgcactatggaaagcgggcttcgatttgtccggccatcgatctgtgaggtacatgattatctcctcgacggtctcggcgggagcatattggccaataccgttgatttcgacttcgagcggctcgatcggtgtgaggcataccgggtcatgacgcgcaaccttccttgacggcagatgcgagtcaactggtgacgaagtgattcgttccgaatcaaatcagacagttatgggactgtgaggtctcgacctcgccgaagatttccagccaggctttcaccctaattcgttcgtcaatgatgtccatcgtgctagaccacaagggcggcagatcaatcgccaccttagtgacccatcgccggaggtactatagtccctcagcgtcaaatcctcgaaacatcagccttacgagcggcatgccacgcatcatgtgcggcctgcattccagcggttcgttgccaaacatcctcccgaaccgacccgctacgccagcgctgacagggcgatcctcgcagagaatttgatagaggtgctgttgcgacatgcccagcgatttggcgatctcggccttaggctttccgcgcgctggaagaaatctcatcgcgaaggagcgagcctggatgagttgggcatctcacaagatcgcgtttcccagtgaacgaggccatcttcagctccaatgcaagacgcccatcgcgacgtcgggatttcggttcgagagccccgcaagcctctggatgagattttctcgagtcccgcttaggctgcctggatcgtattatgccaacaaatcacctgacaggtgaaccaaagaggtcccgatactgtcttggttggctcctgagatattgatcgggagctcgcacggtctccccgaaatgggccgcggcatgccatggccaacgtggatcataaagaattgccctcgcgagagcgacaaggtcagcgtcaccggtcgtcagaattccctccgcttgctcgaactccgtgatcaaaccgacggcgatgacgggaatgtcgatggcctgcttgaccgcgcgggcgaacggcacctgatagttggggccgagagcgatctgctgatgtgatgccaacccgcctgtagaaacgtggatcgccgaacaacctctcgcctcgagggcctttgcaaacacgatcgtctgatcggtgtcccagccaccttcggcccagtcggtcgccgacactcgcatagtcacaggcttgtcggatgggaacgcctccctgaccgcatcaaatacttcgagcgggaaccgcatgcgattttcgagagaaccgccatactcatcgctacgcctattggacaaaggcgacaggaattgatggagaaggtagccgtgcgcaccatgtagctgtacggcgtcgatacccaaagcagcagctcttagcgtggcgtcgacgaacgcgtttctgacacgcgagagcccttctttgtcgaggcttttcgggtgatcgtactcgtccttgaacgggatagcgctcggcgcgacggtcttccagccgttatcgctgcccgggctgatctgatggcctcctagccagggcttttcagtcgaagccttgcgcccggcatgaccaagctggatggcgatcgggatgtcggaccacctgcgcacgctggttagcacgcgggccatagctgccttgcatgcgtccgagtagaggccgacgtcaccgtatgaaatccttccctccggcgagaccgctgtcgcctcgatagtcagaatgcccgcccccgagagtgcgaggttgcccaaatggatttgatgccagtcagtcatctcgccctcgactgcggagtactggcacatcggtgcaatcacgatgcgattgcgaagctcgagagaaccgacactgacgggtgagaatagtctggtcttcgacattgcagctccttcagggtcggtccacgcattggtaatgcttctcgacaatatagcaacgtggttctcaaaggcatggcacttgagcagcgttctccttggcaggggtattgagcccctgccaaactttacccgccgcagtgggccgtgttcaaggaaccgttaccgcgcgtgcttgttaaggtcatgaccaatccaggaggcttccatgacctatgacagatatccaatcccgccctaccccgagcagcagcaagagccgcccggctatacgggtcaaatgcaacccactcccgatcacggcgagcagtcctaccgcggcaacggcctgctcgaaggaaaggttgccttggtgacaggtggcgactccggtattggcaaagctgttgcgatcgcattcgctcgcgaaggcgcgaatgtggcgattgcttatcttaacgaagatggcgatgccgaggacacagcaaagtgggtacgagaagccggccgtaaggccgttttcattccgggagacctgacaacggagacccactgcaacgaggtgatccagcgaacggtgcgcgagctcggcggcatcgatatcctcgttaacaatgcagcgtttcagcgaacatacgccgacatcggtgacatttctgtcgaagagtgggatcggacgttccgcacgaacatctacgcgcctttcttcctctcaaaagctgccattccatatatgcgatcgggcagcgcgatcatcaatacgacgtctatccaatcgcgccaaccctcgcctcaactgctggcctatgcgtcgacgaagggcgcgatctcgaatttcaccgccgggcttgcgggaatggtggccgaaaaaggcatccgggtaaacgctgtcgcgcccggcccgatctggacaccgttgatcccttcgacaatgccgtcggaaaaagcggcaaggttcggtcaaaacacgttgattggtcgggccgggcagccggcggagttggcgggggcttacgtgctgctcgcctccgaccttggcagctacatgacgggtgccgtcgttcccgtcacaggcggcgagatcatgatttagcgatcagtctgcggctcgatagagcggaatgtcgagatgttagcttcactcgtgcggcgggttgaccgcaggctcacgccctcaccagtacagagccgcgactaacgccctgacaatcccgatttcccgctcgcaaccgttcgacgctcacgtaaatggactgcggcaggaggtagcgtttcgccggggaagcgtaaggtagagacagttgagctcgctgactgatagtgaatgaagcgccccggtttcgacgaccagagcggcgcgacaattcagactctatgccaagctgctgggagcccgaacgacaaaaaggccccggccggagccgaggcagtttcccctaatcacgttgttgcgcgaatgaaaccaacgttgaaatactcgcggtgctccgagccgggcatcagttgataaagcgcactgccaacatcaggcggtcacctcgggtcgggggtgaggcgcgatgatagcaggaagtgtcctgaacgaaccctgttcccgccgggccttcgatcgttatttcgttgtcccttccgaactgcctatacacggcctctggcgaggctctcgccgacccgaaaagcattcttaaaggcttagacttgtgcgaccgcttcatcatgacatgagccccggagaagcgatcggtatcagtgatgtagaagctcgcgtacacgaagctgtagccacctacatcgtagtgataatcgatgacgccatgtttcagccgccggcgctcctcgtcgttcatggccgatgcaaaactccagtccagtatggtcactatcttccggggctcgtgcccgagatatttccgcacgatggaccgaagaattgggtcatcaatcaccttctgcaccgccgagcatcgctctggcttggtgatgccaccaatcggcatgagcctcccgtcagctgcgacgccatccttgacgtcagagtattggaacgtcggcccggttggatcgtaaatggcgtgtaatggctccgacagggcgaattccctgatttgatcaaccacgtatcccggcaagttcaggccgataaaaacggcttcatcatgaattgattgcacaatgtcaggcacatttgcctgaggaaacaaggtcggcatgctccatcggcctagcggtttccgtttgaatagctctgccgctcctcttgcggagctgtatccaattctgactaatctgaaccgtccaagcatgtaggctaaatccttggacttaatgcgattaattatgcctcccccacgcatccgctctctccggttgttgaccccgcattagctgccgcgcatatagaataccgacttggcggctcacgtacacgggccgaggatcggcataaagtggtaaatccatttcgacatatagctgagctgttaaagccctggtgccaacaacgagagccgcggctcaatcaatcacccgctctgcggcatgtctatttagcggatggctatccgcgccagcgttctcaactgctccggaatttcttgacccggctatggacaccacaactctcttcagagcaccaaatccgccgtcctcccttcgatttatcaaggaacagccagccgcagttgtcgcccttgcattccttcacttgccgacgctcggatcgtgttgccaatagctccgcggcggatgaggaaagaacgtgcacaaggtcggccggtgtctcgattttatgcgcccaagtccatgccgcggatcgttgcgcgaaaacctgacggccacgagccgccgttgccactgcgccgatataagcgacgtcatccatcttgggttttccgcgcgcgtcctcattcagaaagacacggtacacgcattcgcggagttccaccgaagcttccagagccgttgctgccgcagcaggattctcttttgccatctgcttcaaaccagccgcttgcgcgtccgaaacgagatcgacccgtctactgaaagtaatcaagtcaccgtaatcgctgaggaaatcaggaccccatcgatttcgtcggctgtcgacggtgttcacaaagtcgagcgcgggatggccgccgctcagtcgcatatcttttactgattttgccatatggaacaggatgcagttgcgttagttgtaacggtataaacgaattatactcgttacatagatcgggtccataccatgtcagcttcaaactatggaaaattcgcgatcctctgcgctgtttggggtttgacctggatcgctgtgaaattcggggtgacgaccttgccacccatgctgttcgcggccctgcgctttgttacggcaggggttgtctttctgtcgatagcaatctggcaccgttgctcgatgcgagcattggctgccgactggttcccaatcttcattgccagcttgctgatgataaccctctgctacggaccgttgttctggggaatgacaaaggttccgtccggcacttctgccgtcttggagatgtctctgacgccagtttgcctcttcgtgtttggtatgcttttacgacaggaatcatggagttgggcagcggccgccggcctggccgtcggttccattgggctatatcttctattcgtagggggagatcgcgcgagctacgacgacggggcgtggataggcattattgccgtctgctgggctgccgcatcgtcggcactcggctcggtgttggcaaaaccaattatcgcgaagcacggcagcacggcaatcgcgggggcaacgaccctcttgggcggattgctgcttgccgctgcggcctcaatctgcggcgaagatgtcaccgacctggcggtctccaactggaccatgaaggcgttcggtggttggctgtttctggtgatcttcggttcgctgattggataccgactttacatgcagctcctgagggatgcggggccgacacgcgcaggcatgtttgccttcgtatcgccagctattgctgtcgcagtcggcaccttcttggcaagggagccgctcaccgccacgaacctcgtcgggatggctttcatgctcttgtcggcgggagtctgcctgtacggtacaaaagtgccatctaacaagatgtccagataatgccgccccgtgctgtatgacgggccggccgcaaatttatcccgacgcttaccgttgtgcccctaaactaggttgtgctccgcctccctctctaagtctctgatcaaagcttcatattcagcaacgcggtcttttggtgagccggtggcgatcagtttccgcgtgtagaggaccgcgaggctatagtgttcgaagatttcaacggcccaatgagactgagcgtcaagtggcggatggcaggcactcgcatagccggtagcgcccgcttgggtggtggcgtcgagcgccagcctaggacagcctttatgttcgtccggctttgagcgcgcggacgatgccgtgtgcgttcctcgaggcgtctccctcgccacgtcacgagatttcatttcaccgctgtggtatcgggacagaattcgtatggtgcagacagagcaagaagcctcggaccgggttgtccgtgacgcctgagatgcgcgaagttcacgatcacttggacgaacgttcgtcgtccaaaagctgcctgattgccgccacgccctttgcggtgtcagaccatgactgtcgccaaatcagcagtgaaacacacgccatcgtcgcagccacgaatggtaatgggccaagaaaccagaacgcggcagctaccgtaaagtaatacgatcggaccccgacactgaacgatctaagtgctggattgaggacgagcgtcaacgcgtgggtccaggctacaaggtcgcgctcctcttggcgagacgggctcgcgcctatcgctgcgaggcagtagttgatctgacgaactgcccagatgaagtccgagagccctctcaaaagcgtcgcaacaacgagcaatactttgcattggaagaaccaagcggggtcctgaacggcaaacattgctatcagaccgtgtcccgatccgtagttcggctcaacgaacaacgcgccgctcaaacccacgatgacaataaggttagccgagccgaagaacgacgccgagttgatcgtatgtcaaagaatggcggcgtcgccgataaagttgttatccctcgtcagcacctctctcatccaggaagagcgaatgcggaccatgtcgatcgagaggctgtcgtttctccttggccaaccgatcgcgataaggggctcaaaagtgatccacacaatcaggaagaaaagaaacgcgagggcattcagaaaatccatcggcgacctcgaactatttatcgtgccaactgtaatcggggtggccgctactgcaaggggagcgcgctcctgattttcagtccgctgaaaagcgcctcgatagcttcgcaaacaactttttcaagccaggctcgcccacgcgatgagctgcttccgacgccgagacccaagccaactccctttggccgcgctccggaaaaatcgatcgggtctccctcaccttgataaggtgaaccggcgcccctccctgccagactgagtgaatgccctaccaacccctctaccactggcgccgcacaaagctcacggtcttgccaactggacagcctgaagcagatatcattgatgaccgacatcgacgcaagatccgcgctcctgacgctgctgaaagagatgaagctcgaacctgggtttcgctcagcctctatgagatcggcccgcccctcggcggccaaggcatcagccaggacgctatcgtcaaagcgctgtacgccatcaaggatgaaggcgtgattgatctgccgagcggtaatcggctcgtcctgctgaagccacttacatgagcagaacgagccccgtaactaacttcgcatcttgatgttgcgtaaaaaagccgaagcacaacgccccggccctttgttggtgcagtcaaagcgttgcaaagaacgcctcaccggcagcttacttgcgtgcgccgcccggacggcccctgttctggccggcgccaccggaggtcttcgcatcgttggactggccaaattgggtgccgccgaggtgtccaccgccgctgctattggcaacgtatcgttccgtccgacgctgaagctcggctgcattggtcttgctcataggatcttccctttgttgaacagaaatcgcctccggccgggcggccggggtgcgtcgaatcgattttgagagaagaagtcagcttgaacgcctgagacgttaaacaaagctcgaccagcaatttcgatttgaaagctttgcgcgcttatcgcacccaaagcaagggtagcccgtcgcccgctcgtgaatttcggcccgccagcgggcgaccggagcacaaaaccgactggtgcgactgagacccgggaactctccgcccttccatatgttcgtgtgtgtcgctgtgaacggtctgcagccaacgcagcggcaaggcgaagggctttcgttgctgacggcccttcgtcgacctgttgctgggtcggctttccgttacagtggcgttaacatggccgacccagtacgggccgaatggccttgccaccgtggaacttatcgccgtttctgcgtgttttacaccgccgggatgcatcccttgccttcaccggcacgtggagggccttgagcccctgtaactctctcggctctccacatcctcggaacatgcggtcgcttactccgttttgagtttgaccgcgctcgctagcttgccggctttgccctgacgcggttaaagggtggggagccttcctgaggttccccacttccaaccggaaagacaggagcacctgcatgtcaggctacggtccaacccttcgccttgccctacttctgcaccgtctgaacaccgacgagttcaagccgctccctccgggcctagggcgaaaaacggtgaaagttgcggatgaagcggggtttgtcgaagtcagcgatagctcgcggtttccgatgtgccggttgacggccgcaggtctggcttaccgtaaggcgaacccataccgcttcgactaggatcgcaagacgtggcggccgggacaccgcaatgactggtgtgactgagcctcttcagacttttggctgccttggatgacagtggacttgccgtaaacttgccattgcatcctgtgagtgtcgctgagatgaaaactgaaatcgaccacgtcgcccatggctgggctttgctggcgctacgcaatcccgagatccgcgcgctttctgagcaccgacaatcgattggcgagatgtgtgaagcctacagcatcgccgtcctccaccttcgcgagttgagagcacttggccccgacaccgatcacatcgccgagtatgaacgccttattgccgaaatcgagcacgagacgtcgtattacttgacaatgcgcgctcgattgtcggcctagatgtgccggagcgatcagtggtccctgccagcgcggggcggcgtaatgatttgatcgaaagtgcttggcatcaacgtcaagtcaacccgatatgggggcatcacctgagcgtttcgcaaagcatttggcttcgaccgggctgtgagcttgttggaagtcagaggtctttggtcggttcgcttgcgaatagacagcggaggcatttttgttctccttcattggctgtgtatcccatgacaacaatggctcgacgtgtttgttccgatcggcgtttggtcagtctgaggccacgctctggatgcttaggacgcggaacttatcgcgctcacctgtgttctttcccgccgagatagtctcccaacgtcttgctcggcacttttggctgccttggatgacagtggacttgccgtaaacttgccattgcatcctgtgagtgtcgctgagatgaaaactgaaatcgaccacgtcgcccatggctgggccttattggcactgcgagttcctgagatccgtgcgctggcggaacatcgccaatcgatcgaggagatgtgtgaagcctacagcatcgccgtcctccaccttcgcgagttgagaaaccttggccccgataccgaacaaatcaccgagtatgaaagccttgttgccgggatcgagtacgagacgtcgtattacctgacgatgcgcgctcaactgtcgcctaactttgcgggaactgatcccgctcaaccgcgttcttccccgccgagatagtctcccaacgtcttgctcggcacgtggagggccttgagcccctgtaactctctcggctctccacatccccttcactccggaacatgtagacttctggctcgtttcgatccgaccgcgctggttagctgtgccggctttgccattgttgcggttgaaaggtggggaggcttccggggtctcccccaccgccacacggatggatcaagccgtaatgcgcatctactgcgtgtgttaacgatatcctaaaatgcaatttgacgtggtacaaatttctgcgattgtcgccccgggcaactgaggggttaaaccgtgactgtaggaatttgggctcgccgcgctggtgccgtgatgatggcgcttgcgctggcaagctgtacgacgacacaggcagaatttgcgaagaagccgtctgccgtgagcaaggcagcgctttgcaaaaccgcgttggagacgacagatcccgcattccagttccagctggtatccgaggtgacccgtcgcggcatgaacatgttgcaatgtcagcagatggtcatccagcagcagcaggccgcagcagctctcattgctatcgctgtagtcggcaccgccgtcgcggtatgcgcgaataacaactgtggtggcggcagctactaccagcctcggcgctaccccggaaactgctattcgccgaatgacacggcggccgatggaacacgctgcggcaaccgaagcgcgatgtcacgacctggtgggtggtgatcactaagacgccaatttgaacaccaccgtcgaaatacaatattagacgaccacactccatgggcctgtcacgcctttttcacgatgccagatattgcgcgaatcgaaccttgctgacctctttcaagcaaccaaaggaggtgcttcaatcttccacctcgacgaaaaaaacgcagtagcctttaccgaggattccgtctctcgcgccgtgaaaaaagcaggcgtggaagtcaagaccgtccgtgtcgagcctcacggatctgtggttatcaacggggataacggggggcttctgagggaggacatgccccgcaaacgctatgctttcaccgtgcaagaattcgaccgcttcggaaactaacgctggtattttcgcattggcaaggggaagcgcatccggctcccggcaccatgggggtcaaaggagttcgaggccgagtggcgccgctgcatggcaaacgaggagcccgcccctgctccaaccacgcaaatgcctgggctactaatcgccagccgaggtcttcatcgctcatttgcgcgaaagcggctgatcccctaacctgcaaacgaggcaggatgcactcgggttgggttctccaaactcgcacaccatagactccaattgagaaaatcaccgccaggactcatgcggaaatacaccgagaccgaaaggactaccgacatgcgcggaccgattatcgagaagctctctgacgagatcggtatctaaccagcgactttccccgcgcctagtgctcgtgatcgttgatccgatggggacacggcgcgggaagacggtctcggcgcccttaggcgatggacttggcgggtggtgccgcctcgtgcttcgatcctcgatgggatggaactttcggccgcccgaagtattttgacggaatgaaactcaatatcgcaatcgtaacaatggtaggcactgtgttggctgcgtgcagcccagctgggccatcaggcaattcatccgtacctcagcccgccaaacctgtcgaactcaaaaaatacatgggccactggttcgagctggcgcgctacgagaaccagtttgagcgcggttgcgaggcggttaccgccgactactcgctccgcgacgatggcatggttcgtgtgctgaatgcctgtcgcgaaggcgggataatcggtaagcgcaaagagtccgaaggtaaggcaaagattgttgcagacagcggaaacgccaagctcaaagtctcgttcttcggcccgttttacggggattactggatcctcgatcacgccaacgactattcctggtcgatcgtcggcgagccctcaggtcgctatttgtggatcctgacgcggacaccaacaccctcagaaaagaccagtgacatgcttgtcgaaaaggcgaagacgctaggctacgatgtcgacatgctgaggtggacgcatcactgagcgcaccatgggcgcttgccgctctgcagggcgtacttatcaggtaac

SEQ ID NO: 12 - DNA, 116772 bp, Rhizobium matallidurans
  source 1..116772: mol_type = genomic DNA
gacggtggtccctgtcctggtgatgcctgtcgggacgataatgcggcttgtcgggtttatcgggcttatccggcttctgcggccgctccggtgccggcggcgtctgctgcggcggcgcgaagagcggcggcggcgttctatcggcgggccgttcctgccgctccgcgcgcatgctgcgcagcccgcaactggtgcggatattgccaagcgggcccgacagctgctggtttcccgaaaggaatggcagcgccttgttgttcctcagcgtccgcagtgtcgtctggtcgaccttgcgcggatccgacacgccgccgccgcgcgacgcgatcacgcagtcgcattgctcccgcagctgcttgcagccgccggcgccgcaaaactgcgccgaaccgttgagcagcaccatggccgtggtgccgttgggcgcgacatagacgtcgaacgccgtgccgcgcacgccgatcgttcccgccggcgtcacgatcgaataggccgatgacgaggaattgccgctgatccagcgaaacgtgcccttcgccgccttgatcgtcagcttcttgaccgaattggcgtcgtcgtagacgtagctgtcgatcaccaccgacgaccccgcgccgacggcgagcttggtgccgtcacggaagacgaattgcccaagcccgccaatcgaggtgcggatgcgctcgtcgcgatagacagggtccttgaccaccagaggcccgttttgaccggcgacctccgtcttgatgagagtcgcctccccgaccgcaacttccgcgtacgccggaaacgggaaacacatcgacaggccgagcacggcggccaatgcatgacgcagacgcaacattgcccttaccctcaacaatacattaactatatcacaatgtattgaaggacgtcgccttatccacttgtagtagccgggcgcgaaagccgagcactaccgcgacgacgcgacactgtcgccggctcttgacttcgcgagccgttcgtccgacttcactcctgaccaacgaaggagcaggaccatgacggaagcggcgaagagcacgatcgaccagagcgaagtggatcgcttctcggccatggccgccgagtggtggagcccgaccggcaagttcaagccgctgcacaagttcaaccccgttcgcctcgcctatatcagggacaaggcggccgagaacttcggccgcgatccgcgctcggcccggcctctggaaggcctgcgggtgctcgatatcggctgcggcggcggcctgttgtcggagccggtcgcccgcatgggcgccaccgtcatcggcgccgacccgtccgaaaagaacatcggcatcgcctcgacccacgcgaaggcgtccggcgtgccggtcgattaccgcgcggtcacggcagaacaactggccgaggccggcgagaccttcgacatcgtcttgaacatggaagtggtggaacacgtcgccgacgtcgatttcttcatgaccacctgcgcgaaaatggtccgccccggcggcctgatgttcgtcgccaccatcaaccgcacgatgaaggcagccgcactcgccatcttcgccgccgaaaacgtcctgcgctggctgccgcgcggcacccaccaatacgaaaagctggtgcgcccggaagagatcgaaaagccggtcgccgcggacggcctcaccatcatcgaccgcaccggcgtgttcttcaatccgctgtccaaccagtggaacctgtcgcgcgacatggacgtgaactacatgctgctcgccaggcgcgaggcgtaagggcacccgccgccattcgactagactttcaaggtcctgacatgcgcaagcagatcggcttgcgtttcggcgttgcgcgccgccagttccttgacgcgggcgcgatcgatcccgatctccgccccgtccgagccgaacggggccttgaacgtaaaagcccgcgcgctcggcccgtgatccgccagatgctcgaagcgctcgacagcctcggcccagtcaggccggtgatgcggccccacccaccagagaacgagcggcggccatgacggtttgacgttccagttgcgcgcgtgcttcagcgcatcggcatgcacgccatcatagctgaacgccatcagcgattcgatatcggtccagagcgacagggaggatggcgcggcatcaaagccgctaccctcgatgaaacgcggaaagacctgcggtccccagcttcgcacgcccggttcgccggcatagccggagcggccgacaaagccgcaggcgcggcgtgcagcctcgaaattggccggctcgcgcaggcgaaaaccctcgacagcgtcgctctcgaagggcgccacgtgcaaaccgaagttatacatcgcaaggcgcgcgtccgaattcatttcagtgcacgtcgtcgggcagcacgggaagcgccgcgatctcgatgccttcgtcgagaagcgcctgcgcctcgtcaggtgtcgtctggccgatgatcccgcgcgcatcggcctcgccgtaatggatcttgcgcgcctcctcgggaaagcgctcgccgacatcctcggaattggccttgatcgcggtcacggcctccttgagcttctggaacgcctcgcggcgcgcggcatccatggcgaccgtctgcatctggtccttcttgcgcgcggtcgagaccgacggcgccatcagcaccttggagacggcggccgaattgcaggcgggacaggtgagaaaaccggacgcgacctgtcgctcgaaatcggcgctttcggaaaaccagccttcgaactcatgggcattgtcacagcgcagcgaataacggatcacgcggccacgcctccggacacatcgccgccaaccgtctcgatcgagaactcgcgggcattcttgagattcgggatcttgtcgcgcgccgccttcacggcggccggatcgatctcggcgatcacgatcgcctcgccggtgccgccagccgaagccagtatcttgccccagggatcgatgatcatcgagtgcccgaaggtctcgcgcccgtcctcatgcacgccggcctgggcggcggcgatcacgaacatgccgttttcgatggcgcgggcgcgcagaaggatctcccaatgcgcctcgccggtctggcgggtgaaggcggcgggcaccgtcatcacctcggcgccggcaaccgcctgggcgcgaaacagcgccgggaagcgaacgtcgtagcagatcgcgaaacccatctcggcgaacggcagcgacacaacacgcgcctcctggccgggccggtaggcggcgctctcacgccagctctcgccgttgtcgagatcgacgtcgaacatgtggatcttgtcgtagcggttcaggatcttgccgtcgggaccgaagagatagccgcgattggcaagcttgccgtcgtcgagcgcgatcgccgtcgaaccgacatgcacgtggataccgagttcgccggcgagttcgcggccggtgcgcacgatgatgtcgttggcctcgtcgcaaagatgcgccttggcggcggcgcggtcgcgctgcagcatccctgtcatctcgggcgtctgcacataggtggcgcccgaggcggccgcctcgcgcaccagccgcgccatatcggccgcgttgcgctgcggatcgatacccgaacacatctgaatggcggcggccttgaaggtcattggcatatcctaagcagccagcagcgggtcgagcttgcccgcacgctccagcgcatagagatcatcgcacccgccgacatgcttgtcgcctatgaaaatctgcgggaacgtcgagccgccatgggcgcgcgcgatcatctcggcgcggaaggccggcgtggagctcgcattgtgctcgacgaaatcgacacccttctgggaaagaagggacttggcgcgcacgcagaaaccgcagccgtcgcgcgtatagatcgtaaccggtaccatcaggggctccagacaaggcatttatctcactgtcatatagtttccgaaagagcccttgcaaaggtcaaaaccgtgatctcggcggcgcccgcgcggcgcagcaccctggccgcggccgcgacagtcgcgcccgtggtgtagacgtcgtcgaccagcaccagccgcttgccgaacacatctccctcgcggcccgcggcgatcgcgaaagcgccgcgcacattgtcttgccgcgccttggcgcccagccccacctgctggcgcgtgcggcggacacgcagcagcgtcgccggcaagagcgggcgttcggcctgcttcgccatgtgacgcgcgagctccgccgcctggttgaaccggcgcgacaagatccgcgtgcggtgcagcggcaccggcaggatcgcgtcgcagcgctcgacggcaccgtctgatgctctcagcatccacgccgccatcatcggcgccagatcggtgcggtcgcggtatttcagcccgtgtacgagattgcgcactgcctcgtcgtgaaaggccgccgtgcgcaggcggtcgaacggcggcggctcggcgatggcggccgcgctcagtatccctgggccgagatcatgggaaaacggaatgccgagaacctcgcaatagggccgctcgatgaagcgcagctccgaccagcatttcgggcagacgccgcgatgccgccccgtcgatacgccgcagacggcgcaggcgggcggatagacaaggtcgaccagaagcgagagcggacgcctcagcacccggtcgatccccgccaaacctctcagaccgcgcaaccccatggcgaaacgatagcgcatttcgcgcgccgggaaaatcattcgtaaatcatcggtaaagttgccggcaaggtcagtggcaaaatcgccttgccgccccggcccggcgggattattgacgtcggcatggatatcatcttcgatacatcgaggatcgcggcgaaccgtcatcgcgcgcttcgcaacaacgatccgaaggcaaccttcctgctcgatatcgcagccgacgaattgggcgaacgcctcgccgtcgtcgagcggaccttcgagcatgccgtggaattgcatggcgcaaccggatcggccgcccgagccgccaaggccaccggcaagatcggcagccttacccgcgtcgaaagcgaacaggcctacgccacttcggacgatgccttcatcgaggcgccgctggagatggttccgctggagccgcaatcggccaatctggtgatcgcgcccctcagcctgcacctgaccaacgacacgcccggcgtcttcatccagatccgccgcgcgctccgtcccgacggcctgttcctcgccgccattcccggctccggcacgttgcaggaactgcgcgacgtcctgctcgccaccgagatcgagatgaccggcggcgcgagcccgcgcgtcattcccttcgccgatgtccgcgatgtcggcggcctgatgcagcgcgccggtttcgcgctgcccgtcatcgacgccgagacctatacggtccgctacgattccatctttccgctgatgcgcgacctgcgcgccatgggcatggccaatccgctcgccgagcgcagcggcaagcccctgacgcgcgcattcttcctgcgggccgccgaactctacgcggagcgctattccgatccggatggccgcatcagggcgaccttctcgatcatctatgtctcggggtgggcaccgcacgaaagccagcagaagccgctgcggccgggttcggccaaggtcaggctcgcggacgcgctgaaggtcgaggagcacaagctcaagcagtagcccggcttgcggccacctggcttcagttgagtgccggtatctggttggcgatggtggtgaagatgttgttcagctgcccgctgacggcgccgacgccggtgatgagcgctgtggcgatcagggcggcaatcaggccgtattcgatggcggtggcgccattgcggtcggcgacaaatgctttcagcagtctcatcattcgtccctcgcgcgacatcagcgtcgattgttttgcatcgccccgggcatcagccctcagcagccggtactgcttccgtaaccctgcaccacgcagacggagcccggcatctcctgcagcacgctgcgacggatcgtatagcgcttgccgttctcgttctcggtcttcgggatcgaacccgtcgtgatggaatcgaattcagacggcgcgcttgcgaagacgctcgacttcgacttgtcggcgagcatcggtgtcaggatcagcgtcagcgccaccacggccgtgccaaacagcagggcgatgttcagcacccccgtcttgcgcgaggaagccgaagcctgctctttttcccgaactgctttccagaaatcgtcgtccatgcgtcaagccttcatacacacacgccagttgcttgattgaggccgatctttgccagaatctgttaaacgatcgattaatatccacagccagaatggcacggaaatagttatacagtagaaatatctaaagtaagtcctggaggatggggatcagcggctcgtcggccggtggcatgggataatcccgcagcgcctgcggcttcacccacttgatcgcctgcccctcgcgaccgacgggaataccctcgaaacgacggcagacgtaaagcggcatcagaagatggaatttctcgtaggtatggctggcgaaggtgagcggcgccaggcacgcgaccttcgtcgtgattccgagctcctcgtggagttcgcgcaccagcgtctcctcaggcgtttcgcccggctcgatcttgccgccgggaaactcccaaaggccggccagcgatttgccctcgggccgctgtgccaaaaggatacggccgtccgcgtcgatcagggcgcaggcgacgacgaggagaatgctgtgcccagtaccgctcacgactgtagcgctcatcggcaaagatcccgccgccagtaggaatagcgataggcttcgacgaaaccgagccgctcgtaaagcgtgatcgccggcacgttgccggtcttgacctgcagccaggcggagcgcgcgctgcgcatccgcgcccagcgcagcgccgaggtcagaatctcgagcccgagcccctcacggcggcgcgccggggtgacggagagcgacatgatgccggcgaggtcgttgtcctgcacgcacagcacggtcgccagcggccccgtttgcggatcttcgaccatgaacaggccggatggcggcttgatcgcgttgatcacctcggccagcgccggcttcagcttcgtcgacacctggtcggtcgccagattggcatccacgaagcggctgatgtcatgcgtcggcagatgatcgagcgtatccggcaggtcggcatgggcgaggtcgcacgtcatgacgatggtctcgtcgaacggcgtccagccctcggccttcaccagatcgatcaggacaggcgacgccagcggcgtctgcctgagcacggcggggcgggcataggcctcgaacttgcggcttgccttggccagccggatctcgacgtcgcgatgatcggagggatcgagcggcacgatcgagttcagccggttcgacggatgtcccgccgtcagccgcacctgccagctgccgtcatagacaaccgacgaggccggccaggcgcggaaaccgacggcttcaagcctgcgtacgagcggcagatttgccttcttggggagtgcttcggtcaatgaaagatcagctccgatagtcaccgttgatggcgacatactcctttgtgaggtcgcaggtccagaccgttgccgtgccgtttccgagaccgatttccacctttaccggaatgtcctgctttttcatgacgttggaggcagcctcctcggagtagcctgcatcacgttcgccattgacggcaacgcgcacgtcgccgaaccagatggcgaggcggtcgcggtcggccatttcgccggacttgccgacggccatgacgatacgaccccagttggcgtcctcgccggcggccgcggtcttgaccagcggcgaattggcgatcgacagcgcgatcgtcttggcggcggcgtcgctttcggcgcccgtcacggtgatctcgagcatcttggtggcgccttcgccgtcgcgcacgacctgcagcgccagatccttgaggagatcgttgagcgccgcgcggaacgacgcaagacgcggatcgtcggccgtctcgacgcgaacctggccgtcctcggcggcagcaccggtggcaaacagcatcagcgtatcggaggtcgaggtgtcgctgtcgacggtcatcgagttgaaggtcggatcgacgccctgagacagcatcgcctgcagcgctgcgggcgcgatgtcggcgtcggtgacgacgaaggagagcatcgtcgccatgtcgggcgcgatcatgccggcgcccttggcgatgccgttgatcgagaccgcaacaccgccgatttcggccgtgcgggtcgcgaccttcgggtaggtgtcggtggtcatgatcgccttggcggcctcgaaccagaaatcgcctgacgcgtcggcgtagagcgtgtcgagcacgccggaaaacttggtggcgtcgagcggctcgccaatgacgccggtggaggccaggaagatctcgctctcggcgcagccgacggcggcggccgcggacttggcggtgagcgcggtcgcctcacgacccttgacgccggtaaaggcgttggcattgccggaattgacgaccacggcacgcgccacgccaccgggcaggttggcgcggcagaaatcgacgggcgccgaagggcacttggagcgggtgaagacaccggcgacggccgccggcttgtcgaacaccatcatcagcacgtcggtccggttcctgtacttgatccccgccgaggcggttgccatgcgaacaccgcgtagcgcgggcatggacacgaaggttttgggagcgagcggggaaacggaaccggacatgatcatcgacctggcattggaaggatatggaagggcccggaaaaaccgggccctcgatggatgatattactgctgagccggggcggcgggctcttcgcccggctgcggcttcttgttggcgtcctcgtagcccttgcgcagggcttcgtccgtgatgtcgatcttggacttttccttggcggtggcgagaagcgcgagatacttgtcgcgcatgacgagctggcgaacctgatccttgacctggtcgtagggcggaggagcggagtcgcgcttgtcctcgacgaggatgacgtgatagccgaaatcggtcttgatcggggtcttggtgtaggtgcccttttcaagcgcgaaggctgcgtcctcgaattccttgaccatgcggcccttggtgaaatagccgagatcgccgccgtcggccttgttcggatcggtggacttttccttcgccagatcggcgaagttcttgccggcgtccagctgcttgatgacgtcctgggcttcggcttccgtcttcaccaggatgtggcgggcgcgaacttcttcctgcttcggaagggcggcgacttccttgtcgtagcgagccttgacgtcggcgtcggtgatcgtgtcgacgacgtacttcttgaagtaggcgttatgcagctcgcgatcggcgagatactgcatgcgcttcttgaactcgggctcctggtcgagcttctcggcggccgcatccttggcgagcagcttcacgtcgatggcggccgaaagagcggcgaccttcttctggtcgtcgggcagctggcccagctgcgggtcgaggttggcaacggccagatcgagttccgactgcaggatgtcgacgtcgccgaccttggcgacaactggatccgccttgtcctgcgcgcgtaccggtgcctgaaacgcaacaaaagctgcaagcgccacgacggcaaatttgttgtaattcaacattcaatattccttcacagttaaaccaccggcttcaacttcgtgaatcgagcccgaaacagccatcaacactggaatgtggcctttctatatcagccaaatccgttgacatcattcgacccccctcttatctgtcacgcaacctcgcgtccagaaaagtttcctggcgtttcgatacgtgcgcccgaaattcggccgggcagcacttaagaaaagcccgggatgaatattcagaaaggaccagtcgtatggtcagctttggcggtatcgcccgtaaaatatttggctctgccaacgatcgccgcgtgcggtccttcacgccgaacgtcgcctcgatcaatgcgatcgaggagaaaaccaaggcgctgtccgacgagcagctcgccgcccagacggtggagttccgcaagctgctcgccgaaggcaagacgctcgacgacatcctcgttccggctttcgccgtggtgcgcgaggcctcgcgccgcgttctcggcatgcgaccttttgacgtacagctgatcggcgggatgatcctgcattccaacgcgatcgcggaaatgaagacgggtgaaggcaagacgctcgtcgcgacgcttcccgtctatctgaacgcgctgtcgggcaagggcgtccacgtcgtcaccgtcaacgactacctcgcccagcgcgacgcggccaccatgtcgcgtctctatggcttcctcggcctgaccaccggcgtcatcgtccacggtctttccgacgaggaacgcgccgcggcctacaactgcgacatcacctacgcgaccaacaacgagctcggcttcgactatctgcgcgataacatgaagtacgaaaaagcccagatggtccagcgcggtcacaatttcgcgatcgtcgacgaagtcgactcgattctggtcgacgaagcccgcactccgctgatcatctccggcccgctcgacgaccgttccgatctctacaacacgatcgacgccttcatcccgttgctcgtcgaaagcgattacgaaatcgacgagaagcagcgctccgccaacttctccgaagaaggcaccgagaagctcgagaacctgcttcgccaggccggcctcctgaagggcgagagcctctacgacatcgagaatgtcgcgatcgtccaccacgtcaataacgcgctgaaggcccacaagctcttccagcgcgacaaggactacatcgtccgcaacgacgagatcgtcatcatcgacgagtttaccggccgcatgatgccgggccgccgttactcggaaggccagcatcaggcgctggaagccaaggaaaatgtaaagatccagcctgagaaccagacgctggcgcagatcaccttccagaactacttccgcatgtacgacaagctcggcggcatgacgggtacggcgcagacggaagccgaagagttcggcaacatctacaatctcgacgtcgtcgaggtgccgaccaacctgccgatcaagcgtatcgacgaggacgacgaggtctaccggaccttcgaggagaagtacaaggcgatcatcgccgagatcgccgatgcgcaaaagcgcggccagccggttctcgtcggcacgacttcgatcgaaaagtccgaatatctggctgacttgatggagaagcagggctacaagaacttccaggttctgaacgcccgccaccacgagaaagaagcctacatcgtctcccaggccggcgttcccggctccgtcaccatcgccaccaacatggcgggtcgcggtaccgacatccagctcggcggcaacctcgaaatgcgtgtcgagcgcgagcttggcgaagtcgaggccgggcctgagcgcgaggccaggatcgaggcgatccgcgaagagatcaagcagctcaaggaacaggcgctggccgccggcggcctctatgtcatcgcgacggagcgccacgaaagccgccgcatcgacaaccagctgcgcggccgttccggccgtcagggcgacccgggccgctcgaagttctacctttcgcttcaggacgacctgatgcgcatctttggctcggaccgcatggattcgatgctgaccaagctcggtctcaaggaaggcgaggcaatcgtccatccctggatcaacaaggctctggaacgcgcgcagaagaaggtcgaagcccgcaacttcgacatccgcaagaatctgctcaagtacgacgacgttctgaacgaccagcgcaaggtggtcttcgaacagcgcctcgagctgatggaagcgacaaacatctccgagaccgtttccgacatgcgtcgtgaagtcatcgaggagctcgttcagaagcacattcccgaacacgcctatgccgaacagtgggatgccgcgggcctgaaggagcagaccaacgccctcctcaacctcgacctgccgatcgaggactgggtcaaggaagaaggcatcggcgaagacgatatccgcgaacgcctgacggacgcggccaacgccgtcttcacggaaaagtccgaacgcttcggcgacgacatcatgcattatgtcgagcgttcgatcgtcatgcagacgctggactcgctgtggcgcgaacatatcgtcaatctcgaccacctgcgctccgtcgtcggtttccgcggctatgcccagcgcgacccgctgcaggaatacaagtcggaagccttcgagctcttcacctcgctgctcaacaacctccgccaggccgtcaccgcccagatgatgcgtgtcgagctggtgcagcaggagcaaccgcaaccaccggtcatgcaggcgcatcacatcgatccgaataccggcgaagacgagttcggctcggtctaccaggcatcggacgtcaccgtcgcacccgaaaaccgcaaccccggcgaccccgccacctggggcaaggttggccgcaacgaggtctgcccctgcggttcgggcaagaagtacaagcactgccacggtgccttcgaacaggcctgaagccggttcgagcattgaaatcgaagccctcgcgacaggcatgtcgcgagggctttttcatgcgcgcattccgccgctttgtctcgccagcggtaaaatccgcccacaacttgcaatttcatgatccgcccggaattcagccgcaaaacagtcgctttgttcgtcgagcttgcgggctgaaagggaccatcgaccatgacgacaaattcaacccatcgcccgagagattcccgcccgcgcatcgccattctgttcggcggccgttcccccgaacacgacgtctccatcttgtcggccgccaacgtcgtcgcggccctcgacgccgaccgctacgacgtgctgccgatcttcgtgaccagggagggacattggctgcttctgcccaagggtacggcgccttcggcggcggccagggtcgaggaagcggtcgaggtcagccttgttcccggcggccacggccgcatgctcgccataccccagggcgcgcagccctatgaagtgtccgcgatcgacgttctctttcccgtgctgcatggaatgcacggcgaggatggttcggtccaggggctggcatccgttgcccgtgtgccgctcgcaggctgcgggctgctcggatcggtcaccgccatcgacaaggacatcgccaagcggctgctgcgggatgccgggctgcccgtggcgaaagcgctctgcatccagcaggacagcgtgccctccttcgacgccgccgcgcgcgaactcggcctgccgctcttcatcaagcccgcccgccagggctcttcggtcggcgtcagcaaggtgaagactcaagaggacttcgccgccgccctcgcggaaggtttcaggcatgacggcaagctgctcgccgaggagttcatcgccggccgcgagatcgagttcagcgtgctcgagcacgcgaacggcgacatcaccgtctcgctgcctggcgagatcgcgccggccgaaagccacggtttctacagctacgaagcgaaatatgtcgacgaggccggtgcggcgctgcgcgtgccggcgcagctgccgaaggcgatcgaggaccgactgcgccggaccgcgcgccaggccttcaaggcgctcggctgcgacggcatggcccgcgtcgacttcttcctgatgcccgacatgaccttcgtcgtcaacgaactcaacaccatccccggcttcaccaatatcagcatgtacgccaaggcgatggcggcatcgggcgtcggctatgccgaggtcctcgatgtcctgatcgacagggcgcttgcgcgcggcggcggctaaggcttcggactggggacgggttaagccgcggcatcccggcacaaccgtttcttaaccgtgtcatgccactactctaggcacgatttgccagagagttttgcgtgtccattatggcggtcatcgagacggcggagaagatgctaccggcgagcctgcgtcctgcgggcggtcgcctgcttcgcatgctcggcgatatcatgacccggcgtggcgagaaggccgccgcccagcgcatggcgctcaccgccttcctgatccgcatcgtcagcgccgcccttgccttcctcgcgcagatcgtgctcgcgcgcatgatgggcgaatacgaatacggcatcttcgtcttcgtctgggtgctgatcgtcctcttcggcgacctctcctgcctcggctttcaaaccgtcatcgtccgctacctgccgcagtacaaggcatccggcgccttcgaggaaatccgcgggctgaccggcacggcccggctgttcggccttctgtctgggaccgccatgctcgccatcggcatgattggcctctatctcttcggcgaccgcatccagggctactatgtcgtgccgatcttcctcgggctcctcgccatgccgatgatcgcgctcggcgacatcctggaaggcacctcgcgcgccaaccactggccggtcatggcgctgagccccatctacatcatccgcccggtcctgatcatcgtctgcatgctgatcgccatcggtcttggcgccccgcgcacggccgtcaccgccatgcaggcggcgctggtcgccacgtacctgaccgcgctcggccagtatgtggccaccctcatccgcctgcgccggcattatcgtcacggcccgagcaagaccgatttcctgagctggctaagcgttgccttcccgatcttcctgatcgagggcgtcagcttcctgctcaccaattccgatgtcgtcgtcgtcggcattttcctggcgccgcacgaggtcgccatctacttcgccgccgccaagacgatggcactcgtccatttcatcaacttctcggtcaaggcggcgtccgggccgcgcttttccagcatcatcgccgagggcacccgcgccgagctcgccgccgctgccttcgacgccgcgcgatggaccttctggccggcactggcggtcggccttgtcgtcctggcatcgggacaccttctgctgtcgctcttcggcggcgccttcacggccggttacgtgctgatggcgatccttctgaccggcattctcgccaaggcgctggtcggcccggccgagacgctgctgatgatggccggaaagcagaacatctgcgtcgcggtctatgccggggcgctgacggccaacatcaccctcaacgttctcctcattccctatttcggcatcgagggcgcggcgatcgccacggcctccgccatgggcgtcgaggccgtgcttttgcatctcgccgtgcgccgcacgctcggcatcgccctcttcgccttcgccagaccggccagcgccggcaacgacatggaagcctgacagcatggtgcgcaatcctcccggaacccagaccaccgacgcgaccaccaaccgcatggtccacgagctggcatcgctggaattcggcatgccgcaggccgaagcccgcgtcgagatcggccgccccggccgcgaactctgcgtctactcgggcaagctcggctacgacctgcaggacgaactggattttctctccaaccgcgcgctggagccgaatgtcttcttcaccggccgcttcctggcgccggccatgccgcgcctcgacgaccgcgaggtcaacttcgcgctgctgcgcgaccacaacgagacccgcagccgcctgcgcgtgctgatgccgttctcgatcgagaagccgggtttcgccgtcggtccctcgatcatccgcgtttgggccaacagcttcgcgccgctgggcacgccgctgctcgacggcgaggatgccgccgaaacgctcgacaacctgctcgatggcctgaccgcccgcgacctgcgcatgcccggcatcctggtgctgccagacctgcggctgaacggcatcttcgcccgcatgatccgcgccgtcgccatcggccgcaacctgccgatcacgaccaccaacccctatctgcgcccgatgctgcagagcgacgaggacgccgtcgcctatctgcgccagtcggtctcctcttcgcacatgcgcgagatgcgccggcaatggcgactgctcgaggaaaagggtaccgtcgtctacaacgtcgcccgtcagccgcgcgacatccatatgcgcttcgaggagttcctggcgctcgaagccggcggctggaagggcaagaagcgcagcgccctcgtcaccgaccgtctgcacatggcttttgcccgtgaggcgatctccaaccttgccgccgtcgacgccgtgcgtatccactcgatcgacttcaacggaaaatccatcgcctccaccgtcgtcctgatgatgggcggcgaggcctatacctggaagaccgcctatgacgaggcctacgcccgctactcgccgggcaagctcctgatgggcgaactcaccgaatggcacctcgacgacgccaacatcgtccgctctgactcttgcgccgtccccgaccatccgatcatgagccgcttctggcaggaacgcgaggaaatgggcaccgtcgtcatcggcctcaaccagaacgccgaccgcgacgtccgccaagtggccacccagctccacctctacagcagcacgcgcaatgtcgcgaagatgctgcggcagaagatcatgtcgctggctgggcgggggtgaggtgtgaggcctcgagagcggccccatctggtgtcgaccgtaagccgtcgttgacgtcgtgccgtgcgatacccccctttgccctgccgggcatctcccccacaagtggggagattggctgggcgcgcccgctcgctcctgcctcaacgtttggcgacgagctctccacgagtcgatctcccccttgtgggggagatgtccggcaggacagaggggggtatcacacggcacaagctgaatgacgaaaaagccaggaagaacgcggcaggatataagaactcacacccaaccacaccacaaaaccccgcgccggagacctctccgcgacggcatggcaggatgggaatgggcaggcaacgtttggtatagagtaggattgtcaggcaatatcgcctgcccgatcatatcgaggcgtccggatatccaggccgacaggagcgtctctcggcctttcgcttccggatggatgggagatcctgacgacccgatcatccacctttcaacaaccatcaccggacgccgggcttgcgcccagatgtgtcagatccggttcgcgacccggctccctgtccaatgacgtcatcagtatgggagcaacgattgcggcggggatggatggggaaaatcgaataagcaagtggctgatatcaaggcgatttctttcaccgcgcaagattattatccccacactacccctccgccaccgcccgctcccgcagcatccgccggatcaccttgcccgacgtcgtcagcggcagcgcgtcgacgaacgccacctcgcgcggatattcgtgcatcgacagccgcatcttgacccagtcgcggatctccgccgccagcgcgtcgcttgccgcaaatcctggcgccaaaaccacgtaagccttgacgatctcggtgcgcaacgcatcgggcttgcccaccgccgccgccatctgcacggccggatgaccggtcaggcagtcctcgatctcggccgggccgatgcggtagccggatgaggtgatgacgtcgtcgtcgcggccgaggaaggtgatgtagccgtcttcgtcctgccggccgagatcgccggtcagcaaccagtctccggcgaatttgcgcgcggtcgcctcctcgtcgttccaatagccgagaaacatcaccggatcgggccgcgcgatcgcgatctgtcccacagtgcccgaaggcagcaccgcaccggtctcatcaacgatcgccaccctatgccccggcaccgctttgccgatcgcccccggcttgctcacgccaagcgcggcattcgacgacagcacgaaattgcactccgtctgcccgtagaattcgttgacattgatgccgagcgtgcggcttgcccaatcatgcgtctccgcccccagcgcctcgccggcggcgccgatggtgcgcagcttgagatcgtatcgctggcgcggatcgggcaccgatttcatcagccgcaaggccgtcggcggaatgaagccgttgcgcaccttcatctcggccatgatcctgtaggccatgtcggcatcgaacttttgcgccggcgacgagaccacgggcacgccgagcatcaggctcggaagcagcgcgttgagcagcccacccgcccatgcccaatccgatggcgtccacatccggtcgcccggttgcggaaaattctcgtgcgcgaactggatgcccggaatatgcccggccagcaccctgtgcccatgcagcgctcccttcggcgcacctgtcgtgcccgaggtgaagatcatcagcgccggctcgtccggcccggtcggcggcacgtcgaaactgggtgaattgcgctcgacaaggctgccgaaggagacgacgtcggccttgtcgtcagaagcatcgacgctgatcaccgtcttgaggtccggcagccggtcgcggatcgcatggatacgctcaagcccgaaagcgttggtcacgacagcggccgcgccggatgttttcagccgatattccagcgcctcgacaccgaacagcagcgccagcggcaccgcaatcgcgcccatcttgtagatcgccatatgggcgatcaccgtctcgaaggattgcggcagaagcagcgccaccccatcgccttttgcgagaccgagcgcgacgagcccattggcaagagaggcagagcgcgccgcaagcgcgccatagctcagcgaaagatgatcaccatccgggctgaagtgctgaagacagatccgctccggctcgcgcgccgcccaatcgtccgaacacacgcggccgatgttgaaatcctcggggatcgtccaggcgaaatcgcggtagagatcgtcatagcgagcgcgcggcggcagcttcatgggcgcaggatcatcggtggggtctcggggcaagagtccggttatgctgcagcagctaacaccgtggacgcggctcacgcaagcgtgaagcccgatcgcccttctcaccccggggaacgcatggttgtttgttgccgccgctgccaatctgcaggtcaccgccctagataggggtagcgccagggtttcttttctcatcacggagcgatttcatggaatacgtcaaattcggcggcaccggcctcgaagtctcgaagatctgcctgggctgcatgaccttcggggagcccggccgtggcaatcacagctggacgcaggccgaggagccgagccgcgcgctgatcaggcaggcgctcgaagccggcatcaacttcctcgacaccgccaacacctattccgacggttcatccgaggaaatcgtcggccgcgcgataagagatttttcgcgccgcgacgagatcgtgctcgccaccaaggtgttcaaccgcatgcgcccgggcgccaatggcgccggcctgtcgcgcaaggcgatcttcgacgagatcgacaacagcctgcgccgcctcggcaccgattatgtcgacctctaccagatccaccgcttcgatccgaccacgccgatcgaagagacgctggaggcgctgcatgacgtggtgaaatccggcaaggcgcgttatatcggcgcgtcctccatgcatgcctggcagttcgccaagatgatctacacatcaagggccaatggctggacgcccttcgtcagcatgcaggaccacctgaacctgctctaccgcgaggaagagcgcgagatgctgcccttctgccaggaccagaagatcgccgtcattccctggagcccgctggcgcgcggccggctgacgcgcgactatgacgagaagaccgcccgcagcgagacggacgagttcggcaagacgctctaccagcaggccgaggacgcggaccgcgccatcatcggcgttgtcggcgatctcgccagaaagcacggcgtctcccgcgcccagatcgccaccgcctggatcctgcagaagagcgccgtcaccgccccgatcatcggcgcctcgaaatcaggccacatcgacgatgccgtcggcgcgctttcgatcaagctttcggccgaggatgtcgctgcactcgaagagccctacgtgccgcaccgcgtcgagggcttcaagtaacgcggacaaggtgcggctattttttagccggcgaaagagcgtcgcgcgtcgtgaacaggaaactgtcggatagctcgcggctctccaccgcgcgcgccaaaatcaccgcccccatcatcgccgacagcgtcgtgaaccccttggcgcggcgctcttcggcgctgtcgccgggcacgatcccggacaggatatcgaccagcgcggacagcccgtcgttaaaggtcgaacgcacagcaccttggctgcggctcacctcctgcaccagcgaggcgaagacgcagctgccgcctggatcgtcgacgctgcaacgcgaaagatagtgcttgaggagcgcatcgagctgcgcgtccggcgcgcctgcaatgatctcgttccagcggaccttcacccgctcgatcagcgcccggctgacttcgagcgccagatcctccttcgactggaaatgcccgtagaagccgccatgggtcagcccggcggccttcatgatctcggccacgccggtggattcgaaccctttttcgcgaaacagcacgccggcgacgccaaggatcttctcccggttttcagcgaatttctcccggctgacacgcattaaaatctccaaaaaacaccgcttgacattttatatgacgtccatcatcaataatcaacaatgatgatgaccatcatctaaatatttgcattagccttccggcagcccccgaacggaacaacccccatggtctccactgcacttgcctccacgctggcgcggcgcaacatccattacggatgggtcgtcgtcgccgccacctttctcaccatgctggtcacggccggcgccatgggcgcgccgggcgtgctgatcaagccgctgcaggacgagttcggctgggagacgtcgcagatctcctcggcgctcgccgttcgcctgctgctcttcgggctgatgggccccttctccgccgccttcatgaactatttcggcgtccgcaaggtcatcgtcttcgccatggtcctgatttccagcggcttcgtcggctcgctgttcatgaccgagatctggcagctgctgttgctctggggcatcgtcgtcggcctcggcaccggcctgaccgccatggtactggccgccaccgtatcggcccgctggttcaccaagcaccgcggcctcgtcgtcggcatgctgtcggcgagctccgccaccggccagctggtcttcctgcccttgatggcgcagctcaccgagagttacggctggcgcgcgacggtcttcttcgtctgcggcatgatcctccttgccgccctcgtcgtgctcgccttcatgcgcgaccgaccctccgacctcaacctcccctccttcggcgaggagcacgtcaccccgccgccggcacgcacgggcggcctcctcaccatgctggccgcaccgatcgtggtgctcagggaaatctcgaaaacctcgaccttctggatcctgttcgccaccttcttcatctgcggcctgagcaccaacggcctgatccagacccatttcgtcacgctctgcggcgatttcggcatcctgccggtggccgccgccagcgtgctcgccgtcatgggcatcttcgatttcttcggcacgatcggctccggctggctgtccgaccgcttcgacaatcgctggctgctcttctggtattacggcctgcgcggcctctcgctgctctaccttccattcagcgatttctccttctacggcctgtcgatcttcgccgttttctacggcctcgactggatcgccaccgtgcccccgacggtcaagctcgccgccgagcgcttcgggaaggagaaggtcggcatcgtcttcggctgggtcttcacaggccaccagctgggcgccgccaccgccgcttatggcgccggcctgtcgcgcaccgagctgcagagctatctgcccgccttcttcatcgccggtgccttctgcctgctcgcctcgatcctggcgatcacgctgaagaaatccggcctcgccgccccggccgcctccgccgcccactgacggcccctttccggccgaagcctccggccggaagccccgcgaaatcagcccgataacttcgcccgccgtcttgcgcgcgcgggcgaacgcatgctagagacccgcctcgtcggtatccgttgccccattggcggaattggtagacgcgctcgactcaaaatcgagtttcgaaagaagtgctggttcgactccggcatggggcaccactggacttcccgttaccgccgggcctttgcgttttactgttatctgaagttgaaaccggtcatcgccctattacgcgtggcgctcccgaggctcacgcggcaggctcatggcccgattgtcaaaaagcaggcgcgggaacggctccctcacgctctccgcctcctcatacatagctcactttaaatcagcggtttaatttcctccgcacttcggtcaaagtgcccgctctcgaaaaggagaccacaccagcgtgccgcacgaagtcccgctcatcgccaccattgccgtcagcttcgggttcgcggcgatcctcggctatctcgccgatcgcctgcagctgccgccgctggtgggctatctgctggccgggatcctgatggggccgatcacgccgggcttcgtggccgataccggtcttgccagccagctggccgagatcggggtgatcctcctgatgttcggcgtcgggctgcatttctcggcgcgtgacctgctcgccgtgcgcggcgtcgccatccccggcgcgatcgcgcagattgtcctggcgaccgtgctcggcgtcgccatggcggaatggtggggctggagcctgggcgccggcatcgtcttcgggctcagcctgtcggtcgccagcaccgtcgtgctcctgaaggcgctggaggaacgaaatctggtcaacgcagccagcggccgcgtcgccgtcggctggctgatcgtcgaggatctggccatggtgctggcgctggtgctgctgccggcgctggccgaactgcttggcggcagtgcccctggcgccgatggcggcatgcccttgctgctgacgatcgcgctcacccttctgaaggtcggcgccttcgccgccatggcgatcttcctgggccccaaggtcgtgccgtggctcctgatccgcgttgcccgcaccggctcgcgcgagctcttcaccctgacggttctggcgctggcgcttggcatcgccttcggttcggcgcagattttcggcgtgtccttcgcgctcggcgccttcttcgccggcgtggtcatgagcgaatccagcctcagccaccgcgccgccgccgattccctgccgttgcagaacgcgttttcggttctgttcttcgtgtcggtcggcatgctgttcgatccgtcgatcatcgtgcgccagccgctcggcgtgctctcggccctgctcctgatcatcgtcggcaaggcgatcatctccttcgtcgtcgtcacattgctgcgctatcccatcggcatgggcctgacggtggcggggggcctcgcgcagatcggcgaattctccttcattctcgccggcctcggggtgacgctcggcctgctgccgaccgatggccaggacatcatcctggcgagcgccatcatctcgatcaccctcaacccgctggtttgcgccggcgccgaagcgctgcaccaatatgtccagcgccgctggccgcaaagcgtccgccacggccacgccaatttcgatctcctcaacgacgaactcgacaagatccgcgccatcaccgaagcgcgcgaacaccagcaccagctggagatgcgtgagctcagcgagaccttcccgctgtttgccaatgtcgacgagaactcgcaggaagagctgctcctgctgttccgcccgaaatcggcgcttccgggcgagcgtgtcatgcgcaagggcgatcgtggcggcggcatgtacttcctgtcggcgggtgccgtcgaagtacagcttcccgacgatgcgatccggctggaacccggcgccttcttcggcgagatggcgctgttgagcggcggccgccgcaacgccgacgtggtcgcggtcgacttctgccatttcttcgtactggaacggcgtgatttcaacatgttcacatcaaagcacccggcgctgcgccagatggtcagcgagatggcgcgtgaacgcaccgagatgaacgtcatgcgccagaagcgcgtcccctcgtccggcgtcgtctcctgatccggcggatgatcatcacagttttttgccgcactgccgcatgactgacacagcaggcatttacaggcgcatgtcagccccataaagctggcgcaggcaacctgaaaggaccagaatgcttcgcagattgtatgactggaccatgtcgctggcagcgcgcaaatcggccgaagtctggcttgccatcatcgccttcgtcgaaagctccgtctttctggtacccgccgatgtgctctacgtgccgatggcgctggccaagcccgagcgcgcctatcgctacgcggtggttgccaccaccgcctcggtgctcggcggcatagccggctgggcgctcggctattacgcctatgacaccatcgcccgaccgatcctcgaattctacggcaagctcgacgccttcgagcagctcagggtcttcattcagggtcagtgggaaatcgtgctgctgatgctggtcacctcggggcttgcgcatctgccgccgatcaaggtggtgacgatccttgccggcgtggttcagatgaacctcggcttcttcatcatctcggccatcgtcgcccgtggcgcgcgcttccttttcctcgcctggctgctgcgccgctatggcgaatcgatccgccacttcatcgaaaagcgcctcggccagatcaccgcgatcgtcgccggcctgctgatcgtgctcggcgtcggctacaagctgcttgcctagtgaccatccaccaagccaaagcccccatgcgttacctgcccggagcccccgcatgactgcctctttctctgttcgccgtcccaccttcctctattccgtcctgcttgcggtcggcatggctgccgtcatcggctccgcgctcggcttccagtatatcggcggctatatcccctgcgagctctgcctgctgcagcgtcagccctattattacggcatcccgctcgtcctcatcggcgcgctgaccgcggccttcggcctgcccaactggatcggccgcacgctgctgctggccggcggcctgctgatggttgtgggcgctggcatgggcgtttatcacgccggcgtcgaatggggtttctgggctggtcccaccgcctgctcgacgagcgccggcagcatgacgaagaacgccagcgacctcctgaccgaactcaacaccatcaagggaccgtcctgcaccgaggcggcgctgcgcgtgcttggcctgtctatggctggatggaacgtcgtcgcgagcctcatcctggctgccttcgcctttatcggcgtgcgcaagtcggcctgatcggtccgccgcgaagcggtcctgaccggaggcgatctcgacaaaggtcagggctgcagttcgctatcccagtagagatagtcgagccagctgtcgtgcagatagttcggcgggaagagccggccattgttgtgcaggtcctgcacggtcggctggtagggcttctgatgcgggaacatgcctgcctgtttcgggagcttgctgcccttcctgagattgcagggagagcaggccgccacgacattctgccacgtcgtctcgccgccatgggcgcgcggaatgacgtgatcgaaggtcagatcctcgtgctggccgcaatactggcactcgaacttgtcgcgaaggaacacgttgaagcgcgtgaaggccgggttgcgagagggctgcacgtaggttttcaggcatacgacgctcggaagccgcatcgaatagctcggcgaggagaccgaatgttcgtattccgcgatgatattcacacggtcaagaaagaccgccttgatcgcgtcctgccaggaccagagcgacaagggataatagctcagcggccgatagtcagcgttcagaacgagcgctggcagggcctgaggtgaaacagcaatcgtcaaggcactctcctgatcgattcggcatctgcactcttatattaggccggttgtgacggcattgtgaagtccaataaattcaagccacacaatggcatttgtatgtgttgccgttcagccgaccggaaccaggccacgtcccagtttcgctgcataatacgcccagaaaagccgcgcggccaccgatctccacggcgcccactccgctgctatcagggccagcgcgcgcgtcgtcggccgctggtcgagaccgaaggcggcagccaccgcgttctgcagcgccacgtcgccggatggaaagacgtcggcatggccaccgcaaaacatcagatacacctccgccgtccatggcccgacgcccttcagcgccgtcagcgccgccagggcctcccgtgggggcaggccggaaagcgcctgcagatcgagcccgccggaggaaaccgcctccgcgatccgtgtcagcgtctccgccttggcgcgcgaaagaccgacctcgcgccatgcctcggggtgaagacctgcataggcctcggccgtcagcgcggcatcgccgggccgcagcctgcgccagatcgcctcggcactcgcccgcgacaccatctgcgacacgatgatatgggccagcccctcgaagccgggctcccgcaacctgagaggaagcggaccggcatcggctgcgatcgaaacaaggcgcgggtcgatgacgaccagctcggccaatccctgggccacgtccccgtcggtgcgaatgatatgcacgcttcctcgcgataatcaaaaatacgtggcaaaagaaagcatgatcgcgattccccgtcaaaagcccgtcttccgttttgccccgagcccaaatggcccgctgcatctcggccacgccttgtcggcctttctcaaccgcgacatggccgacgccgccgacgggcgcttcctgctgcgcatcgaagacatagatctcacccgctgcacacccgaattcgaagagggcatctacgccgacctcgaatggctcggcatcggctgggaagaccaggtgcgccggcagtcggagcatttcgacgcctatcacgcggcactggccggcctgatcgaccgtagccttgcctaccccgccttcctcacccgcggcgaggtcaaggccagggtcgcggcgtcggaggcggcaggcatcgcatggccgcgcgatcccgatggctctccgctctaccccgccgatgaccgcgaccgcccctcgggcgagcggcaggcgatgctctcctccggccagaagcacgcctggcggttggatatggcaaaagcgctcgacctggtcggcgggcagctctcatggcgggaaacaggagacggcgaacggggcgccatcaccgccgacccctcgtcatggggggatgtcgtgctgtcgcgctcggacgcgccgtcgagctatcacctttccgtgacgatcgacgacgcgctgcagggcgtcacccatgtcgtgcgcggtctcgatctctttcacgcgacatcggtgcatcgcgtcctgcagacgctgctcgcgctcccggcgccgatctatcaccaccaccgcctcgtgaccgacgcgaccggccgcaagctgtcgaaaagcagcggcgatacggggctttcagacctaagatcccgaggcgtcgcggcgcacgatattcgccacctcgtcgggctttgacggcttctggccctgaccctggccgctcaggaaattgtgcgagaagatcgcccgcacccggaatttcaggagtgccgcgttgagttcggcgccgatgatgaagatcacgccgatcatgtagagaaagatcagcacgatcatgaccgatgccaggccggcataggtggcggcgtagttggcgaaggttgccaggtaataggcgaagatcagcgcgccgatgaaccagagaataagcgtcaaaagcacgcccggcacgacatcgagcacccgccgccgtcccgccggaagccacagatgcacgaccagcagcccgaccgtcagcacgaacagcgtgccgtagatacgccagttgaagacgatgtcgagcgtgtcggcgaacagcggaaaccattgccgggcatagtcgagcgccagcggcaccgccacaagcaggatgctgatcgccgcgaagatcgtcaccgcgatcatcacgaagccgagactggcgaggcgggtgaaataccatggccgcgtttcctgcacgcggtaggcgcggttgagggatatgcgcagcgcctcgaccccgttggaggcgaagtaggcggcggccagcaccgagatcgtcaggagcccgccgcgcggcacggtcagcaccaggagcacctggtcggcgagcggcttggcgatctcctccggccaggtgtcgaagacgagatgaacggccgtcatggaaaactggtcggcgccgaggaaattggcgagcgcggtaccgaagatcaggaagggaaagacggcgagaagcgtcgaaagcgcgacatggcttgccatggcgaagccgtcatcttcgaggaaatgccagatcgcatcgtaaagcacatcatacaagatgcgaaaaagtttcggcattccggctcccggcattcctcattgtgtcgcccgatcgaatatgggaaacgagtcctagtttgtacaggaatcattccatgtcggatcaacgcactatcatcattaccggatgttcgtccggcatcggtgcttattgtgcccgtgcgttgaaaaaagacggctggcgcgtcttcgccaccgtcaggaaggtcgacgatctggcgccgcttcaggccgacggcatcgaagccttccgcatggattacaccagcaccgattcgatcgccgatttcgtccgcgaggtcaccgagctcagcggcggccgcatcgacgcgctcttcaacaacggcgcctatggccagccgggcgccgtcgaggacctgacgaccgacgtgctgcgcgagcagttcgaaaccaacttcttcggctggcacgaactgacacgtcggatcattccgctgatgcgcaagcgcgggcgcgggcgcatcgtccagtgctcgtccattctgggtgtcgtgccctaccgctatcgcggcgcctacaccgcctcgaaattcgcgctcgaaggcttgagcatcacgctccgcatggagctcgaaggcagcggcatccatgtcagcctgatcgagcccggcccgatcgcctcgcgcttcgtcgccaattcgcttttgaagatcaacgagcatatcgatatcgggggctcggcgcatgtcgtggattaccgccgccagctggcaaggctcgatggctccggccccgccaatcgccacaagcttggccccgatgccgtctacgatgtcctgaagcacgcgttgagcgccccacgtccgcgaccgaattacccagtgacgcggccggccaagcagggcatgcttttgaaaaagctcttgcccgcggacctcttctaccggctgctgcgcaggttcgattgaggaggaggaaaaccaatgtcatctgtcgtctacgttctcgccatcatcgtgatgggccttgtcgccatcgttctcatccgtggccttttcaacatgatgaagggcggcgacgccaacctgtccaacaagctgatgcagctgcgcgtgctcctgcaggcggtcgccgtgctgctgatcatgctgacgctgtggctgaccggcggcggtcgccccagctgatcacccccggccgatcacagaggaggagataaagcatggtcaagctcaacaagatctacaccaagacgggcgacgacggcacgaccgggctggtcgccggcccgcgccggctgaaggacgacttgcgagtcgaggccttcggcaccatcgacgaggccaattcggcgatcggcatcgcccggctgcacatgcagggccagcctcatacggacatgcccgagctcgatgccatgctgatgtcgatccagaacgacctcttcgatctcggcgccgatctcgccacgcccgacaccgggacgccgccggaatacgagccgctgcgcatcatcgaaagccaggtgacgcggatcgaaaacgacatcgacaagctgaacgccgatctgcagccgctcagatccttcgtgctgccgggcggccaccccgccgcggcccacctgcatctggcccgcaccatcacacgccgtgccgaaagattgatggtgacgctgtcgcgcagcgaggacgagatcgtcagcgccgcggcgttgaaatacgtcaaccgcctctccgatttcctcttcgtcgccgcccgccatgccaatgatcgcggccgccaggatgtgctttgggttcccggaaaaaaccgctaggctcctgaattgaccgatatcaggcaactggaccgccggcccatatgttcataccgctgcacgatgccaacacactgaagcatatcaagctgcaatgggtgacgatggggctgatcgcgatcaacgtcgtcgtctggctgttcaccggcgtcatcgccacggaatcggtagcacaggcggccttcgtcggcctcggctatatcccggccgtcgccttccactacgcctaccttgaaccggcgctatcaatcacgcccgagccgctgacctatgtcagctactccttcgtccattccggcttctggcacctcgcctccaacatgctctttctctgggtcttcggcgacaatgtcgaggatgcgatgggccatatccgcttcctcgtcttctatctcctttgcgccatggcgggcgcgctggtgcatgggctgatcggcatgacctcgcaggccccgctgatcggcgcgtccggcgccatatcgggtgtggtcgccgcctatctgatgctgcatccgcgcgtgaaggtctgggtgctggtcttcatgcgcgtgccgttgccgcttcccgccttcgtgccgctcattctctggaccggccagcaattcgtcatgctggcgctcgagcccgatggcaacgtctcctggggcgcccatgtcggcggcattgtcgccggcgctcttctggtgctcgtcatgcgccgccgcggagtaccgctcttcgacagggaagtggtgatgccgagagccgtgcgcgaccgcccgacgcccaatcccgccatgatcaccctccccggccagccaccccggccgcgcctgccgtgggacaaatgacatcgaagaatttgacgtgaacgtaagcgtaatataatcgtcatggaatttgtctgtctgcgccatgcaagcgttgtctttggaggaaaaacgcgtatccatgtcgccattcgacaatcggagcggcgcggaaacgcgcattttcttggtgaaagagttgaaggaaggaccccatgaagattctcgtccccgtcaagcgggtggttgactacaacgtgaagatccgggtgaagccggatggcacgggcgtcgaactggccaacatcaagatgtcgatgaaccccttcgacgagatttcggtggaagaggcgcttcgcctgaaggaagccggcaaggccgaggaagtgatcgtggtctcgatcggtcccgcgaaagccgaggagacgctgcgcacggcgctcgccatgggtgccgaccgcgccatcctggtcgagaccgacgatgccgtcgagccgctcgccgtcgccaagatcctgaagggcgtcgccgacgccgaacagcccggcctcgtgatcgtcggcaagcaggcgatcgatgacgactcgaaccagaccggccagatgctggcggccctcttgggcaccgcgcaggccaccttcgcctcgaagatcgagatcgactctgctggcccagggggcaaggcaaccgtgactcgcgaagtcgacggcggcctgcagaccatcgacgtcaagttgcccgcggtcgtcaccaccgacctgcgcctcaacgagccgcgctacgcttcgctgcccaacatcatgaaggcgaagaagaagccgctcgacaagaagagccccgctgatttcggcgtttccaccgcaccgaagctcaaggtgctgaagaccgaggagccctccggccgcaaggcaggcgtcaaggtcgcatcggtcgccgagctcgtcgaaaagctcaaatccgctggcgtcctctaaggttcgagaaaggagatatcatcatggccattcttcttctggctgatcacgacaacgcaagcctttccgaccagaccgccaagacgctcgcggcagccgcaaaaatcggcggcgacgtgcatgtgctggtcgccggcaagggcgccaagcccgcggccgatgcagccgccaagctgtcgggcgtctccaaggtcctgctcgccgaaagcgacgagcttgccaacaatctggccgagccgctggccgacctgatcgtttcgctggccgcaagctacgacaccatcatctcggccgccacctcggtcggcaagaacgttctgccgcgcgtcgcagccctgctcgacgtcgcccaggtctccgagatcatcgaagtcgtctcagccgacaccttcaagcgtccgatctatgccggcaacgccatccagacggtacagtcgaccgacgccaagaaggtcatcaccgtccgcaccgcgtccttcgccgctgccgccgagggcggttcggcttcggtcgaggcgatccccgccgtgtccgatccgggtctgtcgaccttcgtcaaggatgcgctgtcgacctccgaccgtccggagctgacatcggccaagatcatcatctccggcggccgcgcgctgggctcgtcggagaagttccaggaagtgatccttcccgttgccgacaagctcggagccgcggtgggcgcgagccgcgcggcggtcgatgccggctacgcgccgaacgactggcaggtcggccagaccggcaaggtcgttgcgccgcagctttacatcgcctgcggcatctccggcgccatccagcacctggccggcatgaaggattcgaaggtcatcgtcgcgatcaacaaggacgaggaagcaccgatcttccaggtcgccgatttcggcctcgtcgccgatctcttcgacgcactgccggaactgcagaaggctctgtaattccgtggggcccggtttccaacgcggctccgggcttccatcatcgcccgtcatctttcgcacatgcgaacgactggaaaattatctttttaggggctactactgctgccgggcgatcattcgcccggcagttttgttgaataggtacggcaatcgcgggggcgaaggccgagcaggggtgtggagatgactgcggtgttcaagacgatcggtattatcggcgcgggccagatgggttgcggtatcgcgcaggtttcggccagcgcaggctacagggtccacatctacgatctcacccaggatcgcatcgagcgcgggctggccaccatcaacggcaacctcgcccgccacgtcaccagcggcaagatgaccgacgaggaacgctcgagcacgctctcgatgatcgcgggctccgccgacatcaacgatctcgcctcctccgatctcgtcatcgaggccgcgaccgaggacgagagcgtcaagcgcaagatctacgccctggtctgtccggtcctgaagccggaagcgatcatcgccaccaacacctcctcgctctcgatcacccggctggcctcggccaccgatcgccccgagcgcttcatgggcatccatttcatgaacccggtgccggtcatgaagctggtcgaactggtgcgtgggatcgccaccgaagagacgaccttcaagaaggcccgcgaattcgtcgcctcgctcgaaaagaccgtcaccgtcgccgaggacttcccggccttcatcgtcaaccgcatccttttgccgatgatcaacgaggcgatctacacgctctacgaaggcgtcggcaccgtcgatgccatcgacaccgccatgaagcttggcgccaaccacccgatgggcccgctgcagctcgccgatttcatcggcctcgacacctgcctgtcgatcatgcaggtcctccacgacggcctggcggactcgaaataccgcccctgcccgctgctggtgaaatatgtcgaagccggctggcttggacggaagtccggccgcgggttctatgactatcgtggcgaggttccggttccgacgcggtagggttcggtcttcggaagaccggccgcaatcatcgagcccggagccccctcatccccggtgcaacttttgcacctgacctgccggcaccttctccccgttggggagaagagacttgtggcgggctgctcgcctcccgatctaacgaaattcttcatctgaacgcttaatttgggcaaaacgcccgcgcccagccccttctccccctcggggagaagtgccggagcgccagcgaggcgatgagggggccacaggcgcaaacgtcgcggccagcctcacaaactagatccccaccgccgccttgatcagcgccttggcgtcctcgctgtcccacgccgccggcccgttcatcgacgagatcaggcaccccttctggtcgatgagcagcgtcaccggcaggccgaaggccagtccctgttttttcaacccgttgaataccccgatcgtgttgtcgcggtagaggttcagcgcatcgacgcccgtctccgaaaagaacgtcttcggcttctcgtcgtcgccggtgtcgatgttgacgggcaccacctggaacttgtcactgccgagctgcttttccagcgtgttcaacgccggcatttcctcgcggcagggaaaacaccatgtcgcccagatattcaacagcacggtcttgccggcgaattggtcgagcgtcatcggcttgccagcaggatcgttgaaggcgaccgatgtcatgagcttcggctcgtcggcggcgaccatcgccgccacttcgcccttcagcaatggcttgatccgggtcgcgatctccctggtggcattgcaatcgcccgccgccatatcggcgccgccattgccagaccccgtctcactgatgtaaaccgctgccgcaccggcaatgatgcctgcgacgaccgcgatcccgaccagtttcagggatggcaggcgcaagggcgtttttgtggtcatttcattctcccggacacgcgttcttcaaggcaggcattcttcatggccgacagcacggacaccaaatcctccaaccagatgtggggcggacgtttcgcttccggcccagatgcgatcatggaggagataaatgcctcgatcgatttcgacaagaagctgtttgcgcaggatatccgcggatcgatcgcccacgccaccatgctcgcccaccagggtattatcgccggcgatgataaggacaagatcgtcgaagggctaaacacgatcttgtcagaaatcgaagccggccagttcgagttctcccgcaagctcgaggacattcacatgaatgtcgaggcgcgcctggcgacgctcatcggtccggccgccggccgcctgcacaccgcccgctcgcgcaacgaccaggtggcgctcgatttccgcctctgggtgaaggaagagctgcaaaagaccgaacagctgctgaccaagctgatatcggccttcctcgaccgtgccgaggaacatgccgataccgtcatgcctggcttcacgcatctgcagaccgcccagcccgtcacctttggccatcactgcatggcctatgtggaaatgttcggtcgcgaccgccagcgcgtgcgccacgccatcgagcacctcgacgagagcccgatcggctcggccgcccttgccggcaccggctatccgatcgaccgccacatgacggccaaggcgctcggcttccgcgagccgacccgcaattcgatcgacaccgtttccgaccgcgatttcgccatcgagttcctggcgctggccgccatctgcgccatgcacctgtcgcggctcgccgaggagatcgtcatctggtcgacgccgcagttcggcttcgtgcgcctgtcggatgccttctccaccggctcctcgatcatgccgcagaagaagaaccctgacgccgccgagctggtgcgcgccaagaccggccgcatcaacggctcgctgatcgcgctgctgacgatcatgaagggcctgccgctcgcctattccaaggacatgcaggaagacaaggagcaggtcttcgacgccgccgaaagcctggagctggcgatctcggccatggccggcatggtccgcgacatgacgatcaacacgcagcgcatgaaggccgccgccggctccggctattcgaccgcgaccgatctcgccgactggctggtgcgcgaggccggcctgcccttccgcgatgcccaccatgtgaccggccgcgccgtggcgctcgccgaaagcaagggctgcgacctctccgacctgtcgctcgccgacttgcaggcgatcaacgccgccattacggacaaggtctacgacgtcttgaccgtcgaggcctcggtcgccagccgcaagagcttcggcggcacggcgccttcggaagtcaggaagcagatcgcctactggcgcgcccgcaactgatcgcgaaaagggcggagcgcaaccggcttcgccccttcgatttcgcaaagcgcgagacctcaacaatcagggtgcacaaggcggataaacttcgctatgaaggtgtccatccgtgccgcttcccaagaggaattccatgcagaccagcttcccgcagatcatccgcctgacggtcgttttcgccgtaatcggccttgccgtcgccggatgcgggcgcaagggcgacctcgatccgccgagcgtgcaggcgacgaagggtggcgactcgtccaaaccgacgccgcagcccggcgtcaaggacaagcccttcttcctcgatccccttctgtaacaggccaccaaagtgaaccatttcgagtatcgcgacggcatcctctacgccgagaacgttcccgttcccgagatcgccaaggccgtgggcacgcccttctacgtctattccacggcaacgctcgagcgccactacaaggtcttctccggggccttcagcgatgtcgactccatggtctgctacgccatgaaggccaattcgaaccaggccgtcctgaagacgctcggcaacctcggcgccggcatcgacgtcgtctccgagggcgagctgcgacgcgcgctggcggccggcattccggccaaccgcatcatgttctccggcgtcggcaagacggcgcgcgagatggactatgcgctcgaggccggcatctactgcttcaacgtcgaatccgagccggagctcgagatcctcaaccagcgcgccatcaaggccggcaagaaggcgcccgtctccttccgcatcaatcccgatgtcgacgcccgcacgcacgccaagatctcgaccggcaagaaggaaaacaagttcggcatctcctgggagcgcgcccgcgccgtttacgcccgcaccgccacccttgacggcatcgaggccaccggcatcgacatgcatatcggcagccagatcaccgagctgcagcctttcgacgacgccttcaagctgctgcgcgagctcgtcggcacgctgcgcgccgacggccacgacatccaccatgtcgatatcggcggcggcctcggcattccctacaaggaagacaacaatccgccgccgctgcccgacgcctatgccgcgatcgtcaagaaccagctgcgcgaactgaactgcaagatcgtcatggagcccggccgcctgatcgtcggcaatgccggcatcctggtgaccgaagtgctctacgtgaaggatggcggcgaaaagaccttcgtcatcgtcgacggcgccatgaacgacctcatccgcccgacgctctacgaggcctggcacgagatccgccctgtcgtgatctccgccgccaacgcgccgcgcatcaaggccgatgtcgtgggccccgtttgcgagaccggcgattacctggcgctcgaccgcgagatggcgatgccgaaatccggcgacctcttcgccgtctcgtccgccggagcctatggcgccgtgcaggccggcacctacaacagccggcttctggtgcccgaggtgctggtcaagggcagtgatttccacgtcatccgtccgcgccggacctatgaggaactgatcgcgctcgacagcgtgccctcctggctggactgacgccggcaatcactttttggcgaccgtggagcgaaaagccggcattgaccgggccttgccctcgtcttcgccacaaagagtgttatccttatccaccaagcaacttgcccggcggtcgccgtgcaagccctctctgcccctagcgccagatcgcggagaccggattgaagaacagccccagcagcgaaaagaaaggtgcccttgccctgaagccgtcgctcgcgcggctggtggcggcaaagcgcctgaccgcccgatgcgtgttgctgttcgagcagatgctgccgctgacgctgccgatcctgtcgcttggcgctctttatctcgccgcgtcctggttcggtgttttccgcacggttcccgactggttgcgcatcgtgctgctcgccggcttcggcattgggctgctggcgtcgctttatcccttccgcaagctgcactggcccggcccggcggccgccgacaggctcctggaagagcgcaacggcctgccgcatcagccggtcgccgtccaggaggacgagccggccttcgacacccccttcgcccgggcgctgtggcgcgagcaccagacccgcatggccgagaagatcgccacgctggatgccggcttcccgcggcccgatatcgcctcgcacgaccgctgggcgctgcgcgccatcccggcccttctgatcgtcgtcgccttcggctattcgctgtcgaccaatggcggctcgatcaccgacgcgctgcagccgcgcccgcaggcacaggcgaccgaccccgcggtgcgcatcgacgcctggatcacgccgcccgcctataccggccgtgccccggtctatctcaccgccaccggcagcgagcagggcgcgatcaggatcccgcaatcgtcgaaccttaccgtccgcgtctcgggcggcaaggccgaagagaaggtggtcttcgccggtgaggacggcaagcgcatcgagatcgccgccaccgaaaacgccgccgccgcgccgaacgctcccgccgccgcaacgcccgcgacacccgctccggcaacggccgaggcccaacagcctgcaaccgcgccgacaaccgcctccacgcatctgatgaagctcgaggaaaacggcacgctcgaggtcaacggccgcaaatgggccttcgacgtcattcccgacgaggcgcccgagatcgccttcaacggcctgccgaaatcgactgtcaacggggcgctggagatcggctacaccatcaaggacgactatggcgtccaggaagcaacggcggaaatcgtgcctgtcgagaccgacagcagcgccacgcccctctatgcgctgccggagtacaagctcgacattccgcgccgcaacgcccgcgacgccaagggtgtcgccagcaggaacatcaccgagcacccgctggcgggcaagcgcgtgcgcatcaccctgatcgccagggacgccgccggccagacgggccgcagcccgccgcatgaaatgacgcttcccgcgcgtcccttcaccgaaccgctggccgccgccgtcgccgaacagcgccagaccttcgcgctcgacacgcgcaagatgccggaagcgatcgcgctcaacgaggcgctgacgctgcgcccggaagagacgatccccaatctcaccaattacctgctgatcgaatccgcccgccagcgcatgaagctcgccaagggcgacgtggcgctgaaggacaccgccgactatctctgggagatcgccatcggcatggaggacggcaatctctcgcaggccgagcgcaacctgcgcaacgcccagcagaacctcgccgacgccctgcagcgcaacgcgcccgacgccgaggtcaagaagctcatggacgagctgcgcaaggcgatgcaggactacatgaaggagctggcgcagcgcatgcagaatgcgccgatgcagcccaaccagaacgcccagaacgtcatccgccagcaggatctggagcggatgatgaaccagatcgagaacctggcccgctccggcaaccgcgacgccgcccagcagatgctgtcggaactgcagcggatgatgaacaacatgcaggctggccgcccgcagcgcggccagcagcaacagggccaggacaacagccagatgcgccagcagatggacaagctcggccagatcctgcgcgaccagcagaagctgatggaagagaccttcaagctcgaccagcagctgaaggaccgcatgcagcgcggcgaccccaacaacatgaaccccgacctcgggatgaacgatccgcttctggacgacatgccgatggacaatgacggcatgccgcaggaccagcagcggcaacagggccagcagggtcagcagcaacagggccagcagcaacagggacagcaaggccagcagggccagcagggccagaacccgtccgacgagatgacggccgaacagctgcgcgaggcgctgaagcagctgcgcgagcgccaggaccagctcggcaagcagctcggcgaaatgcagaagagcctcggcgacatgggcatgaagcccggccagggcttcggccaggcgcagcgcgagatggaaggcgccggccgcgagctcggccagggtcgcggcgaacctgccatccagggccagggccgcgcgctcgaggcgttgcgccagggtgcccgcgacatgatgaaccagattatgcaggcgcagcagggccaacagggccagggtcaaggaccgcagggccaggtcggccagggcaaccagaacggccgtgatccgctcggccgcccgcgccgcgccgatggccccgatttcggcgaccaggtgaaggtgcccgacgagatcgacgtccagcgcgcccgcgaaattctggatgccatccgcgaaaagctgggcaacaacccttcacaggagatggaacgacgctatcttgaacgcctgctcgatattcaataaagcacgcaggatatattcttgatttcaaacttgccccgaacagcggctcttcacccgtatggggctattccaaaaccgcggaagcttcgtaatgtcgcggcggcaggcgacgaacgatagcgatccgatggcaattctcttcaagacggtaatcgacgaaaacaccgcattcggcatgatcgaaagtgccctgtccggccatggcagcgattatgacggctatctgaacgtcgtcgccgacgaaggcgagcagacgctcacctgggggccgaacatgcatgccgagcagttccaggccgaggtcacggaaatctttcgcgccacctgggatctctgcagtttctgggtggtgtacgagcgccgcgacgaccgcaaggaccccgccgccaacgacatccgcaacgccgccttccggctgacgcgcacctatgacggcgtgctcgtcgtcacgctgagcctgcttggcaagctcgacgatgccgacgacatcgaactgatcttcgcttcaaggaagacccgcagcgccggaatttccgcgtgcgcttcgagggcaagttcattcagccgcagaactgaaaaagccggcgaggaccgccggccatgatgcgataaccggcctcgggcgaccctcaggccgccagcgcgcgggcgaccgccttgcggatatcgggaagcgcgaacggcttcgacacgacatcgacgatcttttcggcgaggtcgtcggcgcgttcgcgctgttcggcgtagccggtcatcaacaggatcttcagcgccggaaaggccgacttcgcctggtgcgcgagctcgatgccgtccatcacgggcatgcggatatccgacagcagcaggtcgtaaccgccgatgttgagcttctccagcccttccgcaccgtcagccgcttcttcggtctcatgaccgtcgaggcgcaaagcgcgggctacgaaagaacgcagggaatcttcgtcttccgtaatcagaattcttgccatggtgtgcattgctccgtttcatgccctgcatcgcaaatcacacgactttcctttgcgagtggtaaacggccgaaggcaatgatccgggcgatggacggaatggttaacaacccgtcttgaaatggtgcaggtgagaggtgactaagcgtcgcccgtcaccacgcccacgaagggaagctcgcggaaggcataggccacgtccatgccgtagccgacgacgaaatagtcggggcattcgaagccgacataatccgcttccagcttttccttgcgcttcacgctcttgtcgagcagcacggcgatggtgacgttgcgggcaccgcgctcgtagagcagttccttggcgaacttcagcgtgcggccggattcgaggatgtcgtcgatcaggagaacgtcgcggtccttcacctcgctgtcgatgtccttgacgatcctgacaccttgagaaaccgtgccggtgccgtagctcgacagcgtgatgaactcgacctcgggcgcaagcccgctatcgtgcagcgcgcggatgaggtcggccgcgaaaatgaacgatcccttgaggacggcgatgacgagcaggtccttggtcggccccttggcgatctcgcgggcgatggcatgattgcgctcggcaatctgctcggccgtgaaaagaggatcgatattcttaccgcgcaccacaggcatgaaggcttgctccttgaaaacaagcacaagccgttaccacaaaccgcgcggtgaaacaccccttaaagcaacgctatccgcaggatcgcggcgggcgtcagggcatgaaggcgaggcgaacctcgggcgtcttcgcgccgggatactgtatcttcgacgagaagccgcggctctggccgccgtagatcacgtcggtgggcgcgtcgatcaccacgctggcgaccagcttgtcgtcggcgtagaggttggcgcggatcggccgcaccatctgcgtcgtgccgctgacattgtcgatgatgccgttgatcaggagcacccgcatgccgttggcatcacgcggcgtcgccgtcacatgcgtgaagtgcagcggctcgttgtcgacggccgcattggacgccgacagccccgagaacccgccggacaggccgaagacgaggacgcacagcgccacgacaagcacgacgaaatgcctggccgacgcccgctgcagccagtcctccgccgcctgaagcagggatggtgcctgagcaggtactgctcgctcggcgcgcggctgcggacgaccggcgctgcggctgttgtcattgaagctgcggccgttgaaattgcggtcggtggaatcggcgccgcgctgcctgccgatgacgacgaattcggcgtcggcgacatcgtcgggacggctttgccggcgatcgcgcttcacggcttcgggcggcaggaaatcgtaggcccgcccgggtgcctggcgcttgaacgaggaggatgtcatgacgaccgcctttccggtatccactgctttcacggtccgcaacggatgcgggcattgaaacgaatcctctctactcgtaaattttattggttaatgcttcgcaaagaccgccatcaaacaggcgtctttccagcgaaatttaccggttgttaacggatctggttaacaagtcatgcggtgaaacaacaagaaactgagcggcccgttgatccacttcgagaatgtcggtttgcgctatggaatggggccggagattctccgggacctgaccttcgacatcccgaagaaatccttccagttcctgaccggcccctcgggcgccggcaagaccacgctgcttcggcttctgtttctctcgctgcagccgacgcgcggcctgatccgcatgttcgggcgcgacatttccgatattccgcgcagcgagctgccgctgcttcgccgccgcgtcggcatcatcttccaggaattccgcctgctcgaccatctcaccacctatgagaacgtggcgctgccgctgcgcgtgcgcggcaaggatgagagctcctacaggaccgacgtgctggaactcctgaagtgggtcggcctcggcgagcgcatcaacgtgctgccaccggtgctttcgggcggcgagaagcagcgcgccgcgattgcccgcgccctcatcgaccgtcccgagatcctgctcgccgacgaaccgaccgccaacgtcgatccgccgatggcccgacgcctcctgaacctctttctcgaactcaaccgcctcggaaccgccgtcgtcatcgccacccacgatctgacgctgatggaccaggtggacgcccgccggatgattctctcggaagggcacctcgacatccatgactgagccctgctcccgccccgccgcgcccgtcgcccccaagggtcagaaacgcccggagatgaaggtgcgcccgaccgcgccgatcctcccctcggccaatatccagggcaacgcgctgatggtggtgatcgcgatcatggccttcctcgcctgcctgacgctcggcggcgtctcgatggtgcgctcgacggcggcgagctgggaaagccagatttcccgcgaggtcacgatccagatcaagcccgaggacggcctcgacatggacaaggcgctgaccgaggcgcggcgcatcgcgctgaccttcgtcggcaccaaggacggccagatcgtcgatgaggccgccacggcgcgcctcctcgaaccctggctcggcagcggtctcgacatcaaggaactgccggtcccccgcctcgtcgtcatcaccatcgacgagacgaacccacccgatttcgaggcgatgcgcgcgcttctgaaggagagcattccgcaatcctcgctcgacgatcaccgcacctgggtcgaccgcctggtgtcgatggcgcatacgaccgtgatgatcggcaccggggtgctgctgttggtcttctccgccatggtgctcaccgtcgtcttcgccacccgtggcgcattgtctggcaacaggcacatcgtcgaagtcctgcatttcgtcggcgccgaaagctccttcgtcgccaccgagtttcagaagcacttcctgaagatcagcctcaagggctcggccatcggctcagcacttgccgcgctcttcttcatgggcgccggcttcctgcaaagccgcacactcgccaccccgcagaccgaccaggctaccgcgctgttcggcacattctcggtgggagcgttgggctatgccggcatcttcgcgacgatgatcgtcatcgcccttctgaccaccttcaccgcccgcctgaccgtcatgcgcaccatctatgaaatcgacacgctgcgctcggacccgacccgagccgacggccttccgaattgagatcgccggctgcattttgccatgaaagcgtctgttcgccgccctaatctgcgtatatttttcgattcatgagcatgagccgcatgtcgcacgacccgattcgcccgaaaacggagcttccccgttccgaaggcgagcccgcgcgccgtggtcccgtccgccgcatgctgcgctggggcggcgtcgcatgcgtgctccttatcgccctggttttcggcggttttctgttcttcgcggattcggtcacgaccctgaagccgccgcttgatccgcatgccgacgccatcgtcgtcctgaccggcggctaccagcgcatcgaccaggctgtggaactgctgcagcggggcgccggcaagcgcctgctgatctcgggcgtctacccgagcaccacccgcgcccagatccgcaagatgacccaggcggcacccgagatcttcgattgctgcgtcgacatcggctacgatgcgctcgacaccatcggcaacgccgaggaagcgacgaactggatacacgcgaagggctacaagagcgtgctcgtcgtcaccaacaactaccacatgccgcgcagcctcgccgaactcgcctatgtcgatcccgacaccgagttcgtcccctatcccgtcgtcaataccgatctcaagaacagcaactggttcaccgatcccaacgccatgcgcgtgatgctggccgaatacggcaagctgctcttcgccggcgcccgcaatctcaccggcctcttccgcaatccgggcctgcgctcggccgacggcgacacctagagcctttccgactccagccgatcagcgctttttatgcggatgaatatcgtgtaggacggctgagccgcccgtctggcggatactggcctcgggaaacttcatgatcgccctgcgttccgtcctcttcaacacgatcttctacgccaatctcatcctgcggatgatcgtgttctcgccctattacttcctggcgccgcgcaggtccgcctacaaagtgccgaagaactgggcgcgctccaaccactggctgatggaaaagatcgtcggcaccaccttcgagatcgagggcctggagaacctgcccgagggcggctacatcctggcgcccaagcaccagtccttctgggacacctatgcgctgctcccgtggctgaaggacccggtctatatcctgaagcgcgaactcatgtggattccgctcttcggctggtacgccaagaagcagcggatgatcccgatcaatcgcggcgcccgcggcaaggtcatggtcgaggccctgcgccgcaccaaggaggaactcgccaccggccgccagctgatcatctatcccgagggtacccgccggccgccgggcgccgaaccgctctacaaatacggcatcgcccgcatgtaccgcgacctgcagctgccggtcgtgcccgtcgccatgcatcccggcctcttctggccgcgccgctcgaccatgcgctatcccggccactacaaggtgcgcatcttgaagccgatcgaacccggcatggaccccgatgccttcttcgcccacctgatcgaggtgaccgaacgcgccagcgacgaactcctgatcgacgccgccgagcgcaacccggacctgcccttgccgccgaccgtcgtccagcgcctgaaggaactgcgcgagcagcaagccacgacggcctgatccccgccaggccgtgcggcgcctttgccgttcaagccgcccgcagccgctccacctcgtcgaccacgccttccagccagtgatcgcgaatgcccatctccttcagatgcgtcagcgtgttgaagacataggcgtcgttcgggccggacttgccctgcgcctggtggacgatgcgcgcggcatccacggtgtcgagcgaaccggcatattgcgtatgggcgcgatcgacgacataggcgacgccccgcacgccgcgcccgcccttcaattgcagcggaacctgacgctccagataaacgtttgtcaccagttcgcgtgctctcagataggcgatgacctcgtcccagtcctcggccgcgacacgaaacgccatcccgcggcacgatcctccgcggtccagccccagcaccagtcccggattttgctgggttccccgatgcacccaagagcgaacgcagagagaccgtcgatagccatgaacaagcgcttgtgaccgttcaacaaacgcgaagcccggattccacattagcgatccgtagccaaacacccaaaattcgtccatatcccaagccagaccgagattcccatttgcggataaccattggagaacatcatggcagcgtcaagccaatcccgtagcggcaagaaattctggttgctcggaacaggcatcgttctcgtgatcgcgctttatacagccggctggttctacgcagcctcgaccctgaagaacacggtcctgtcgacgatcggccccggcaacagcggcggcgtgtcgggcgaatgctccgatatcgacttccgcggctaccccttccgcatcggcctcttctgctcgaaggtggatgtcgacgacaataacaacggcgtgtcggcgaccttcggcgcgttgcgatcggccgcccaggtctacgcccccggccatatcgtctgggaactcgattcgccggccgagatccgcaccgcgcgcggcctgtcggtcaacgccgagtgggcgaacatgcagtcgagcctcgtcaccaagttcaagggcgtcgaccggtcatcgacggtcatcgacgggctgaaggccacggcggtctcgtccgccaccggccagacgatcaccttcgacgccggccgcaccgaattgcatctgcgccagaacggccccgacctcgacggcgcggtctcgctcatcgatgcgcagaccgtcatcaaggactggccgcaggtcttgccgaagctctcggcgagcgccgacctgacgctggcgggcaaggccggcatgatcgacggccgcgacgccaagggcctttacggggccagcggcgagcttcgcaaggccgtggccgatatcggcggcggcaaggtgatgacgctatcgggccccttctccttcgatgaggagggctatctcagcgcccagttcaagctgcagatcgaggacgtcaacgcctggcgcgacagcatcaagcagagcttccccgatatcgccaagacggtcgagacggccgccaagctcctgaaggcgatggcgggcggcggcggcacggtctcggtcgatctcgtcgtccagcgcggcaacgccaccgtcagcggcttcatcccgctcggccagatcccgccgatctgaggtttatgccgggctgagaacacgccacacgtcgtaatgtgacgccggcgcttccccacactccctcatcccggccttgtgccgggatccagtgcgatcaagtccttgatcgcaagagactcccttcgccacgcggacgcgcggcggctggatcgctgtgacatcacccgggcgaagcctgggcacagggatgagggtggaaatggtagcgcttgtcgcctcaccggagagcgcgaagcagatgcgacgcaatgagctcgcgtcgccccacctcaccccttcttgtcgagcgtatgcggccgcccgaagtcgggcgcgtcgacatcctggccggcctcgatgatcgagcggcggatggcgcgggtgcgggtgaagaggtcgaagatcttgtccccttcgccccagcggatcgcccgctgcagataggcgaggtcttcggaaaaccgcgccagcatctcaagaatagcatccttgttgtgcaggcacacatcccgccacatggtggggtcggaggccgccagacgcgtgaaatcgcgaaagccggaggccgaatacttgatcacttccgattccgtcaccgtgcccagatcgtcggccgtgccgacgatgttgaaggcgatcaggtgcggcaggtgcgagacgatggcgagcaccttgtcgtggtgctcggggtccatcacgtcgatcttcgagccaagcgtctcccagaagcggctgagcgcggcaagcgccttttcgtccgtgccctcgagcggcgtgaagatgcaccagcggccggcgaacaggccggggaagccggcatccggacccgacttttccgtgcccgccagcggatggccgggaatgaagtggacgttgccgggcatatgcggctgcatctgcgcgatgacggaggccttggtcgagccgacatcggtgacgatggcgcccggcttcaggctaccggcgatctccctggcaaccgcctccgacgcgccgacgggcaccgagacgatgacgaggtcggcatccccgaccgcttcggccgaagacgtcgtgtagcggtcgccgagctgcagctcttccgcccgcttcagcgtctcggggctgcgagtggcgatgaccacctctttcgccagccccagtcgcttgatgtcatgcgccagcgacgagccgatcaggccgatgccgataagcgcgatgcgatcgaactggactgtcatttgttctggcccgttgtctggcgcgtcatgaactcgccgagcgcctcgatgacgccgcgattggcctcttccggaccgacgctcatgcgcagcgaattcttgaagccgtagcccttgaccgcgcgcaggatatagccgcggctggtgaggaactcatcggcctcgtcggcgcgcttgccgtccacatcggggaaatggatgagcacgaaattggtgacggaaggcgtgaccttcagcccgatcgcctcgaaggcgccggtcagcttgtcgatccacatctggttgaaggcgacggcttcctgcatgaaggactggtcgcggatcgcggccgcaccggccgagatcgccgccatgttcatgttgaacggtccgcgcacgcggttcagcgcgtcgatgatatcggcgggcgcgtacatccagccgacgcgcagggccgccaggccgtagaccttcgagaaggtacgggtcatcaccacgttcgggttcgacgacacgatctcgataccggattcatagtcgttgcggcgcacatattcggcataggccgcgtcgagcaccagaacgacgttcttcggcagcgccgcatgcaggcggcggatttcgctgaccggaacataggtgccggtcggattgcccggattggcgatgaacaccatcttcgtcttctcggtgacggcggcgatgatcgcgtcgacatcgacggtcgcctccttctccttgaccgtgacgacggtggcgccggcgcccatgatctgtatcttgtagaccaggaagccatgctcggtgatgatcgcctcgtcgccgggcgccagatagacatggcagagcaggccgagcagctcgtccgagccgttgccgcagagaatattagccgggttgagcccatgcaccgccgcgatcgcctcgcgcagctcgacggcctgcccatccgggtagcgctcgagattgtcggccgcggcgcgataggcggcaatcgccttcgggctggcgccgagcggcgtttcgttcgacgagagcttatagacgcgcgccacgcccggcgcatgttccttgccgggcacataggccgcgatgtcaagaataccggcacggggaacaggcttgctcgtctctacgctcatgggatcaaccttggaaaaggccggggtgtccggctggaaattgccttgaggcaatagaacggaaacggcgcgttgtcgagtggtggggggcgatagggcgagcgcccaccacgagtctcttccccccctgcggggggaaggtgccggcaggcggatgagggggccaacggcacaacgtccactaattgccggcaataagacgacgaggtggactccgagcccggagccccctcatccggcccttcgggccaccttctccccgaggggagaagggaaaacgcaccctacctattccttgtcgtcggcacgccatgcggcgaaagcaccggcacgaagacgcgccgcgaggcgcgcaccgccactggcaggccctgatagagccgcttctgcgcctcgacgatgatgacccctgaaaacgccggccagagcgcccgcccgacatattcgaatgcgccacgcaaccgcatcatcgtgcgcagcttcgacggcgggaacaaaagcgcttcggcggacgcgcccggcgtgaaattcgtctcgcgcaagagatgcgtcagctgcccgcgcgagtaggggcggcccgagccgaaaggcgtgtgctccagccgcgcccagacgccgcgccggttcggcacgacgatgaccagccgcccgcccggtgccagcacccgccagagctccttcagcgtctcgcgcggattttccgcgaattccagcgagtgcaccatcagcacccggtcgatcgacgaatccggcagcggcagttcctcgtcgaatatcagcgccgtcgacgacagcgatcccatcggccagttcacggcgccctgtccagccggcatgaaagcgaaggtacgctcggtgtcaccacgcaaacgatcgagaaacggcacggcatagccgatgcccaccagccgctcctgcggcagccgcacccagagggacgaaagcgccatggcgatcgactgctcggcgatgcggccgaggtcggaatgatagaactggcgtaggtcgacaatatccgcgtgcattgcgataaatgttatcagcgggcggttggacttcaaggccgcagcctctacatttggggtcagtccgagataaagaggcactttagattatgaaacctttggatttagaagtttttctctgccgcaccgataatttcggcgtgcttgttcatgatcccgagaccggccacaccgcctccatcgatgcgcccgacgccgacgcggtcatcgccgcggccgaccgtcgcggctggacgatcagccacgtcttcaccacccatcaccataccgaccatgtcgagggtaatctggcgctgaaggagaagtacggctgcgaggtcatcggcccgatcaacgaggcggtggcgatccccggcctcgaccgcacgatggccgacggcgacaccttcggtttcggcgaccataccgtccacgtcatcgagacccccggccacaccgccggccatatctgctaccacttcgccgacgacaagctgcttttcgcggccgacaccctcttcgcgctcggctgtggccggctgttcgaacgcccggccgctgatatgtggtcctcgctgcagaaactcgctgtgcttcccgatgaaaccgcgatctatttcggccacgaatatacgctctccaacgcccgcttcgcgctgaccatcgatcccgacaacgagaggctgaaggcacggaccgccgcaatcgaggcgctgcgcgccgagggcaggttcaccattccgacgacgctcgcgctcgaaaaggaaaccaaccccttcctgcgcgccggcgaccccgccatccgccgcaacctgttgatggaaaccaagaccaatgaagaggtcttcgccgaaatccgcaagcgcaaggataatttctgatgacgcgggcgccgatctcggccgacgacatcatccgcgaactcgatatgcagccgcacccggagggcggcttctacatccagacctttcgcgacagcgaaggcggcgcgcgcgggcactcgacggcaatctattacctgctgacatccggccagcgctcgcactggcaccgcgtccacgacgcagccgaggtctggcactattatgccggcgcgccgctggcgctgcaccgcgccgaagacggcggccaaagcgagacgctgatgctcggccccgatatcctcgaaggccagcgcccgcaggcgatcattcccgccaactggtggcaatcggccgagacgctcggcgactatacgctggtgggatgcacggtctcgcccggcttcgaattcgcaagcttcgagatggcgccacccggctggtcgccggacgcctgaaaggccctacccctgctgctcggccccgtcgggcagcatgacgaacagcgattgcagcagcgacaccgtgcccgagtggccgacgctgtaatagatcatgcgtccctcgcgacgggtattgaccagaccctcgagacgaagacgggccagctgttgcgagaccatggcctgctgcatgccgagaatgtcctcgatctggccgacggtcttctcctcttccgcgagaatgcacaggatgagcagacgcgtatgatgagccaatgctttcagaagttcacttgctgcccgagctttcgtcgaaaacccctgcaattcgtgatcggccatacccgatcgaggtgtcggcaagtgcatgttacgtctctgcttgcatatatatcaaaactgacaggtgttcataacatatacgcaaagcgcgatagtttggatttcctaaaatgccaaaaaaagtcgatcagcagataagctggccgccattgatctcgagcacctggccggtcacgtaaccggagagcgacggcgctgccatgaacaggtaggcgggcgcgcagtcctcggcggttccgagccgctgcaacggaatgcccttgcgcgtctgctcgagtttttcggccgacgaatagcgctgatggaaatcggtttcgatcgttccgggcgagatgcagttgacgcgaatgccgtcgggcgcgagctcgcgagccagcgccttcgagtaagtcgagacgaacgccttggaggccgagtagatggccgagcccgggctgccgcctgtcagcgccgagatcgagacggtgttgacgatcgccgcctcgccggccgctctcagcgccggcagcagcgccctggtgacctcgacgaccgacgtctggttcaattgcaccacctggccatattgcgcctcggtcagcgtacccgccggaaagcgaccgaccatcgtcccggcattgttgaccagcgcatggatcttgtcgaaatggccaagcaccttcttggtgaaggcgtcgcatccctcccccgtcgaaaaatcgccggcgatgagaatggcgcgccggtcctcttccgccgtcagcaggaaatcgggcagcgcccgctcgccgtcgcggccggtgtgaaccagaacccgcgcgccgcaatcgagaaattgtctcgcgacctcgagcccgatcccgcggcctgcgcccgtgacgaccacgttgcggttttcgaacaacttcggatgaaacatcaaaccctcccgatcaacggccgaaccgatctgtatccgacgcggtgagaagatagcctttgcatccgccaatgatcaaccgttggcacgctgcttcgccatctcgtgatgagatggtgaacattggtcgaccggccaacaaaaaagcggccttgcggccgcttcgatgacagtccgaaccgtagagaggctctaaggctcaatccttgccgacgacaccctgcaggtgcgtcatttccatgatgaagtgttccagcttggacttgtgctcgtgatgatgcgtatcctcgagttcggccttggcggcttcgatgcggcggtcgagttcgtccttggagacgtcttcgacagggatcgccgattcggcgagcagcgtgcagccggtcggcaggatgtcggcgaagccgccgaacaccacgaagtccttcttgacaccgctggcggagcgaacgctcacgacgccaggcttgatggtcgtcatcgtcggcgcgtggttcgccatgacggtcatctcgccctcggttgccggaatgacaacttcggtcaccatctcggacaagagcagacgctccggagatacgagttcaaaattgaaattgtcagccatgacgtttcacttcttgattgtctttgaaacgagagacggcgcgcggggacggtccctgcgcgccgtaagtgaatgcatcaagcggctgcggagagcttcttggccttttcgatggcttcttccatcgagccgaccatgtagaaggctgcttccggcaggtgatcgtactcgccgttgacgaggcccttgaagcccttgatcgtgtcttcgagagcaaccagcttgcccggcgaaccggtgaagacttcggcgacgaagaacggctgcgacaggaagcgctcgatcttgcgggcgcgggtaaccgtcatcttgtcctcttcggacagttcgtccatgccgaggatggcgatgatgtcctgcagcgacttgtagcgctgaagcgtcgtctgcaccttacgggcgacttcgtagtgctcttcgccgacaaccatcgggtcgagcatgcgcgaggtcgagtcgagcgggtcgacggccgggtagatacccttttcggcgatcgagcgcgacagaacggtcgttgcgtccaggtgggcgaacgaggtggccggagccgggtcggtcaagtcgtcggcggggacgtaaatggcctgaaccgaggtaatcgagcccgtcgtcgtggtcgtgatgcgttcctgcatctggcccatgtcggtggcgagcgtcggctggtaaccaacggccgaaggaatacggccgagcagagccgacacttccgaacctgcctgcgtgaagcggaagatgttgtcgacgaagaacagaacgtcctggcccttgtcgcggaagtcttcagcgatggtcagaccggtcagagcgacgcgtgcgcgtgcgcccggcggttcgttcatctggccgtaaacgagcgctgccttcgagccttcgccgccgccatgcttgttgacgcccgattcgatcatttcgtggtaaaggtcgttgccttcgcgggtacgttcacccacgcctgcgaagaccgagtaaccaccgtgcgccttggcgacgttgttgatcagttccatgatgagaacggtcttgccgacgcctgcgccgccgaacaggccgatcttgccgccctttgcgtaaggtgcgagcaggtcgacgaccttgatgccggtgacgaggatctgtgcttcggtcgactggtcgacgtaggcaggcgcatcctggtggatggcgcgcttgccggaagtgaccagcgggccggcttcgtcgaccggctcgccgatgacgttcatgatacggccgagcgtttcctggccgaccggaaccgtgatcggtgcgccggtgtcggaaacggcctgaccgcgaaccagaccttcggtcgagtccatggcgatcgtgcggacttcgttttcacccaggtgctgagcgacttcgagcacgaggcggttgccgccgttcgtggtttcgagtgcgttcaggatcgccggcagttcgccttcgaaagcaacgtcgacgacggcgccgataacctgcgtgaccttgccggcggagcctgccgcggccttcttgggggtagctgccttagccatcttcttaccctctttccctaacctcagagcgcttccgcgcccgaaatgatttcaatgagttccttggtgatctgagcctggcgctgacggttgtagttcagcgtcagcttgttgatcatctcaccagcgttacgcgtcgcattgtccatcgcgctcatcttggcgcccatttcgccggcgacgttctcgaggagcgcgcggaagatctggaccgagatgttgcgtggaatcagatcctcgaggatcgatgccggatcaggctcgtattcgtagactgcgctcgcatgtgccgcgtcctcggcagccacttcgccagccgaggccgggatgagctgctgtgccgtcggaacctgcgagatcaccgacttgaactcggaatagaagagcgtgcagacgtcgaattcaccggcttcgtacatctcgatgatgcgcttgccgatgctgtcggcattttcgaaggcgacgcgcttgacgtcgcgaagttccttgcgctcgacgatgagcgagaggaattcgcggcgcaggctgtcgtagcccttcttgccgacggtgaagatcttcaccgtcttgccttctgcgaccagcttgcgggcgtggtcacgggcaaaacgagaaatctgcgagttgaaaccgccgcagaggccacgctcggcggtgcagacgacgagcaggtgaacctgatccttgcctgtacctgtcatgagcgtcggcgcaccatccgcctcggtgacggcattggcgatattcgccagtaccgcgttcatccgctgcgaatagggccgggcggcctcggccgcctcctgcgcacgccgaagcttcgccgcggcgaccattttcatcgccttggtgatcttctgcgtcgccttgacggaggcgatccggtttttcagatccttaagtgaaggcatccgtgatccgtcctaactgggtccgattacgagaaagacttcgcgaagctgtcgatggcagcggtgagcttgcccttcgtgtcgtcgctgatggccttgtcgttacggattgcgtcgaggatcgccgaaccttccgagcggaggtacgacagcaggccctgctcgaacttgccgacctggttgaccgggatcttgtcgaggtagccgttgacgccggcgaagatcaccgcgacctgctcttccgtcttcagcggcgagaactgcggctgcttcaagagttcggtcaggcgtgcgccgcggttgagcagacgctgcgtggacgcgtcgaggtcggagccgaactgggcgaaggcggccatttcgcgatactgggcgagttcgcccttgatcgagccggcaacctgcttcatggccttgatctgagcggcggaaccaacgcgcgaaaccgacagaccgacgttaacggccggacgaatgccctggtagaacaggtcggtttcaaggaagatctggccgtcggtgatcgagatcacgttggtcggaatgaacgccgaaacgtcgttgccctgggtctcgatgacaggcagagccgtcagcgagccagcgcccttttcgtcggaaagctttgcagcgcgctcgaggagacgcgaatgcaggtagaagacgtcgcccggataggcttcgcggcccggcgggcggcgcagcagaagcgacatctggcgataggcgacagcctgcttggaaaggtcgtcgtaaccgatcagggcgtgctggccgttgtcacggaagtattcgcccatggcgcaaccggcgaacggcgccaggtactgcatcggagccggatcggacgccgtggcggcgacgacgatcgaatacttcatcgcgccgcgttcttcgagaaccttgacgaactgggcaacggtcgaacgcttctggccgatagcgacgtagacgcagaacagcttgtcgccatccgggccgttgtcgtggatcggcttctggttcaggatcgtgtcgagaatgatcgcggtcttgccggtctggcggtcgccgatgacgagctcgcgctggccgcggccaaccgggatgagcgcgtcgatggccttgaggccggtcgacatcggctcatgaaccgacttgcgcggaatgatgccaggagccttgacgtcgacgcgcgcacggcgggtcgcgttgatcgggcccttgccgtcgatcgggttgccgagagcgtcgacaacgcggccgagcagttccggaccaaccggaacgtcaacgatggcgcccgtacgcttgacggtgtcgccttccttgatggaacggtcggaaccgaaaataacgacaccgacgttgtcggcttcaaggttcagcgccatgccgcggatgccgcccgggaactcgaccatctcgcctgcctggacgttgtccagaccgtatacgcgagcgataccgtcaccgacggagagcacctgaccgacttccgagacctgggcctctttgccgaaatttttaatctgatctttgagaattgcggaaatttccgcggcgcggatatccatcagccaacctctttcaatgcaagcttaagggtagagagtttggtacgaagagacgtatcaatctgacgggacccgaccttcacgatcagaccaccaagaattgacggatcaaccgtgacgttgaccgccacgtctttgccggtgacgcccttcagcgccgccttcaattcagtttcctgcgctgcgtcgagcgcatgggccgaggtgacctcggcggtaatttcgccacgctgacgggcagcgatgacacggaaggccttgatcatgcccgggagagcgaacaggcggcgattgcgcgccacgaccttcaggaagtttgcgacgaacccgctgatgccggccttttcgctgatcgcgatgatcgccttcagctgatcctcggccgaaaagaccgggctggtcacgaagcgggtcagatcctcgctctcgtccaacatcgcctgaaaacggtcgagatcggcggtcacggtagcgacggcaccctcttcgagcgccagttcgaacagcgacgaggcatatcgctctgcaacaccagatgtaagctgggacgtgtctgccacgggcacaaatttccctgatttcaacccaagaatccggcctccggcgggcgcctgatttaaattcttgaattcgttatgatttcccccagaaatcgcaagagaagcctcttgcttcttccgaaattcggggtccgtctaacataggatatcgggactcgcaacacgcgtaacgccgtaatcctgttttagctgcgatttatgccgcaaaaatgctgaaaccgttcacggcccacaggcggccgctccgaaatcggcacgtttcaggcggaaaagaaaccgaagacatagccgagcggaagcgccgccagaaccacttgcacaaccagaagtacatagttcatgacagtgcttccccggtccgacagcagcgagatgatgcgcgcgaaagccgccatcgcgaaagcgccgccgagcgccaggtaggtgaagtcctgcgccagcatgatcgccgccagcccgaagccgagatagaagccccccatcgagcgcagctcggcatagccgtcgcggcgcccctcgcgcacctgcatgccgtagagccgcatcgcgtagcccggcgcgaacatgatgatgaagcccgcaagcgcggtaaacgcggcggcgccgaaggcaagctgctcgcccagctccatcggaaagtagaaatccatggtgtgaccccaaatcactgtgatttgcagcccttatgccacgattggccgagaccgcaaacggccgagatcgcctgtatctaaaggaagctctgcggatcgatatcgagctgcacatggatggagccgcgctctttgggagattgcgccagcatggtgcgcaggtaggcctgcatgtcggagttccggcgaccatgcacgaggagccggaagcgatggcgtccgcgcaccagcgccagcggcgcctcggccgggccgagcacggagatgcctgttacctgtggggcggcgttgcgcatgccgcgcgcatgcccctcggcgtcctgccgcgtttccgccgagacgatgatcgacgccagccgaccgaacggtggcaggatcgccctctctcgctcggcgatctcgcgctcgtagaaggcgcccgcgtcgcccgacacgatcgcctgcatcacgggatgctgcggctggtaggtctgcagcaggccgtggctcttgaggcccgtgcgtccggcgcgtcccgtcacctgcgacagcagctggaaggtccgctcggccgcgcgcggatcgccgttcgccagcccgagatcggcatcgatgataccaacaagcgtcatcagcgggaagttatgccccttggccaccagctgcgtgccgatgacgatatccgcctcgcccttggcgatggcgtcgagctccagcctcagccgcttcaccccccccatgatgtccgaggagagcacgatggtccgcgcctcgggaaaatgccgctccacctcttcggcgatccgctccactcccggcccgcaggcaacgagatgatcgaacgtgccgcattccgggcatgcctcgggcgtgtgctggtgatagccgcactggtggcactgcagctgccgcttgaagcggtgctcgaccagccagctggagcattgcgggcactggaaacgatggccgcagacccggcagagcgtcagcggcgcatagccgcgccggttcaggaacaacagcgcctgctgctgcttctccaccgtcttgccgatcgcccgcaacagcaccggcgacaggaagccgccacgctccggcgcatgtcggcgcatgtcgaccagatgcagatccggcagcgccgcgtcgccgaagcgtgtcggcagatgaatggtcgtatagcgcccgctctggccgttgacctggctctccaccgaaggcgtggccgagaccagcacgagaggaaaatcgccgatccgggcgcgcacgaccgccatgtcgcgggcgttgtaatagacgcggtcttcctgcttgtaggcgggatcgtgctcctcgtcgacgatgatcagcccgagatcctcgaacggcaggaacagcgccgaacgcgcgcccgccacgacccggacctcccccgtcaccgcctgccgccacaccttctcgcgcgtcttcggcgccagatccgaatgccactcggcgggcttcgccccgaagcggtcctggaaacgctcgaggaaactggccgtcagcgcgatctccggcaacaggatcagcacctgcttgccgcgcttcagcgtctcggcgatcgcctcgaaatagacctccgtcttgcccgaccccgtgacgccatcgatcagcgacaccgcgaactgcccgttgcggacttcctcaaggatctcgtcggccgcctccttctgcggaccggcgagccgcgacggcgcgaaatccggatccggcttcgccacgatcggcggcggcggcaggaagatcgtctcgagtatcccctgcgcgatcaacccatcgacgacgctggtcgaaacaccggccgcatgcgcgaggccgatccgcgtccacgacagcccgtcgccggccgcatcgagcacgcgggcgcgcgccggcgtcatccgctccggctcgccgcccacgaagcgcagcccctcgaccatcggttccggatccaaggcgttcggcacgcgcagcgccatgcgcgccaccagccccggcggcgacagcgtatagcccgccacccagtcgacgaaatcgcgcatctccttggacagcggcgggcagtcgaacaccttggtgatcggccggagcttctttggatcgacgccctcgtcgcccccctcccagacggcgccgatcacctggcgcggcccgagcggcacctgcaccacggaaccgggctccaccgccatgccctctggcaccgagtaggaatagggcctgagcgccggcatgggtacgagcaccgacaccgtgcgcacggcgggcggcggctcgatcgggccaaagaggtcggacgaatctatgctcatcgggcgcgaccatgcccgcaacgacaaaaaaatgaaacccgcgacatcgcgctatcaatcgtcatcatcgtcctcgccggcaatggtgccggtcagccgcatgccctcgatccaggtggcgccgttctcgcggatcaccttgcgcggcctgaccccgcagcgctcgcgcacggcttccgccagcagcgccgagtgggtgacgacccacacctggctgctcttcgaagccgtcgcgatcatgtccgccagcggctccagcatatcgggatgcaggctcgcttccggctcgttgagcgcgatcagcggcggcagccggtaggacagcagcgccgcggccagcccgagaaagcggatctgcccgtccgacaattcgcgcggctggaacacccgatgcggaaaatcgggaaaggcgagcccgaacgacgccgtctcctccggctccggcaccacgagccgcgcgccgccgaaggccgaggcgacgacgcggtcgagatcgacggtatcctgcctggtgtgcctcagcgtcgcgaacaccgccgccagattggcgccgtcctcgtccagcatcggcccggtcacggcaaggcagggctggcgcagcggcgaggcgcgatcggtgcggaaaccatggaagaagcgccagttggccaccacccggcgaaaggcggcaatctcgggaaaatgcccggcatcgccaagcagcgccatcgccgtctctgatgtcagcgcctggtccggataatcctgcatgcggcccgagccatcgcgcacgtggatggcgggccccgcccgcttcatcatcgtgaccggccgcccgtgatcgacgaccagctcctcggccttcacctgcggctccagcggaaagccggccgcggcctcgggcggacgcaggccgacctcgacccggtagcggaaagtcacggcccgctcctcgtccagaagctcgacctcgagccgcacccgcgccggcccgtcgctctgcttgcgcgtgcccgaccacaagaccgagaacatgccgccctcggccgcgagctcgcgcaccagacgcccggtcaccgccgcctgcaccagctgcagcgcgcgatagagattggatttgcccacgccgttctcgccgagaaacagcgaggtctccgacagatccatgcggatcgagcgcagcgaccggtaattctgggcgaacatggagcggagttgcatgccccgctttaccccatccgctcagcgaaatgaatgggcatcggccatctcgggcaggcttggctcgacgagcggctggaaccgcgcgtcgccatccagcttcagcgcctcgacggtatgcgtctccagcgcccttgtgacgtcgttgatatcgccatcaagatgctcgaccgggatcatgtcgccgatgatgaaatcgaagcggtcgccgcgcttgttgaggagttcgtggaacaccgtcatgtcgcgcagctccgtcgaccacttggcgaaccagtagaacagcccggaattgcgcgccgtcatgtggacgggcaggatcggcagattgtacttgcgcgccagtcccacggcggacgtcttccacggccgctcgttgagccggccgttcgcccagtaggcgatcctcccggagggaaaaagcaccgtcgccttgccctcgcgcaccgcgtggttggtcagctgtagcgtctcgcgcgccttcagcttgctcttgtgctcgtcgcgccattcgaccggaatgatcatctcggcaaagcgcggattgacgcgcaccgcatcgcggttggcgaacaccatcatatcaggccgccgcgacttcaacaggtcgaacaccgcgacgccgtcggcgatcccggtcggatggttgctgacgagaatgaagccgcccttttcgggaatccgctcggcattggtcacgccgatatcgagattgaggagatcactcatatactcgaagcactggaatccaggcatgttggcgatgtcgttggcgaaggtcatcgccttgttgtagcgcagcagcgtgtagagaaacggccgcatgaccggccacagcgggtggccaacgatgcgttgcccgcgttcggcgatcagcgtgtcgacgatgtgtcctggcctaccttgggaaacgagcgcgatcgtttctgcgaactgtccgaatgccgtcgtggggtggcgccgtgccatgcaagatcctgcctcgttgggaaaccagttatcgcgattattatgatcgaagcatgacaggcacttggccgatgttagcgattccataaccgtccctcaggcaaaattggcggcccgacgggcaaattcaagaggcggaaacgtgaatgaactcctgatcatggccgatgcgcggctgatggcggaacgtggcgcctggctgcaaagcctagccggcgaacgacgtctttcgcagcacacgctcgacgcttacgagcgcgacacccgccagttcctgaccttcatgaccggccatctcgccggcccgacgacgctcaaggacatcgaggcgctgcggcccgccgatttccgcgccttcctcgccgcccgccgccgcgacggcaccggcgcccgctcgctcggccgcaatctcgccggcctgcgttcgctgctgcgccatctggaaaagaagggcctggtgaacgccgccggcgccggcgccatccgctcgccgaagcagccgaaatcgctccccaagccgctctccgacagccaggccgtcaccgtcgtcagcaacgaggcgcagctgcacgaggagccctggatcgccgcccgcgacgccgccgtgatgacgctgctctacggctgcggcctgcgcatctccgaagcgctcgatctcctgcccggcgacatcgcatcaggcgccacgaccctgcgcgtcaccggcaagggcaacaagacccgcctggtgccactgcttccaatcgtcttcgaggcggtcgacagataccgggcgctttgcccctatcatctcaccgccgaccagccgcttttccgcggcgcccgcggcggcaagctgcaacaggcgatcgtccagcgcaccatgcaaaagatgcgcggcgccttcggtctgccggagacggcgacgccgcacgcgttgcgccactccttcgccacccatctcctggccggcggcggcgatctcagaaccatccaggaactgctcggccacgccagcctgtcgaccacccaggtctatacgggtgtggatgcatcgcggcttctcgacgtttacgaccgcgcccacccccgggcgtaatcctttgttaacgtcttctcttaaaggaatatcatcagccgagcgcgtaaagctcgtgcattactccttgtgaccggaacaccatcatgacgatttcgctcggccaccgcaatccccgcctggtatccccggatcgatcatcgatgcggccggcatcatcgggcaacgtcgcgctctggctgatcgccgccattcacgtcctgctggcggcacttctgatcgccaccctcgtctcggtctcgccggcatcggccgccgatgcgggcgcctgcaccggccgcaatgtactcgacgatctcaagatcagcgatccggcgcgctacgagcaggtcgtcagggaaggcgatgcggtgccgaacggcaagggcatcttctggaagatcgagaagcccggcatgaagccctcgtggttgctcggcagcatgcatgtgaccgatccgcgcgtcctgcagctgccgccgcgcacccaggccgctcacgatgccgccgacaccatcatcatcgaatccgacgaaattctcgacgagaagaaggcctccgcggcgctgatgacgaagccggacctgatgatgttcaccgacggcaccacggtcgaaaaactgttgtcgcccgaggactatgcccggctcgaggagggcttgaagcagcgcggaattccgctcgccgccgtatcgcgaatgcgcccctggatgatcgccagcgcggtcgcacttcccgcctgcgagatggagcgaaaggccaagggcgtacagttcctggaccagaagatcgccacagacgcgctggccaagggcaagcaggtcaagggtctggaaacattggccgagcagctgcaggccatggccgacctgccgaccgaatttcacatgaagtcgctgatccagacgctggagctgggcgaaaagatgaacgacgtcgtgcagacgatgaccgacctctatctctccggcgacatcggcatgaccatgccgatgctgaagaccgtgagccccgacagcaaggacgacaccaacgactacgccgccttcgagcagcgcatcatcctcgaccgcaacaagatcatggccgaacgcggcgccccgatccttgccaacggcaacgccttcatgaccgtcggcgccctgcaccttcccggcgaagccggcgtgatcgaacttctgcgcaagcagggctttacggtgacagcggtgaattgagaaggctgcggaccaagctcttcgcttgccgttaaagtcccctccccaacccctccccacaagggggaggggctagcttgtggcgatgccgagcgtcgcttttacccttgcatcagttgagagagcaaagttctgccgagcgattgccgcccggaagcccctcccccttgtggggaggggttggggaggggtcttacgacaacgagcaaaccgcgcgagggttagccaaacgaaaaaggccgcagtcctctcgaaccgcggcctcttcgaagtttatgtcaaagccttacatatggatcggcttgaaaaacgccgccagcgccgcttccttcacgccttccgacatggtcgggtgcgcgtggcaggtgcggccgaggtcttcggccgagccgccgaattccatcagcacggcgatctcgtggatcatttcgccggcgccgaagccgacgatatgcccgccgagaacccggtcggtggtcttgtcagacaggatcttcacgaaaccgtccgtcgtcagcatcgcgcgcgcgcggccgttggccgtgaacgggaacttgccgaccttgtaggcgacgccagccgccttcagctcttcctcggtcttgccgacggaggcgacttcgggctgcgtgtagacgacgctcggaatgacgtcgtagttcacatggccatgctggccggcgaggatttcggcgagtgccacgccttcgtcctcggccttgtgggccagcatcgggcccttcaccacgtcaccgatcgcgtagatgccggcaacattggtgcggaactggccgtcgatctcgacgcggccgcgattgtcgagcgcaacacccgcttcctcgagaccgaggccggccgtgtagggaatgcggccggtggagatcagcacgacatcggcctcgaccgtctgcgcggcgccgcccgcgaccggctcgaaggtcaccttcgcgcccttgccgcccttttcgacgcccgtcaccttggagctgagattgatctccatgccctgcttggcgagcatccgctggaactgcttggagacgtcgccgtccatcgcgccgaggatcttgtcgagatattcgatgacggtgaccttggcgccgaggcgcgaccagaccgagccgagctcgaggccgatgacgccaccgccgacgacgatcatcgtctcgggcaccttgtcgagcgcgatcgcgccggtcgaggaaacgatcaccttctcgtcgatatcgaccttgacgccggggatgccggcgacgtcggaaccggtggcgatgacgatgttcttgccttcgatctcctggaccttgccgtcctcggccgtaaccgagaccttacctgcggagacgatcttgccggtgccgatgaagctgtcgatcttgttcttcttgaacaggaaggcgacgccttcgacgttcgacttcaccgtgaggtccttgtgcgccatcatcttgtcgaggttcagcttcggcgccgcgacctcgatgccgagcgcgtccatgccgtggccggcctgatggaacatttcagacgcgtgcagcagcgccttggagggaatgcagccgacattgaggcaggtgccgccgaagctcgcgcgcttttcgacgacggcgaccttgaggccgagctgggccgccttgatggcgccgacatagccgccagggccggttccgataacgatcacatcataggacattgttgttttccctttcgttatttgtttcgtccgccgcgccgaggagcgcgagacggaagccgaggccgaccacgcggcgccgggaatgcggttgaactcgtgaacccgatcatcggccgccactcacgttgaggatcgcgccggtcacataggatgcgtccttggacaagaggtagagcaccgcgtcggcgatctcgtcggccgtgccggcgcgctgcatcggaatgcttggcgccatctggcgcgcccggtcgggcaggccgccggaggcgtggatctcggtgtcgatgacgcctggccgcacggcgttgacgcgcacgccctcggtcgccacttcgcgggcgaggccgatggtgaaggtgtcgatcgcggccttggaggcggcgtagtctacatattgcgagggcgagccgaggatcgccgccatcgacgagatattgacgatcgcgccgcccttgccgccatgcctggtcgacatgcgacgcacggcctcggccgcgcagagaatcgagccggtgatgttgatgcgcatcatccgctcgatgcgcgcgaccgacatctcgtcgacgcgcgcgggcgcatcgacgatgccggcattgttggcgagcccgtccagccggccgaaatgccggtcgacggcttcgaacatcgcggtgacgtcgccggccttgccgacatcgcccttgatcgcgacagcgtcaccgccgccggccttgatcctggccacgatatcgtcggccgcctcattgttggcggcatagttcacggcgacgcgccagccgcgagcggccgcaagcaggctgatcgcggcgccgatgccgcggctgccgccggtcacgagaagcacgggttggtcgctcatgacgcacattccttgaagtcgagaacggcggagggcgcaaccgacgccttacccttgccccggaccgacacggcgcggaaggccgatccgaacgcatccgcccgcgctgccggatggccgggagcgggcgcgatattcgacggacggaaggcgggattcagcgacatcaggtgttccggtgctgaggcgaaaagggccgctcgcgcggccctgtcggtttcttagagatcgagaacgaggcgctccggatcttccaggctttccttgacgcgcacgaggaaggtaaccgcttccttgccgtcgacgatgcggtggtcgtaggagagcgcgagatacatcatcgggcggatgacgatctggccgccgacgacgacgggacgatcctggatcttgtgcatgccgagaatgcccgactgcggcgcgttcaggatcggcgaggacatcagcgaaccgtagacgccgccattggtgatggtgaaggtgccgccctgcatgtcggccatcgacagcgaaccgtcacgagccgacttggcgagacggccgaggtccttttcgatctcggcgatcgacatctggtcggcatcgcggatgatcggaacgaccaggcccttgtcggtgccgacggccatgccgacgtggcagtagttcttgtagatgatgtcggtgccgtcgatttcggcgttgacggcgggcagttccttcagcgcgtgggtgacggccttggtgaagaagcccatgaagccgagcttcacgccgtgcttcttttcgaacacgtccttgtacttggcgcgcagcgccatcacggcgctcatgtccacctcgttgtaggtggtgagcatggcggcggtgttctgggcgtccttcaggcgcttggcgatcgtctggcgcaggcgcgtcatcttcacgcgctcttcgcggccggcatcctcgaccgtcgacgggccgcgtgcggcggcaggggccgccggagcggcagcggcaggagccgcgatgcccttggcgacggcggcgatcacgtcgcccttcagaacctggccgcgcttgccggagccatcgacctgatcggccgaaaggttgttttcagcgagcatcttcgaagcagccggtgccggcggcatcgaggatgcggcagccgatgcggaggcggcggcaaccggtgcggcagcggcgggagccggctcggcggccttggcgggagcggcggcggcagccggtgcagcagcggcacctgcgccggcggagatctggccgagcagtgcgtcgagaccgacggtttcgccggcctgcgcgacgatttcggaaagcacgccggcagccggggccggaacttcgatggtcaccttgtcggtttcaagctccaccagcggctcgtcggccttgatgacatcgccgaccttcttgaaccaggtgccgacggttgcctcgctgacggattcaccgagagttggaacgcggatttctgtggccattgttcaaatcctgaattttgatctttgtgatatgggacggcgtcgcggcgcagacggccgatatgaattaatgcggagaggaagcgctggcgctccctccccgatctcattctcgtcagccgccgagcgcgtcctcgaggaacgcggcgagctgtgccagatgcttggacatcaggccggttgcgggcgatgccgcggccggacgtccggtgtagcgaacgcgctggtacttcgcatcgatatgggcaagcacccattccagatacgggtcgatgaacgaccatgcgcccatgttcttcggctcttcctggcaccagaccatttccgcgttgcggaagcgggagagctcgttgatgagcgccttggccgggaacggatagagctgttcgacgcgcagcaggtagacatcgtcgatcccgcgcttttcgcgctcttccaaaaggtcgtagtagaccttgccggtgcagagcacgacgcggcggatcttggcgtccttctgcagcttgatcgggccgtccttgatgacctcggcatcgtcccagagcagacggtggaacgaggtctcgccggccatttcggccaggcccgatacggcgcgcttgtggcgcagcagcgacttcggcgtcatcaggatcagcggcttgcggaagtcgcgcttcacctggcggcgcaggatgtggaagtagttcgccggcgtcgtgacgttggcgacctgcatgttgtcttcagcgcaaagctgcaggaagcgctcgaggcgggccgacgagtgctccggaccctgaccttcatagccgtgcggcagcaggcagacgaggccggacatgcgcagccacttgcgttcgcccgacgaaatgaactggtcgaacacgacctgcgcaccgttggcgaagtcgccgaactgggcttcccagagcgtcagcgcgttcgggcgggccagcgagtagccgtattcgaagccgagaacggcttcttccgacagcatcgagttgatcacttcgtagcgcgcctgggtcgccgacaggttggcgagcggaatatagcgctcttccgtttcctgatcgtagagaaccgagtgacgctgcgagaaggtgccgcgttcgcaatcctggccggagagacggatcttgtgaccttcggtgacgagaccgccgaacgccagcgcttccgccgtcgcccagtcgatgccctcgccggtcgtgatcatgttcgaacggttttccatgaagcgctggatcgtgcggtgcgcatggaagccttccgggatctcggacagcttgcggccgatttccttcagctgcttcatcggcacggcggtcttgccgcgacgctgctcgtcggcattgtctgccgtgcgcaggcccgaccactcgccgtcaagccagtcggccttgttcggcttgtagctctggccggcctcgaactcctgctcgagatgggcgcgccagtcggccttcatcttctcgacttcgccctcgctcagcacgccctcggaaacgagacgctcgctgtagagctgcagaacgctcttgtgggcgcggatgaccttgtacatcttcggctgcgtgaaggacggctcgtcgccttcgttgtggccgtagcggcggtagcagaacatgtcgaggacgacaggcttgtggaacttcatgcgaaattccatggcaaccttggcgccgtagacgacggcttccggatcgtcaccgttgacgtgcaggatcggcgcctcgatcatcttggcgacgtccgacggatagggcgacgaacgcgagaaggccgggttggtggtgaagccgatctggttgttgatgatgacgtgcatcgtgccggcgacgcggtgaccgcgcagaccggaaaggccgaggatttcggcaatcacgccctggccggcgaaagcggcgtcgccgtggatgagcagtggcagaaccttggcgcgctccgacaagggaatgatgtcgccgtcccaggcggtggcgctcatgtcctgcttggcgcgggccttgcccatgaccacggggtcgacgatttcaaggtgcgacgggttggccgtcagcgacacatgaaccttgttgccgtcgaactcgcggtccgaggaggcgccgaggtggtacttgacgtcgccggaaccttcgacttcatcaggcgcgtaggagccgcccttgaactcgtggaagatggcgcggtgcggcttgcccatgacctgggagagcacgttcaggcggccgcgatgggccatgccgaacacggcttccttgaggccgagatggccgccgcgcttcaggatctgctcgagcgccgggatcagcgattcaccaccgtcgaggccgaaacgcttggtgcccttgaacttgacgtcgaggaactgctcgtagccttcggcttcgatgatcttcgacaggatcgccttcttgccttcggcggtgaaggcgacgcccttgtccggaccttcgatccgttcctggatccaggccttttcctcggggttcgaaatgtgcatgaactcgacgccgatcgtcgagcagtaggtgcgctcgaggatctcgatcatctcgcgaacggtggcgtattccaggccgagcacgttgtcgatgaagatcttgcggtcgtagtcggcttcggagaaaccgtagttttccggcgacagttccttgtagtcctcgacgggagcggcgatgccgagcgggtcgagcttggcgtgcaggtggccgcgcatccggtaggcgcggatcatcatgatggcgcgcacgctgtcgcgcgtcgcctgcaggatgtcggcgccttcggtcggcttgcccgctgcttcggccttggccttgaccttggtctcgacgaccttctcgatcacgccccagtcgccgtcgagcgccgagacgaggtctccgctcgcctgcagcggccagttcttcttgcgccaggatgcgcccttggcggcccgcttcacatcatcgggattgtcttccagcgccttgaagaaggcgcgccattcctcgttgaccgatgccggatcgtcttcgtagcgcgcatagagctgctcgatgtaagcagcgttggcgccatccaggaacgaggtgatctgaaactgctcgttggcttcttgccgtgccatggtgttacgcggacgcttccgcccgcctcccgactcttgtgattttgccggtcccatcgaccggctgccgcatcttgtgtccagccgcctgtccgcggctcgtctcgtggtcgaaaccgggcaggagtttccccctgcccgggcatatatgtcggatcagcccttgaggacttcaaccagcgtcttgccgaggcgtgccggcgaaggcgaaaccttgatgccggctgcttccatggcggcgatcttggattccgtatcgcccttgccgccggaaacgacagcgccggcgtggcccatggtgcggcccttcggtgccgtacggcccgcgatgaagccggccatcggcttcttgcggcccttcttggcttcgtcgatcaggaactgggctgcttcttcttcagccgaaccaccgatttcgccgatcatgatgatcgactgggtggcgtcgtccgcaaggaacatttccagcatgtcgatgaattcggtgcccttgaccgggtcgccgccgatgccgacagccgtcgtctggccgaggccttcgttcgacgtctggaacacggcttcgtaggtcagcgtgccggagcgcgaaacgataccgaccgaacccttgcggaagatcgagcccggcatgatgccgatcttgcattcttccggcgtcagaacgcccgggcagttcgggccgagaaggcgcgacttcgacttgtcgagcttggccttgacgcgcaccatgtccatgaccgggataccctcggtgatgcaggtgatgaacggcacttcggcttcgatcgcttcgatgatcgcatccgcggcacctgccggcggaacgtagatcacggtcgcatcggcgccggtgcgttccttggcttcggcaaccgaagcgaagatcggcagcgccgtgccatcgacgcccgacgaccaggtttcgccaccctttttcgggtggataccgccgaccatcttggtgccgtaatagccaagcgcctgttcggtgtggaacgtgccggtcttgccggtcaggccctgaacgaggatcttggtgtctttattgacgagaatagacatgtatcaggttcctcagattaggctttgatcgccgcgacgatcttcttcgccgcgtcatcgagatcgtcggcggcggtgatcgccagaccggactcgttgaggatcttcttgccgagctcgacattggtgccttcgaggcgaacaacgagcggaaccttcaggccaacttcctgcacggcagcgacaacgccttcggcgatgacgtcgcagcgcatgatgccgccgaagatgttgacgaggatgccctcgaccttcgggtcggcggtgatgatcttgaaggcggccgcgaccttctccttgccggcgccaccgccgacgtcgcagaagttagccggctccttgccgtagagcttgatgatgtccatcgtcgccatggcgagaccggcgccgttgaccatgcagccgatgttgccgtcgagggcgacataggcgaggtcccacttggaggcttcgatttccttggcgtcttcctcggtctcgtcgcgcagcgccttgacgtcgtcgtgacggaacagggcgttgccgtcgaaggacatcttggcgtcgagaacgcgcagatggccgtccttcatgacgatcagcgggttgacttcgagaagcgccatgtccttttcgccgaacgctttgtagagcgccgggaacagcgacttggcgtcttccgcggcggcacccgagagctcgagagccttgacgatcttggcgacgtcgtcaccggtcacgccggcttgcgggtcgatggcgatcgtgtggatcttctcgggcgtgtcgtgggcgacagcctcgatgtccatgccgccttcggtcgaaaccacgaaggcaacctgaccgaccgaacggtcgaccagcagcgagcaatagagttcgcggtcgatatcggcgccgtcttcgatgtagaggcggttgacctgcttgccggcatcgcccgtctgcgccgtcaccagcgtgttgccgagcatttccttggcgtgagcgacgacttcgtcgatcgacttggcgaggcgaacgccgcccttggcgtcggggccgagttccttgaacttgcccttgccgcggccgccggcgtggatctggctcttgaccacgtacagcgggcccggcagcgacttggcggccgcttcggcttcctcgaccttgaggatcggcacgcccttggcgaccggcgcaccgtagcccttcaagagagccttggcctgatattcatgaatgttcatgggtgtattcctgtctggattgcgtcagcggccggtcggcttacttcagcgacggcgcgatgttgatgcaggcttcgcacaggccggcgacagcgccgacggacttgtcgaaggcttctttttcggccttgttcaggtcgatctcgatgatgcgctcgacgccgcctgcaccgatgacggtgggaacgccgacatacatgtccttgacgccgtactggccggagagctgcgccgcgcaaggcaggacgcgcttcttgtccttgaggtaggattcggccatttcgatcgccgaggcggccggtgcgtagtaggccgagccggtcttcaggagaccgacgatttcggcgccgccatcacgggtgcgctggatgatttcctcgaggcgctccttggtgacccagcccatggtgacgaggtcggtgagcgggatgccggcaacggtggagtaacgtgcgagcggcaccatcgtgtcgccgtggccgccgagaacgaacgccgtgacgtcctgtacggaaacgttgaattccttggagaggaacaggcggaagcgcgagctgtccagaacgccggccatgccgacgaccttgttggccggaaggccggagaacttctgcagcgcccagaccatggcgtcgagcgggttggtgatgcagatcacgaaggcgttcggggcatacttcttgatgccggcgccgacctgttccatgaccttgaggttgatgccgagcaggtcgtcgcggctcatgcccggcttgcgggcgacgccggcggtaacgatgcagacatcggcgccttcgatcgcggaatagtcgctggcaccggtcatgttggcgtcgaagccttcaaccggcgaggactgcgcgatgtcgaggcccttaccctgcgggatgccgtcggcgatatcgaagagaacgatgtcacccagctccttgagcccggcgagatgcgccagcgtgccaccaatcatgccagaaccaatgagagcgattttgttacgcgccatttcggtgtttcctttgcgaccaaaattcgtcgggcgacgcatgaaggggcagcgcccaattgccgcaatcgcatagaccctggggccaaaaatggcaacctattatttttggtgaaggaatttcaatcgtttagaaggcaaaattcttacgtaaacgtaataatttttgtcatcaaactgctattcggcagcgcgcttctcgtgatgcagggccagatattccgcgctccgcatctcgaacagccgcgacgccgttcgatcgaactcgaaaccttcggtaccacgcgcctgtgtcagcaagttctcaggcatcgccgccgctgagatatagagcctcaccgcatggtcgtagagcgtatcgaccagaatgatgaagcgcttcgtctggttccgtttctcgggtccgagcaagggaacgtgatcgacaaatatggcatcaaagcgttcggagatggcaaggaagtcggccgcacccagaggcttgtcgcagagatcggcgaaactgaagcgcgccagccggtcgacggcgagcggcacatggatcgagcgccccttcatcgggagctcgatcggatgcgccttgcgcccgtgcagcgcctggttccaggcggcgtccatggccatgtcggcatgacggtcgaggggcgtgatatagacgggcaggctgtcgatcttctccatccggtaatccgtcggagaatccagcgtcacggtctcgacgtgcttgtcgaggagatcgatgaacggcaggaacagaccacggttgagaccgtcgcgatagagattgacgggctcgacgttggaggtggcgaccagcacgcagccgcgaccgaacaggtcggaaaacagccgcgacaggatcatcgcatcggcgatatcggtcacggtgaattcgtcgaagcacagaagctcggcttcatcatagagcgccgcgcccacgaccgggatcggatcggcctgcttggtctcgccgttcttcagccgcagccggtgggcggcgatgcggttgtgcacatcggccatgaattcatggaaatgcgcccgccttttcttcgaagagggcgccatctcgaagaacatgtccatcagcatcgtcttgccgcgaccgacgctgccgtggatatagagccccttgaccttgtcggagggcttcttcttggccgcgaacagccagccgagcgcgctcgacttcgaagccggacgcttctgcttgagctccgacagcacccgatccaggcatttggccacgtgcatctgcgcggggtcgagttgaagcgagcccgaagccgtcagcgacttcaattgttcgctgacgctcaagctgtagtctggcatcggttgcattgaaaaaatccgcctggagaagataggcggagcgagccgccggctcgcttatcggctgagcgcgatcggctggccgctgttggtctggccgctgaaggcgttgtcggcggtcttgtagacgctgccgatctggttgccgttgcggtccttgagcaggacctgcttgcccgacacttcccaggagcccatcgccgtgagttcgcccacgcagccgcgcgtgccgccgcgcgaaccgctgccgaggttggtgagcgttaggaacatgtcgcaggagccgttgacccgccagcttcccaccagcgattccttggtgacgtcgaggccgccgccgttcggcgccatcgccccgccctgcacgccgcccatcggcgccgtagaagcgggagcggccggaaactgcgaggaaccaccgggaggaggcagctggccaccctgcacctgaggcacgggctgtgccgtcaagggcgccggtgccgcattgtagttcgtgtcgttataggccgtacgctggcaaccggcgagtgacagaacaaccgccatacctgtcatcgcatatcgcaactgcatctgaatgctcccgaatgtccgctttgtcgctaaaaatagtaattagcttattttcgaatgaacgtgtttcactttggttaatcaagccgtaatggccgtgaattgcctgacggagctaggcctgcgacagcgcaattcaacctttacggctgagaacttcctgaagatagaatttgtcagcaaggtgatgagctgctgtttcttcatcattgtcccgctgactgggcaacgacagatcgcgataacgttccgcgatatcgccaagaaaccggtcgatttgaactggcggcttcccttcccccatttcccgtgtctgcttctttacttccaccaactcgataatcgcatgtctcaaggtggagtcgatttcggtcgtctcgaggcattccatcatgttcatcggaggcaaggcaacgaacgagcgctgacgcatccattccaaggcaatagccggacgaagcgcatagagcagcttcttgagccgtatcggcgcaccctcttgcagcgtccactgttgccggaagaggccaacataatgctgggcaaccttgccgggcaccatgatttcatccagaagcgtacccagccgatcgcggaagccagcctcctcctcgtaaacgatcggcgatttcagccactcgacgagcaccgcattgcccttgagcgcgagcaacagcgcctttttcagatcccaccctccagtgtcgatatcgcccacgatcggaaactcgattacatcgcgggccgcgcgcagcctgaggtggtcgttgagcggcctgacatagacgaaacgacaatcataatcgctatctggcgaagggaacccccatgccctgctgccgctttcgatcgcgaaaccgatacggataccgtcacggtgaaccgactgcagacgggatcggatctcggcaaccgcctgcggatcgaaatcctcggttccccgccccgtcacagaggatttttgtgtttcagccaagactatacccggcgctcgaccatcatcttcttgatttcggcgatcgccttggccgggttcaggcccttcgggcaggtctgcgcgcagttcatgatcgtgtggcagcgatagaggcggaacggatcctcgagattgtcgaggcgctcacccttggcttcgtcgcggctgtcgatcagccagcgataggcctgcagcagtacggccggaccgagataccggtcgccgttccaccagtagctcggacaggaggtcgagcagcaggcgcagagaatgcactcgtacagaccgtcgagcttctggcgatcttcgtggctctgcttccactcggtcgccggcgccggcgacaccgtcttcagccagggctcgatcgagcggtgctgggcgtagaagttggtgagatcgggcaccaggtccttgacgacaggcatgtgcggcagcggatagatcttcaccgagcccttgatgtcgtcgagacccttggtgcaggccagcgtattggtgccgtcgatgttcatcgcgcaggaaccgcagatgccctcgcgacaggaacggcgcagcgtcagcgtcgggtcgatcttgttcttgatgtagagcagaccgtcgagcaccatcgggccgcaatcgtcgacgtcgatgtagaacgtgtcgatcgacgggttctggccatcgtcagggctccagcgatagacgcggaattcgcgtgtattggtggcgccggccggcttcggccacaccttgccttcgcgtatctgggagttcttgggaagtgcgagttcaaccatgtttgttttcctgtgcagaggcgaacagcgcgtgcgccgtttcgagagtccgtatccggtcaccctcgccggcagcatgtgccttggttagaaatttcatgtcggacgtcacgagatagctgtcgtccgtcgagagcgttgccgcgagatacatgcagtcataaacagagtgatcaagcttccgtgaaaggtcgaaagcttgccggcaaagcgccttcgagggcaggatctcgtcgatgctctcgtccagcgtcgtcaatccatcgactgcctgctgcgcggtgatctgaccaagccgcaccttccgctgcaggacattggcgacttccgcgaaaatgagatccggagcaactctccgcatcgaattgccaagcagaaaatcggcgtcgacatgctccggctcgggcacgaaccatgcgatcgcggccgatgcatcgacaacgtagatcaacgatccctgtcctctcgcaacatctccaccgcggacgtctgcctgacgcctttcggcgtcatggcgcgaattctggcagcaatcgccggcagatcctcgcgtctgggacgagccggcaccgctgcctgaagcagcgcctccacctcttcctcgacggagcggttgttcagccgcgcccgatcggaaatacgcgtcagcagcgcttcatcagcgatcttgatctgcatttcacccatggcagtgcctccggcaacgatccttttgcctattctctcacattccccatcagtaaacacgcgccttgggcgcgatcttctgcgggtcgataccctcagcgatcagctcggtatgcacggggcggtagtcgagcttgacgtcgccggcgtcgttgacccaggccagcgtgtgcttgcgccagttgacgtcgtcgcggccggcgaatgcgccttccgtgtagtcctcgcgggcgtgcgaaccacggctctccttgcgcgcctcggcgccgtagatcgtggtgatggcgttggccatcaggttctgcagctcgagcgtctcgacgaggtcggaattccagaccatcgaccggtcggtgaccttgatgtcgcgcatttcctgccagatggccgagatgcgctggcagcccgattccagcgattcctgcgtacggaacacggcggcgtcttcctgcatggcgcgctgcatcttctcgcgaagattggcagtcggcgtagagcctgaggcgtgacgcaggccgtcgaagcggtccatgatcttgtcgcaggcggcgacgttgagatgcggcaccggtgccgcgcggtcgatgacttcaccggcgcggatggcggcggcgcggccgaagaccacgaggtcgatcagcgagttggagccgaggcggtttgccccgtgcaccgaggcgcagccggcttcgccgacggccatcaggcccggaatgatccgctcggggttggagctgtcggcgttcagcacttcgccccagtagttcgtcggaatgccgcccatgttgtagtgaacggtcggcagaaccgggatcggctcgcgcgtcacgtcgacgccggcgaagatcttggcgctctcggaaatccccggcaggcgctcgtgcagaacggccggatcgaggtggtcgagatgcaggaagatgtggtctttgttcttgccgacgccgcgaccttcgcggatctccagcgtcatgcagcgcgaaacgacgtcgcgcgaggcaaggtccttggccgacggtgcatagcgctccatgaagcgctcgccctcggaattgacgaggtagccgccttcgccgcgcgcaccctcggtgatcagacagccggagccgtagatgccggtcgggtggaactgcacgaactccatgtcctggagcggcaggccggcgcgggcaaccatgccgccgccgtcgccggtgcaggtatgcgccgaggtggccgagaaataggcgcggccgtagccgccggtcgccagcaccaccatcttggcggcgaagcgatggatcgtgccgtcgtcgaggcaccaggcgacgacgccggtgcagcggctgccgtcatccgacatgatcaggtcgagcgcgaaatactcgatgaagaattcggcgttgtggcgcagcgactggccgtagagcgtgtgcaggatggcgtggccggtacggtcggcaacggcgcaggtgcgctgcaccggcgggccttcaccgtaattctgcatgtggccgccaaacgggcgctggtagatcttgccttcctcgttgcgcgagaagggaacgccgtaatgctcgagctcatagaccgccttcggcgcttccatggtcagatactgcatggcgtcgacgtcgccgagccagtcggagcccttgacggtgtcgtagaggtgccactgccagctgtcgggcgtcatgttgcgcagcgatgccgcgatgccgccctgcgccgccaccgtgtggctgcgcgtcgggaacaccttggtgatgcaggcggtcttgaagccctgctcggccatgccgagcgtggcgcgcaggcccgcgccgccggcgccgacgacgatcacgtcataggagtgatcgatgtacttgtaggccttcccgttctgagcggggccattctgagcggatgaattcgatgccatgatatcaattatcctacgaaggcgatcttcagaatggcgaagagacagagccccgccatcaggatcgaaaagaaggtgttgagcatcacgagcgcgatcttggtgacttcatggtgcacgtagtcttcgatgatgacctgcatgccgagcttcatgtggatgacgcccgacacgaccatcaggcccatgacgacggcgacgaacgggttcgacagcgcgcgaaccacgtccgcatagggctggccggcatagacgatcatgaagatgatgaagaagaggaagagcggcacgttggcgacggccgtcaggcgctggcgccagaaatgctcggtgccgtccttggccgaaccgaggccgcgaaccttacccaagggggtacgcatatccatgtgatcaacctttagaagcgaatgatgaagccgatcacccagaccagcaaggtcagacagagcgaggcgacgatgttggcgatggcgagcctggtggagaattccttcccgaaaccgtggccgaggtcccacatgaagtggcggaagccgccgagcatgtggtggatcagcgcccaggtatagccgagcagcacgagcttgccgacaatgctgccgagtacccagttggcccagtcgtaggcgccgaggccggttgcggccgcgaccagccaccaggcgaccagcagcgtgccgacatagagcgccccaccggtgatacggtggacgatcgacatgaccatggtggggatcggtttataaatctgcaaatgcggcgacaggggccgattgtttgtcacgttcgccatcagaacctcgcggcggtctttctgcgcctcccgggatccggaaagcatccaagcaaccacacgaaggtcacaaagctgtgcgtgcgttgcatcattggcgacgtttaatcacggaaacacctaacgacaagtataattgacgcacccggggaatttaatcgatttgcgtcttgacgtcgcagttgacataggcaagcgcgcccgagccgctaccctttgcggatgagttttcaagcttttgtggacaagccggcgcttttggcgcattttcgcgttaacactttgttaagaattccgtttccggagaccggcgcgatgttgaacacaccctcgaaactcgtttcgctcgccgcggcggtgctgatcgcgctgcccgccacggccggcgatttcggcggcaatccctccccgcgcccgcacaatcggggctatgatcgcggcatggcacagggcgtcgtcgggcatggcggcggcatcggccgtcgcgacatcgcaaacggcctcgcatccggctcgctggtgatccgccatcgcggcacctccatcgtcggcgattatggcggctggggcaacggcccgcgccggatagccggcggctacgatggcttccgtccaaagccgggccgcggccgcttcatccagcgcttctcctcggcctcgtccaacatcgcgcgcaacaacatcgtcatcatcgaccggcgcggcgaggcgcgtgcgccatcgggcacctatgccggctcgtcctacgcctacggcgcggatggcggcacctatgtcggcggctacagctattcgggctatggataccagccggcaaccaggctggcgccgatggccaaggtgatcaacatccgcaatgccaggaacccctgctcctacgaacagggcgtctgcgtcatccgcccctgatagactagcgccggtcaacgggtgaagcgccagaccgtggtcttcttgatctcgctgtcctcgagcgcccgcgtcaccggcacctgatagaccgcgcaggccgacagccgatccttcggcagataggcccgccctgggtcgccgacgagcacggtcatcccaccagcggccaaccgctcgaaccacggcaccagcgccatggcgaagtcgcgatcatagaacacgtcgcccgcaagcagcacatcggcatcgacctcggagccgatcagatcctcgcccgtgaaagcgatctcgaccccgttcagctcggcattgagcgccaccgccgttctggtccacggatcgatatcggcggcgagcacctcgcttgcgcccgccatccgcgccgcgatcgccaccagcccggagccgctggcgaaatcgacgacgcgcttgccatcaaccatatcgggatgatcgagcacatagcgcgccagcccctgtccgcccgcccaggcgaaggcccagaacggcggcggcaggccgatctcggcaagctcctcttccgtcttcagccacagctcatgcgcttcgctcgccagattgagccggatttccggcacatgcggcggcgtcatcgggctggtattgtcgcggatgaagagcgcggggtcggtcttcacgggagatcagcgcggcgggttgtcgagcccgcccatgcggcagacctcggcccactcctcgtcggtcaccggctgcacggaaagccgcatcgacgtcaccagcgacatcttcgacagcttctcgctcgccttcacatccttcagcgtcaccggcttcggcatgtcgcggacagcgcggatatcgacgcagtcccacttggggtcgcccttggcggtggaatcgggatgagacagcgcgcagacctcgacgatgccgacgatctccagcccgtcattggagtggtagaagaaacccttgtcgccgatctgcatcgcccgcatgttgttgcgcgccagatagttgcgaacgccggtccactccgtgcccttgtcacccgcagccttctgctgctcccaggaccatgcggacggttcggatttgtaaagccagtgcgccacttgcttacgcctccggcttgttgaagacccagttgaagggcttcacctcgacactttcgaacaggccagccctagcatagggatcggcattggcgatttcggttgccgcctcgatgctttcggcctcgacgatcacgaggctgccgcagggcttgccctcggcatcgagaaacggaccggccatcttcagcgtgccggcgtcgttgagcgcgttgagatgctccagatgcgtcggccgcgtctccatgcggacattcaggtggccaggcttatccttgcagacaaaggcgaaaagcatgcggttctcctattcggtcgtgatcggacgtgtcatcagccggtcgatggcatcggcaatgccgagcttgccctcgatgatatcggacaccgcgtcggtaacgggcatgtcgatatcaagcgctttggcgagccgcgacacgacggcggcggcgaacgcgccctcgacgagctcgccatgcgcggggtcacgcgtctcgccgcgcccgagcgcgatgccgaaacgcaggttgcgcgactgatggctggtggcggtcaagacgagatcgccgagccccgacagacccggtaccgtatccgcctgcccgcccttggcgacgacgaagcgcgacatctcggccagcccgcgcgcgatcagcgccgcccgcgccgaatcgccgatgccggcgccctcgacgatgccgcaggcaatcgccagcacattcttcagcgcgccgcccagctgcacgccgatcctgtccgacgacggatagagccggaaggtccgcccggaaatcgcctgcgccaaccgctcggcggtctcgccgttttcggcggcgaccaccatcgcggtcggcaggcccttggcgatatcggccgcgaagcccggcccggacagtacggcaatcgcatgccccggcagcgccttggccagcatgtcggtcaaaagattacccgtggtcttctcgatccccttggcgcaggtgacgacaacggcatccttagccaggtaaggttcatattgccgcgccgcatcggcctgcgcctgcgagggcatggcgaagagcacgatgccggcatcagtgatcgcatccggctgtgaagaaaactgcagcgtctcgggcagcggaattccgggaagcgccgcgtcgtgcaggtgctcggcggcgagatcggccatcagcgcgggatcgcgcccgatcagcgtcaccttgtgtcgccccgccagcgcgatgacggcggcgagcgccgttccgaacgcgccggcgccgatgacggcgatcgtttcgctttctccgctcatgcctttgctccccgcttgccgaagccgagcaatgtcttggcgctcgaatccagcggccagcgcgagcgcggctgcacgtcgagatcatcgggcgccacgcccttagccatccgctccagcccggcccaggcgatcatcacggcgttgtcggtgcagagatgcagcggcggcgccacgaagcggaaacggttcttgtcgcacagcgcctgcagcgtgccgcgcacgacgagattggcggcaacaccgcccgccacgacaagcgccggctgttcgacatcgggatagagccccttgaaccgctccagcccgcgcccgatcctgtccttcagcgtccgcgacacggcatcctggaacgaggcgcaaatatcggccacgtcctggtcggtcagcggcgcgatctcggtcgccgcctgccgcacggcggtcttcaggccggagaaggagaagttgagcttcgcctcgccgaccagcggccgcggaaacttgaaacgctgaggattgcccgatttcgccgcccgctcgacggccggcccgcccggatagggcaggctcaagagcttcgccgtcttgtcgaaggcttcgcccagcgcgtcgtcgatcgtcgtgccccagcgctcgtactcgccgaccccgcgcaccaggatcagctgcgtatgcccgccggacacgagcagcataagatagggaaaggaaagcccgtccgtcagccgcgccgtcagcgcatggccctcgagatggttgacggcgtagagcggtttgccggaggccttggcgatcgccttgccggtcatcagcccgaccaggagcccgccgatcagccccggacccgaggtcgcggcgatagcgtcgatgtcggacagcgacacattggcgcgtttcaaagcctcgtcgatcagcgtatccagcgcctcgacatgggcgcgggccgcgatttctggcaccacgccgccataggcactatgctcttcgagctggctcagcaccacgtcggaacgcacggtcggcacgccctcggcatcccgctcgacaacggcggcggcggtttcgtcgcagcttgtttcgatgccgaggatgcgcagaatgggagccatggagcctgatcgttgattgcgatgggtctgaaacctgtttacgagaaactccggtaacaacggatcaatgcggatgcaaacaaaacctttccggatcggcaccagaggcagcccgctggcgctcgcccaggcaaacgaagcccgcgacaggctgatggccgcccataacctccccgaggagatgttcgagatcgtcgtgctctcgaccaagggcgaccgcatcaccgatcgttcgctgtcggagatcggcggcaagggcctgttcaccgaggagctggaagagaaattggcgagcggcgacctcgacatcgccgtgcactcctccaaggacatgccgacgacgctgcccgaggggctctgtctctccgcctacctgccgcgcgaagacattcgcgatgctgtcgtaggccgcaccgccccgaaactgatcgacctgccgcacggcgccaccgtcggctcctcgtcgctgcgccgccaggcgctgatccgccgcatgcgccccgacatcaacgtcatcaccttccgcggcctcgtcgacacccgtctgcgcaagctgaacgagggccaggtcgacgccacacttctggcgctcgccggcctgaagcggctcggcaaggtcgaggtcatcaccgacatcctcgatcccgataccttcccgccagcgcctgcacagggcgcgatctgcatcgaaagccgcatcggcgatgcggcaaccgacgcgttgctcgctccgatcaacgatatcaggacctacgacaccgtctcctgcgagcgcgcctttctggcggcactcgacggctcctgccgcacgccgatcggcggctatgccgtctgcgagggcgaccagatccgcctgcacggcctgatcatcacacccgatggccgcagccagcatgccatcagcatcgacggccaccgccgcgacgcggtggcgctcggcacccgcgccggccaggatattcgcgcccgcgccggcacctcgttcttcgacagctggagctgacggctgatgcgcgtgctcgtcacccgtccaccgcatccgggcgagcgcaccgcaaaacggctggcggagatgggacacgagccggtcatgctgccgctatcggcccccgtgcacgacccggacgccgccttcgcggcgctcgccaactccgacggcccgatatcggtcaccagcgccgaagccatccgcgtcctcaccgagcgccccgatgacctcgccccacatctctcccgccccctctacgccgtcggcgatgccaccgccgaggaggcaagggcctcgggcttcacggatgtcaccgcctccacaggcgacggcgccgacctcgccgaacgcatcgcgcagctagacgtcgcgcgatcggacacaacccggctgctctacctcgccggagccccccgcgccgaaaccttcgagacccgcgcttttgagcttggcctgaccgtcgatacggtcgaatgctaccgcatgcgccgcctcacggtgcccgaccaactgctccgcgaactcttctcggcccacgaaccggacgcgatcctcttctactcgcgccgcaccgccgaggatttcttcgcgctcagggaaatagccgccaacctcgacgccctcatcggtgtccgcctgctctgcctcagccagtcgatcgccgacgccgttcccgcgacgctacagggccaatcggcgatccccgaccaaccggatgagacggcgctgttgtcgcttctgtgagcggttaggcgatcatttcagaagttgcgtttccgcccaggccgcgaagtcttcgagcttgacgagcgcctgcgcggcatcgtcccgcgacttcgtgcgcaccccatattgcacttcgtccttctgctccagaagcgtccgaaggtttgcctcctggtgcttcggaaatgcattgccgagtgccgcgcgaagcagcttgatcaccgcagcgtgatctccctgattgatctcgccgcggtacttcgcggtgatcgcatcggcataggcaatcgcgcaggtgatcgacgtcgcgatggacgggtttccgagatcgccgaggtccgcccattcattgctgttccgggcgtctttcaaataggccctggccacagcaagccgcgccgagacataagccgcatccgtcttcttgcccggcctcgatctaaccatccgcatcgccccccgccgaggcggcaagctcctccggccgcctgcccgccagcacgatcgcatcctcgaccgcatttgcccaccagggatcgccctcgcgcgtcaaccgctcgacatcggacatatcgagaccgacgacgcttgcggcaaagccgagccgcccggaatgcgcctccaagtcatctctgatggtctcgaccaccgtcgcgagatcgcccgcgtcggccacgacggccacgtcgaggtcactcccaagccggtcttcgccgcgcgcgacactgccgtagatccataggcttttgaccagtggcgccttgttgccggcgctatccttcacagccccgacgatcgctgcgaaccgccgatcctcggcggcgaagagaccgcgtatctggtcggcgagataatgcgcggcattcagccggtatagccggctgtaccccgctccctctgcgacgataacaccactctcctccagcgacagcagcccgagacgcgtgctgcttttcgacaacgccgcgcgctggctgatatcggcggcggacagcagcccgccatggcgcgccagcacccgcaggacgcgaacattcgaatccaccccgaaaatcaggtcgacagggtttctgatcgcactctgcgaaatgcttctggccacggttgctcgactcccaaatgttatcaatcgatccgataacggatcgattggatcgatatcaaaccaatcgacctattattaaaccttgtctgcgatcctggcaacgcacccccgtcggccttcacgaactggtccgatttcagccaaggtcgcgacctaatttcgcaaatttcatctggcctctttccttcaccggcctcactgactactttcgaaccactgtaagaattaagagggtctcatggcaccaggaaatcccccccgccattcgaagagcaccgacaagccggtcacgatcgacttggatgcgcaggagattgcctcggaagagactgccagcaaggacatccagaacgggaccggcaagccggccgacgaggttgtcgaatcgcccccggagaccgccgaatcggtcgttcccgacgagggcatgggcgagagcgacgccgtaaaggccaaggtcgaagaaccggccgaggagacagccggccccttcgcctacgacaaggcgcccgaccccgaactgccgccctataatcacgcacccgaacccgtggagcccgccaaggccgagcccgcgcgccagccgggcggcacctcggggctgatcgccgccggcatcgtcggcgggctgatcgcgcttgttggcgccggcgccatccagtatgcaggcctcctgcccggtgcctcggcccccgaggcgccgtcgcccgagatcgccagcctgtcgggcgagatagacggcctcaagcagtccgtcgccaatctcgccgccgcaccgcaggccgcgccgggcaacgacgcgctcgaaagccgcctcgccgcgctcgaaaccgccgccaaggcaacgcaagcatccggcccgggtgccgatagcgcaaccgtcgacgcgctgaaccagaagatatcggatctcacctccgagctcgaccagctccggggcgccgtcagccaggcgaccgagcagcgcgcgaccaacggcgccgcgctggaacagcgcctcgccgccgccgaacagaagctcagcgagccccgccaggacgtcgccgtcgccaaggcgatcgcggccgcggcgctcaaggccgcgatcgatcgcggcggccccttcgtcgccgagctcgacacctatgccggcgtttcgcccgatgatgccgtcgtcgccgatctcaggaacttcgccgaaaccggcgtgccctcgcgcgccgagctgatccgccaggcccccgatgtcgcgaccgcgatcgtcgagagcgtcaacaagcccgacccgaacgagagctggtccgaccggctgatggccggcgccaagtcgctggtcaaggtccgcccggtcggcaacatcgagggcgacagcgtcgaggcgatcgccgcgcgcatggaaaacaaggtgaagaacggcgaccttcccggcgccgccaacgagtggaccacgcttcccgtcgatgccaagcaggcgtccgccgccttcaagcaatcgctggacgcccgcatccgcgtcgaggaacttgtcggcagcgcgctgtcgaaggccgtctccggcaccggtaaggagggctgatcatgatccggctcgtcgtcttcgcgcttctcgtgcttgctctcggctatggcttttcctggcttgccgatcgccccggcgatctctcgctcatctgggagggccagctttatcagacccggctgatcgtcgccgccaccttgatcatcgcgctgatcgcgctggtcatggtcgcctggtggctggtgcgcgtcatctggacctcgccgcactccgtcacccgctatttccgcgcccgcaagcgcgaccgtggctaccaggcgctgtcgacaggcctgatcgccgccggcgccggcaacgcgctgatggcccgcaagatggccgcccgctcgcgcggcctgatccgcgccgaccaggagccgctgatcgcgctgctcgaagcgcaggcagccctcatcgagggccggcatgacgaggcccgcgccaagttcgaggcgatggtcgaggatccagagacccgggagctcggcctgcgcggcctttatctcgaggccaggcgcctgggcgccaacgaggccgcccgccaatatgccgaaaaggccgccgacaacgccccctatcttccctgggccgcccaggcgacactcgaataccgcagccagtccggccgctgggacgatgcgatccgcctgctcgaacagcagaaggccgcccgcgtcatcgacaaggccgaggccgaccgcctgcgcgccgtgctgctgacggcgcgcgccgacgagaagctggaaaacgatccggccggcgcacgcgacgacgccacccacgcgctgaagctgtcggccgatttcgagccggccgcgatcatcgccgccaaggcactgtttcgcgaggacaagctgcgcaaggcggcaagcatcctcgaacaggcctggaagaccagcccgcatcccgagatcggcgccacctatgtgcgcgcccgcagcggcgattccctcgccgatcggctgaagcgcgccgaaaagctggaggcgctccgccccaacaacatcgaatcgctgttgatcgtcgcccaggcagcactcgacatccgggatttcgccaaggcccgcgccaaggccgaggctgccgcccgcatcgagccgcgcgaggcggccttcctgctgctcgccgacatcgaggaagcggagaccggcgaccagggccgcatccgccattggctcgcccaggcgctgaaggcgccgcgcgatccggcatgggtggccgatggctacgtctccgacaaatggctgccgctgtcgccggtgacgggcaagctcgacgccttcgtctggaaggcgccgttcggccagctcgagggcccggtcgaggaaggttcggtcatctccatcgacagcgcgctgaagagcctgccgccggtgcgcgacgtcaggccggaaagcgaggccagcgatcaccgcatcatcgagctggagcgcgccgcgaccatcgccagggcggcccgcccggcagccgagccgccggcggcaccgacaccggccaaaccggccccgaaggagccggcgaccgccagcaagcagacggaagcccccgagccgcgccccttcttcggcggcctgccggatgatccgggcgtgcgcaacccatcggccgagccaggacccaagacacggcttcgcctcttctagccaaacaggacccgcatgttcgaacgcttccaggcattttttcagaacctgaccacagacagccacaagagcagcttcgcccccgacgatccccgcatcgcggtggcggcgctgtgcatgcaggtcatggaggccgacggccagatcaaggacagcgagaagaagcgtctgcgcacgcttctgaaggaccagtacggcctcgatcgcaagcagctcgacgcgctgatggccgccggccaggaagccgagagcgacgccgtcgactattaccgcttcacctccgacctgaagcgccacctcgacaccgagcagcgactcgagctgatcggcatcctctgggacatcgtctatgccgatggcgagcgcagcgagatggaggacgacgccatctggcgcatcgccgagcttctcggcgtctccgcccgcgagcgcatccagaagcggcaggaagcggcaagacgcgtcaccggcatccaggtggtgcaagacgatgccgactgacggttcgggcacgggtatagctggcacacccgtcggcgatcccggcaagccgggcccaggcgtcaagggcaagcgcccggtgctgatcgtgctgcatcaggagcgatccagccccggccgtgtcggccagctgctcgccgaaaagggctatccgctcgacatccgccgcccggttctcgggcagacactgccggccacgcttgccgaccatgccggcgccgtcgtcttcggcggcccgatgagcgccaacgatcccgacgatttcgtcaaggccgagatcggctggctggacgtgccgctgaaggagaagaagccgctgctcggcatctgtctcggcgcgcagatgctggtgcgccatctcgggggaaaggtcgaggccaatgccgatggctcgaccgagatcggctggtacccgctgcgcccgacggaaaagggccggcagctgatgcactggccgaaaatggtctaccacttccacagcgagggcttcgaattgccgcgcggcgccgatctgctcgccgagggcgacgtctatcgcaaccaggccttccgctacaacggccacgcctgggccctgcagtttcacgccgagctgacccgcgccatgatgcaccgctgggtcgtccacggcgcccatcgcttcatattgcccaacgcgcagcagggtcgcgagcatctcgaaggccgcatgctgttcgacgcgccgctgcgcgcctggctcgacgaattcctcgatctggtcttcgagggcaggaagccgaaatcggcgccatccgccagggccacgctgacggcctgatgcggagagccgcgcgccgtgctatgatcgatgccgtcacctcgacggcattttcgatcgcatttttcgacggcatgtctccccgaaagtgatcaccggtttcgggatcaggacatgcgcaaggcatgagccggagcacgccagccgaagatcgcggcgcgcttcggcggacacaggttccgatccacgatccggccgtttggtcgcgcaaggcgccgccatgaccgcagccatatcaggggaacagcatgtcgaactacgaacagaagcttgtctcgctgggtctcgtcctgccccagccgctgaaactgccctcgcacatgacgctgccctttccctgggtcaacgtgcgcggcgacagggccttcatctccggccacggcccgcagaaccccgacggctcgccatcgggccccttcggcgtcgtcggcgacacggtgacggtcgaggaggcccacgcctcggcccgcaaggtggggcttgccatgctcggcagcctgaagcgcgaactcggcagcctcgaccgcatcaccggctggtgccgcgtgctgggcatggtcaactgcgccccccacttttccaacccgcccgccgtcatcaacggcttcaccgagctgatcaacgaggtcttcggccacgacgtcggccgccacgcccgctccgccatcggcgtcgccggcctgccgctgaattttcccgtcgagatcgaggcggaggtgatgatttcggggtgagggtaggatttttggtatggcggacgtcgagtgcgtggccccctcatccgcctgccggcaccttctccccgatggggagaagagactcggggcgggcgactcgctccatcttcccttcgccccaacggggagaaggtggcccggagggccggatgagggggccacgcactcggcgcgaaccaccccaaaaactctcacccccgcgtcacatgctccggcgcatccagcgtatcgatcttccgcagctgcggaaacccgctcgcccacaacgccgccaccacaagcgtcccgatgccgccgatgacaaccgccggcacggcgccgaacaccgaggccatcgtgcctgcgcgaaactcgccgagctcgttcgatgcaccgacgaagaccatgttgacggcgttgacgcggccgcgcagctcatcgggcgtccagagcgcgatcaggctctcgcgcacgtagaccgacaccatgtccgccgcccccatcagcgccagcgccgcgatcgacagctcgacattcgtggatagcccgaaagcgatggtccccagcccgaacagcgccacgccgacgaacatatagaccccggcgcgatgcttcagcggataggtcgcgagcagcaccgccatgacgatggcgccgacgccgggcgcagagcgcagcaggccgagaccccaggggccgagcgtcaggatatcgcgcgcgaagatcggcatcagcgccgtggcgccgcccaagagcacggcgaagagatcgagcgagatcgcgccgagcaccaccttctcgctgcggatgaacttgaagccgccgaggatcatctcccagctcttcgcctcgccggtgctcttctgcgccggcttcgggatcaggaacagcagccccgccccgagacccgcgaacaccacggcgacggtataggccgtctgcgcgttgatgccgtagagcaggccgccgataaccgggccggtgatcgcggcgagttgccaggacgacgaattccaggcgatcgcgttcgagagatcgtcggccggcacgagattgggcgccagcgactgcaccgccggcgacatgaaggcgcgctcgatgccgaaaaccagcagcaccgcgaaaacagggatgggcgagaaggtgcccgtcatggtcatgccgagcagcgtcagcgtgcacagcgccgccaccagcgagcacagcgaggcgatggcgcgccggttatagcggtcggccaccgagccggtgacgaggatgaggagcagcgaaggcaggaactgcaccagcccgatcaggccgagatagatggcgctgcccgtctggtcgtacatctgccagccgaccgcgacgctgacgatctgctgcgagaacgacaacagaaagcgcgcgaagaagaagcgggtgtaggaggagtgccggaacgccgcgaagcggtcgccgtgagccgaaatggacatgatgtctttccaacaaacggacgaaatatcggtccccgacgcgtccgttgagcatgaattgccgcggcagcgcacacggctcttgccggtttagtcgccaatgtctacatgtctgtcaacaacgaactggagattgcgatgcttgcgctttttcaaaccattgatttggctttgaatctttacacctggatcttgatcgccagcgcgattttctcctggctctacgcgttcaacgtgatcaattccagcaatcagttcgtcaattcggtcggaatgttcctctacaacgtcaccgaaccggtgctgaggccgatccgtcgcgtgctgccgaacctgggcggcatcgacatctcgccgatcatcctgctcctcatcatcttcttcatccgctcgttcatgtggaacaccatcgtcccgatggtgatgtgacaaggccctggcaggccgccgacggtcatctcgttctcgccatccggctgacgccgaatggcgggcgcgacgagatatcgggtattgagctggatgccgacgacaaacctcatctgaaggctcgcgtctcggtcgttcccgagaagggcaaggccaacaaggccttgatcgcgcttttagcgaagtcgctcggcctcgcgaagtcgtcggtgaccctcgtctcgggcgacacggcgcgcaaaaaaatcctccggatcgatgtcgagccggaggatgtgatcagaaagctggaagctttgcttcgcctgtaatcaggccttttcgttcttggcgcgttcgatcgcctcgatgatcagctggccggcttccttggcgtcgccccagccgtagatcttcacccacttgccgggctccagatccttgtagtgctcgaagaaatgctcgatctgcttcagcgtgatctcgggcatgtccgtgtagtccttgaccttgtcgtagcgcatggtcagcttcgccgagggaacggcgatgatcttctcgtccttgccggaattgtcttccatcttcagaacgccgatcgggcgcacgttgatgacgcagccgggaaccagcgggcgggtgctggcgatgagcacgtcgatcgggtcgccgtcttccgacagcgtgtgcggaacgaagccgtagttacccgggtaggtcatcggcgtgtagaggaaacggtcgacaaccagcgtgccggcttccttgtccatctcgtacttgatcgggtggccgccgactggaacttcaacgatgacgttgacgtcctcaggtgggttcttgccaatggaaatggcgtcgatgcgcatgcgattactcccgcgacgtgaaatcttcgcagccagataatcggattcatgacgcgacgcaacacacgacgaccgcgcagccacatgattgttttatgatccggccttcaaaatgccggaaaactgggcagaggccgcgcttgaacgctaggctaggccctcagttccagatgaagccgatcttcttcaagggcttctcgtcgaaggtttcggtcccctcgcaatagtcgatgccgccatggccgcgatagaagtcggcgccgccctcgttttcttccaggcaccagaccaccatgcccttgcagccgagcgacttcaacagccgccgcgcttcggaaaacagcatgtggccgaggccgatgccctgatattcggggcgaagatagagctcgtagatctcgccttcctgcggcagcgcgcgggcgcggttgagaccaagcgttgcatagccggcaaccgttccggcgacgtcgagcacgagcagcgtcgccggtccgcgtgtggccttgcgccaccagctctcgccgcggcgctccaccatctgcgtcagcgccttgtgcggaatgatgccggcataggtatgcttccacgcaagcctgtgcacctccgagatggctcgggaatcatgcggctcggcccgccgaacatcgatcgacaacgtcttcataacgcttactctggcccggtcgcggacaattaaccatatgcgctaacgcattcagccggattgcccacagggttaacatgtggacgacggctgaaatttaacgcttttttaactattgcgacaagaaggattcggcgaaccgcacaaaataaaaaccccggcgcgatggccggggtttcgaagtctcttgtgagcctgttcgacttaggcggtcttcgccttggcgaagcgcttgcggtcgttggcgtcgagatacatcttgcgcagacggatcgacttcggcgtcacttccatcaactcgtcgtcctggatccaggagagagcccggtcgagcgtcatgcggatcggaggcgtcagcttgacggcttcgtccttgccggcggcgcggatgttggtcagctgcttgcccttgaggacgttgacctcgaggtcgttgtcgcggctgtgaatgccgatgatcatgcccatgtagaccttttcgccgggctcgatcatcatcgggccgcgatcttccaggttgaacatggcgtaggccacggcttcgccggcggcgttcgcgagcagaacgccgttcgtgcggccaccgatttcacccttgtagggctggtagtccttgaacaggcggttcatcacggcggtgccgcgcgtgtcggtcaggagttccgactggtagccgatcaggccgcgggtcggagcgtggaataccagacgaacgcggttgccgcccgaaggacgcagctcggtcatttcggccttgcgctcggacatcttctgaacgacgaccccggaatgctcttcatcgacgtcgatgacgacttcctcgatcggctccatggtctggccgctctcgtccttgtgcatgacgacgcgcggacgcgacacggcaagctcgaagccttcgcggcgcatggtttcgatcagaacggcgagctgcaattcgccgcggccggacacgtagaacgaatccttgccttcggcttcttcgatcttcagcgcgacgttgccttcggcttccttgaacaggcggtcacggatgacgcgcgaggtaaccttgtcgccttcggtgccggcgagcgggctgtcgttgacgatgaaggacatggtgaccgtcggcgggtcgatcggctgcgcggtcagcgcttcggtgacggcgggatcgcagaaggtatcggcgaccgtgcccttggagaggccggcgatggcgacgatgtcacccgcatgcgcttcctcgatcgaggtgcgctcgatgccacggaaagcgaggatcttggagatacgaccggtttcgatcgtcttgccgtcctggctcagaaccttgacggcctggttcggcttgatcgaaccggaattgatgcggccggtgatgatgcggccgaggaagttgttggcttccaggatggtgccgatcatcgtgaacgggccttcggcgaccttcggctccggaacgtgcttgagcacgaggtcgagcagcggtgcgagaccctggtccttcggaccctcgggattgaagttcatccagccgtcgcgaccggaaccgtagaggatcgggaagtcgagctgttcgtcggtggcgtcgaggctggcgaagaggtcgaacacttcgttgatgacttcctcgtggcggccatcgggacggtcgatcttgttgatcgcgacgatcggacggaggccgaccttcagcgccttggagacgacgaacttcgtctgcggcatcgggccttccgacgagtcgaccagaacgatcgcgccatccaccatcgacaggatacgctcgacttcaccgccgaagtcggcgtggccgggggtgtcgacgatgttgatgcgaacgccgttccactcgaccgaggtcgccttcgcaaggatcgtgataccgcgttccttttccaggtcgttggagtccatcacgcgttccgcgacgcgctggttctcgcggaacgagccggactgtttcaggagctcgtcgaccagtgtcgtcttgccatggtcaacgtgcgcgataatcgcgatgttgcgaagtgccatatgtctaaatctctgaggctggggcgccacgctgggagggcgccaattgcattggggcggctcttacagtgtttttcgcgaatgcgaaaggggggagcccggaatgaaggtcgggaaggctggagtctgggggtttgtgacggtttggtgtcggtttgcgcgctgggatggtgggttaggttcggctcgcgctgcggcaagcaatacccccctctgtcctgccggacatctcccccacaaggggggagatcggcaagtggtctgctcaccagacaaacgtggaggctgcggcgagcgggtaagtctagccaatctccccacctgtgggggagatgcccggcagggcagaggggggtatcccacccacaaaggccgaaggggtatcaactcaaccgcaggagttgccaccttgccccaacatcaaaccccctcacgcatcgctccccgaaagctcctcgaacgtcgaaagcccgcgcttcaccagcatcgcgtccgggctcggcagcttgccgcggaacgcccggtaggtatcctcgggatcgaccgacccacccaccgaatagacgtgatcgcgcaatttccgggcgatctcgccattgaacgcatcgcccgtctcctcgaaggccgaaaacgcatcggcgtcgagcacctcggaccacatgtaggagtaatacccggccgaatagccgccggagaagatgtgctggaagtgcggcgaggcatggcgcatcaccatcgacttcggcatgccgagctctttcagcacctcggcctgcaccgccatcgggtccgcgaccgcgtcgcgcgtatggaacgccatgtcgaccagcgccgacgaggtgaactccaccgtgttgaacccggcattgaagctgcgcgccgccagcaccttgtcgagcagctcctgcggcatcggcttgcccgtctcgaaatgcacggcgtactgcttgaggatctcgggcaccgtcagccagtgctcgtaaagctgtgacggcagctcgacgaaatcgcgcgacacgccggtgcccgacaccgagggataggtgacattggagagcatgccgtgcagcgcatggccgaactcgtggaacagcgtgcgggcatcatccagcgacaacagcgccggcttgccctcggccggcttggcgaagttgcagacattgtagatgatcggcagttcgcccttggcaccgttcttcaaggtcagcttgtgctgcgactggaacgcgctcatccacgcccccgaacgcttcgacgagcgcgcgaaatagtcgccgaggaacatcgccaccagcttctcgtcgcggtcgcggatctcgaagacgcgcacatcggggtgataggcggcgacacccttcttctccaccgcgtgaatgtcgaacagccgccccgccacgtcgaagcaggcgtcgatgatcttttccagctgcagatagggcttcagctctgcctcggagaagttgaatttctgcgcccggatcttttcggcgtagtgacgccagtcccagggcatgacctcgtggttgcggccctcgtcggcgatcagcctggcgatatcggcctcttcctcgccggcgcgcttcaccgccttcgcccacaccttcttcaggagatcgttcaccgcatcaggcgtcttcgccatggtgttgtcgagcttcagctcggcgaagtttccatagccgagcagcttcgccacctcgccgcggagctgaagcgtttcgcggatgatgccgcgattgtccgacgggccgtcgttttcgccgcgcgccacccaggccttgaacgcctgttcgcgcaactcgcggcgctcggagaaggtcaggaacggctcgattatagagcgcgacagcgtcaccgcgaacttgccgtcctcgccgcgctcgcgcgccgccgctgccatcgcgtccctgaggaaatcgggaatgccctgcagatcgtcgccatcggcaaggatcagcgcccagcctttctcgtcggcaagtacgttctggccgaactgcgtgccgagccccgcaagcttctcgttgatgccggcgagcttttcctgctccgccttttcaagcttggcgcccgacttgacgaagcccttccagtgccgctccagcacccgcgtctgctccagcgtcagcccgagcgtctcgcgcgtctcccatagcgtgtcgatgcgcttgaagagttcggcattcatgccgatcttcgaatagtgcctcgacatcttcggcgagatatcccgctccagcgcctggatcgtgtcgttggtatgcgccccggcgcggttccagaacagggccgacacccgcgagagatcgtcgcccgcaagctccagcgccacgatcgtgttgtcgaacgtgggtgcttcaggattgtcggcgatcgtatcgatctcctcttcgtgccgggcaagggccgcatcgaaggccggtgcgaaatcgccgtcattgagcgcttcgaagcgcggcaggccattgaggccgttccagtcggtgagagcggggttgttggcgggcatacggagatccttgttggcgggcttgtttggcgggcatgttgtctcggaaaccaatataggaaagccgcgccgcgattggtatcgccaccatgcgcgggtggcgacgccacctatacgagaagttgatccctaaaaatgctatataagaattaactgtttgttaacgattgaccatggtgcggcgcacacggtattttcgcttgatcttttttaatcgtggatgctggcaatggaaatcacatcgctgcggttttcaccgaccctttcgtttcgaaaatattccgataattcgcaatttaacaacggcttggccgagacgttcgacaccgcgaccaatgccgtgcaagccttccgcgtcgaggaagcggctgccgtccggcccgatttcaccgccatcagcgccagccaattgcgcaatcacgcgcgccagggcttcgacaacggcacgctcgaccaggacacctatgcggcgatttccgagccgctgccgatgcgcaccatcgatccctcgggcaacattctcgatctctccgacattaccgacggcaccagcttcaacttcagggactattacagggaccagttgcggatcgccaagtcgatcggcgcgccggagacggtaaagacgctggaatcggtcgtcagcttcctcgacgcctgatccatcgcgatcccggcccgccccggcgccggcctcaggccttgcgccaccccaaaagacccggcgtcgcgtgcaggagcgcctgcacggcgaaccccatgaacagaacgcccgagcagcgcacgatcagcctttcgtgcgcccggtagaagcgccgcacagcccccgtgccgacgatggcgatcaggatcatgtcggcgacgatgaagccgaggaacgataccgcgagcagcacgggcagcgtctcgaaccgcaaggcgctcgccgagcccgccaccagcgccgtgaacgtcgccagcgccaccggatagcccttcgggttggtgacgccgaagatcagcccgcgccggaacggccgttcgacaaccatcaacgcctgcccctcgcccttcggcttggcgcgaaacgcgttccagccgatccaggcgagatagaagccgcaggcgagccccagcgcgtcgaacacgaagctgccgatcgtcttggcgccgatgatcgccaccagcgccagcgacgcccacagcgtatcgccgaccagatgcccgcagacgaactgcgcccccgcttttctcccctgcccggccccgatccccagcagcgccagaaacgccggccccggaataagcacatagagaagcgccgccagaaaggcgcccgcgagcagcgactgcgtcatgaagaatcccccgtgaaaagacggagattatgcggtgtggcggggacgtcaagcgggcgcgctcagcgtgccgctcaactcaagaaatatcggccgaactcgtcccggcgcagacggcccaacgaggccgcccggctaagcgtcgatggaacagaagatagcttcatgccaggcatgatcttctcgatcgcctctctcacctctcccgaggtcagcccgccacctgcatcggtaatggcccgcacgcacagctcttgaatctgaccgcgcgcggcccgttgcggttcttcgtcgaggccaagaaagatctcaagctgctccttcttcttctccagtgcctcgatctcgtcaacgatcttgtccagctcggccagcgcctcgtcccgcattgcggcttccgcctgcaccagccgctgtttttcttctgcaattttctgcagccgctcttccaatgaactcacgtcaatcctcttactctgctgcttccacgccaaactcaggatcaccctgtagcgatgaaagcttctgtctgatccgctgctcgcgctcggccacgaagcgggggagcatcatgatcgaccaaagatgctcatcctccggtatcagatgcttggcaaggaaagaatggtccctggtcctgatccagtcttcgaaggtggcattgttcttttcgaggttttcagcgccgacaagcaactgcaggtttccaatacggttggcacaggacaccagctcctcgatcttcgacatcggaacgttgttcttcatcaggtgcttgcgatcaacgcggctctgcgggaaaatatggtcaatgtggtgcgcggtagagccccagcttttgttgtcataaagaagagaaagcagcaggaacatttgcctactcccgtactgcagttccataatgccttccagcgtctcgctggcaatataggatggacgcttgatttgccgcgatagcgccgtgttcagctcaccgagaggaaagtccttcgaaccctgcatagccgatgcaatggtattcttcgcggcgccaatcgtgctgtcggacgtgcccccgaaaaccctgttcaacagcgccgcgatcagccatcggcggatacgttctgcgttggtgacgaagaacggtgtcgtcgcgcttagcagatcgagatcaagcttatgcaggtaataggcgatcggaagaagcgcgttcaagctggtcagattttcgcgatcgatgccgaagctgttcaccagctggaatgtccgcttcagcgaccgctgaatatgcggccagttgccccgcatgatctccaaattcttgttggtgaagttcttgacttggtaaacgtgatcgagatcggacagcagcaggcatgccttcatgacgaagtctttgttgacgtcgttcttccggtccagccggctgttcaatgtctcgacgaagttgtagatctcctcgcgggcggagatatccgtccatttcgatgagatcatggatagcatgaggtcggatttgctgagcttcgtgccgccatcgttggcgcgaacgaagatgccgagcacccgatcatagtcctgatttgtctcggtgtagtagctgacgatctgatcgacccagatcaaatcgtaaaggcgctgcaaattacgcttcgccgtttcgaccaccgtccaattgcgcgtaggcggcagacgttcgagcgtcccctccacgaaggcgtcaaaacgccccggttccggatagttcaggatctcgccgacagcgatccagaggttcgccgggcccgactgcggcacattttcgaagagttcgaaaccgtagggatgctcaatgtcatcttcggtgtcctcgctcttcggtatctgcgatggatcgaccagcagatcgatgtagagacgcttgcgttgccatgcactggcactgtcccaccgcttccccttcgccttaacggtgaatgagccgcgcaggccgatgagcatcgaggtcaaccgttgctgtccatctagaacgagtgtcagctttcggccggccgggtcggcaatctcattgtgaacctctccgaagcggaagttctctgcaaatttgtatatttgccagttcattttgttttccggcgcgacgtcccagaacagaaaagagctgattggatagcccttcataagggaatcgaacaaagccaccatttgatcaggtgtccaaacgaaggggcgctggatggctggcaaaaaatactcttggtttattttgtcgatcgtcgtggcaatagtagcggtgctataaggcatgaaaaattgttctctatcgtcgggatgtgaactctcaagcgcccatcaaacggtctcatctaacgcagcgacaaaccataacgcgcgctaaatcttatgcaacctatgtctgcagatatcaatgaacttcgcagagcgcctaacataacttttagacgcagcgatgggccaactacaatgagcgataaagcggatggggcgtcacactttcgcattgcgatgtcacctcgtcttgcgtcaaatagaaccgtcctccacctccgcacacagcccgcgcaaccagccagtcgagtaccagcatgcccccattcaggatgagcgcaaggcgaacgagcatgctcggcgcgctgcttgtcaccatcggcccgatttccatgtcgatctacacgcccgccatgccggcgctggtgggcgctttcgggaccacggaagcggcgatcaagctgacgctgtcgctctatttcgccggcttctcgatcgcccagctgcttgccggcccgctgtcggatgccttcggccgccgcgccgccacgctcgtcttcgtcggtatctacatggtgggcagcctgttgtcggccttcgcgcccggcatcgaatggctgctcgccggacggctgatccagggcatcggcgcctcggtcggaattaccgtggcgcgcgccatcgtccgcgaccagttcaccggcgccgatgcctccaggatcatgaacctgatcggcatcatgatcgccatcggccccgccatcgcgccgaccgtgggcggcctggcgctcgccgccttcggctggcggtccgtcttcttcctgctgatcggcttcggccttcttgtctgcctctcggtcctggtcttcatgcgcgagaccggcacgcccgaccgccgccgggctttgcccggggcgctgttgcaggcctatggcgagcttgtccgcgaaccgcgcttcgtctccgcctcgctggtgctcggcggctcgatcggcgcgctctacgcgcaggcgacgatgctgcccttcatcttgatcaagctggtcggtctctcgcccacggccttcggcctcggcatgctgatgcaatccggctcctatttcctcggctcggtcgttctgagaatgaccgcggccaggctcggcggcgacgggtcggtccgcgttggccttaccctgctcggcctctcgggcgtcatgatcgcgctctcggtcgcgttcgtggcgccgagctacctgtcgatcatgggcccggtcgcctttctcgctttcggcctggccttcctgaccccgcacatgacgacctcgggcctcttccccttcccgcatatcgccggctccgcctcggcgatgatgggcttcatccagatgggcggcggcttcaccggcggcctgatggcctcgctgatcggcgccccgcttctggccttcggcacaatcatccccgccatggccctgatcgcgatcatcagctacctctggttcctgcgcgccacccgccgcgcggcggtgctgtcgcggtccggcctcggggagtagcggcgccgccgctcgcatcagcccagcggcacgtcgaacacctcgccggccctcagcggccgaaaccgttccggcgtcacgccatgctcccgcaatgcggcctccagggcgcggaccggcgcatccatcgcctcgtcggtcagctggaaggtcgcgaagtggtggccggccacatgggcggcgttgcaaagttgcatgccgcggacggcctcgtccgggttctggtgctgccccttcatgaaccagcgcggctcgtaggcgccgaaaggcaggatggcgaggcggaagacgccgtgcttcttggccacggcgcgatagttgatgccgtcatgaaagccggtgtcgccgacgtggtagatcttgcccgacggcgtcgagatgacgaaggaggcccagagcgccatgctgcggtcaccggtgccacgcgccgaccagtgatgcgccggctcggcgtcgatggtaatcctatcggtgatcgcgatccggccgccccagtccatgacggagatcctggcatcgggcgcggcgcggcggatgatcgtgtcgttgcccagcggcgtgacgaagtgggggccgtgggcggcctgcaaccgcttcagcgtcgcgacgtcgagatggtcgtagtgattgtgcgagacgagcacgaggtcgatttcgggcaagtcctcgaagcggatgccgggggcggtcacgcgcttcgggccggcgaaaccgaaggggctggcgcggtccgaccagacggggtcggtcaggatgttgagacccgccacctgcaccagcatcgaggcatggccgaccatggtcaccctcagcccgtcgccttcgacgcgctcttcgggcctcgcctgcgggaaggggctcggcacctgcttttgccaggtctgccgctcgccgttgaactgccagcgcagcatggcgcggaagccgaggggcgcgatgccaccaggattgaagaagcgggtgccgtcgaaatggtcggtgaccgggccttggtaataggggttcttgggtttgctcacttgctctgctttttcacgtaccagacgaaacacgccagctttctccagtcatgcccttggtcgatcagcggaccaagatgatcggggaaagccttcaacccctcggcaagaaagtcgaactcctcgaacagtttggagaactgttccagagcatcgctagccgagcctcgcacccgctccggccactccggggcttttgctaccgttcgataggtggtgacttccacccaatagcactcgcaaactgccccgtctgggaggcgaaactgcagttgcccaccaacgttccaaaggttggcttgccgcgccgcatcgatcaccaatggaatatcatcgagcggccatgcatactcgtttccgcgaagagatgcgcggcggacgatctcggctggcaataatgtctctatatcagtcttcattttccatgctccagatcagcgcctgatatccgcgctgggtcgtcccggtcgcttatttcccctgattgccttgactctccgcccgttttcctgtttaccgccgctcaatctgcgacgagcttcaagactcgagccaccgaccgggacccgcaaaggtataaatcgatcccggaggtccacacccgacagcgcgatgcgccctcgggtgctttttggctatgcgtcttgttttcgtcaaggaaaagcacaaggtttccctatccggaaatcacaaggaagagccgatgtttgagaacctccaggaccgtcttggatccattctgaatggactgacaggccgtggcgcgctttcggaaagcgatgtttccgcggcgctgcgcgaggttcgccgtgcgcttctggaagccgacgtcgcgctcgacgtggtgcgcgcctttaccgatcgcgtccgcgaaaaggccgtcggcgccgagattctgaagtcgatcaagcccggccagatggtcgtcaagatcgtccatgacgagctgatcgagatgctcggcggcgaaggcgtgggcgtcgacctgcatgcggccgcccccgtcgtcatcatgatggtgggccttcagggctcgggcaagacgacgacgtccgcgaagatcgccaagcggctcaccgaccgcgagaagaagaaggtgctgatggcgtcgctcgatacgcgacgcccggccgcccaggagcagctgcgccagctcggcgtgcagaccaatgtcgacacgctgccggtcattgccggccagtcgccgaccgatatcgccgcgcgcgccgtgcaggcagccaggctcggcggccatgacgtcgtcattctcgacaccgccggccgtacgcatatcgacgaacccttgatggtcgaaatggccgacatcaagaagaagtcaaacccgcatgaaatcctgctggtggccgacagcttgaccggtcaggacgccgtcaatctggcgcgcaacttcgacgaacgcgtcggcatcaccggcctcgtgctcacccgcatggacggcgacggccgtggcggtgcagcgctctcgatgcgcgccgtgaccggcaagccgatcaagctcatcggtgtcggcgagcgcatgggcgaactcgaggagttccacccgcgccgtatcgccgaccgtattctcggcatgggcgatatcgtttcgctggtcgagcgcgccgccgaaaacatcgacgccgaaaaggcggccgccatggccgccaagatggccaagggcaagttcgatttgaacgacctcgccgaccagctgcgccagatgcagaagatgggcggcatgggcggcatcatgagcatgatgcccggcatggctggcatgaaggacaagatggcttcggccggcctcaacgacagcctgttcggccgccagctggcgatcatctcctcgatgaccaaggccgagcgcgccaatcccgacatgctcaagcattcgcgcaagaagcgcatcgccgccggctccggcaccgacgcctccgacatcaacaagcttctgaagatgcaccgccagatggcggacatgatgaagatgatgggcggcaagggcaagggcggcatgatgaagcagatgatgggcggccttgccggcaagatgggcctgggcggccttggcggcggcatgggcggcatgcccgatctctccaacatcgatccgaagcagctcgaagccttgcagaagcaggcggaagcggccggcctcggcaagccgggcggcggcatgccgggtctcggcggcggtggtctgccaggtctcggcggcgcgaagctgcccggcctcggcggtggtttcccgggccttcccggcctgccaaagaagaagtgaaggggtcgcccagactatgattgatcctgaaatcaaagcccagctttcgagctatcgccagtcgatcgacaatatcgacgcggcgctggtgcatatcctggccgaacggttccgctgcaccaaggaggtgggcgttctcaaggccaagtacaagttgccgccggcggacccggcgcgcgaggaataccagatcgaacgccttcgccgcctggccaaggacgccaatctggatccggatttcgccgagaagttcctgaacttcgtcatcaaggaagtcatccggcatcatgagcagatcgcagcggaccacgccgaaaacggcgctgctgcaaagtaacaaggccgcttcaagaaagagcggttagacacatccaaggagtaaagaaaatggcactgaaaattcgtctcgcacgcggtggttccaagaagcgcccgtactaccacatcgttctcgccgatgcccgttcgccgcgcgacggccgcttcctcgagaacctcggttcctggaacccgatgctcgccaaggacaacgatgcccgcgtcaagctcgacgccgagcgcatcacccactggatcgcacagggcgcacagccgaccgaccgcgttctgcgcttcctgaacgaagccggcatcgcaaagcgcgaagccaagaacaacccggaaaaggcaaagcccggcaagcgcgctcaggagcgtgcggctgaaaaggctcagaagatcgccgacgctgcggaagctgctgcttccgcggaataattccgggcttcggccttgatcgaacgggcggcatggcgacatgccgcccgttttcgtttccattcccgttcacttcggttatgacgaaccaaacctccggcttcgacattagggacgccatgacaaagctagaaaatccggtgctgatggcaacgatcggcggcgcgcaggggctgcgcggcgaagtgcgcgccaggtcctacagcgccgatccgaccgcgctcggcgattacggccacctgcacagcatggacgggcgcagcttcgaggtgcttgaaatccgcgagatgaagaatgtcgtcgtcgtgcgcttccgcgggatcaacgaccgcaacgccgccgaggcgctgaacggtctcgagctctatatcgaccgcgacaacctgcccgacgacgagctcgaggaagacgagttcttctatgccgatctcgaggggttggaggccgtcgacgaccagggcgtcagctacggcaccgttaccggcatcttcgatttcggcgccggcgacctgctggagctcaagggccccggcaagcggccggtgctgatcccgttctcggaggcctcggtgctggagatcgacctcgaagccggcaggatcaccatcgacccgctggcatccggtctcgtcgacagcgacgacgacggcccgtcgttcacgccggatgattccggcagcgacaaaccgaagaagaagaagtgagcgaccagatggccttccgggcgactgtcctgacactctacccggagatgtttcccggccatctcggctattcgctcgccggcaaggcgatggagcgcggccagtgggcgctcgatgccgtgcagatccgtgatttcgccaccgacaagcaccgcaccgtcgacgacacgccggccggcggcggcgccggcatggtgctgaagcccgacgtgctcgcccgcgccatcgacaccgtctccgaaaacgacagccgcccgcgcctgttgatgagcccgcgcggcaagccgctgacgcaaaagcgcgtgcgcgaactggctgcgggcgacggcgtcatcatcgtttgcggccgcttcgagggcgtggaccagcgggtgatcgacgcgcgagaactggaagaagtgtcgatcggcgattacgttctgtcaggcggcgaaccggcggcactcaccgtgctcgacgccatcgtccgcatcctccccggcgtcatgggcaacgacctctccggcctgcacgaaagcttcgagggcgggctgctcgaacacccgcactatacccgcccgcaggaatgggagggacgcgagatccccgccatcctgacatcgggcaatcacggcgcgatcgacaagtggcgccgcgagcaggcggtaaacctgacccgcgaacggcggccggatctgctggaaaagccggtcggcgagaaataagtccgcacaggctgagattcagccatccacggtgacaaatttgtcgagctggggatgacaagccggcctcagtggtgtaggagcgcacgcggaaatggggttatccccgtctgccagcaacaaagaatggcgaacccgctcccgtccgtaaagggctaaatccggaggtcatggaccaaaggaaaagtgtcgagcgctctggctgtttcagaagaaccaaaggttaagacgatgaacatcattcagcagcttgaggccgaacaggtcgccaagatcgaagccaagcgcacgctcccggaattttctcctggtgacaccgtccgcgtcaacgtgaaggtcacggaaggcacgcgtacccgcgtacaggcctacgaaggcgtctgcatcgctcgttcgggcggcggtctgcaggaaaacttcacggtccgcaagatctcctacggcgaaggcgtcgagcgcgtattcccgatctactcgcctgccatcgaaagcgtggaagtcgttcgccgcggtaaggtccgtcgcgccaagctctactacctgcgcgaccgtcgcggcaagtcggctcgtatcgttgaagacaccggcgttcgcgcccgcaagctcaacgacgccgagcgcgccgcgatcgccgaggaaaaggcacgcctggaagccgagaaggttgcagcagctcaggctctggcagccgaaaaggcagcccaggaagccgccgaaaaggccgccgctgaaaaggcagctgccgaagcagcagcagccgagccggcagcggaataagcttcatccttacggattgacgaaaaaggcgacctccgggtcgcctt

SEQ ID NO: 13 - DNA, 101088 bp, Rhizobium matallidurans
  source 1..101088: mol_type = genomic DNA
gcgcataatttcattatgcgttctgcttcagcagaattcgcaaggccggccatgtgccggccttttgcattttggcaataatatatcgcatgatcacttgaagtgacgtggtgctttacggcactattcttccgctgagggagaataccgccacatgttcactgcaattccgctgatggtcgtgcctttcattctctataatcttgcgatggtcgggttcatgggcggcggcggacttcccgcgctcgacaacgacctgttcgtgctgtcgatgatatcgggcgcgatctggagcatgtcgctcggcgacctcctcatcgtcgtggcgctcgtcgtcctgttcttcgagatattgagggcgacacacaatgcgcgcggcagcctggccaaccacatgctgtccatgctcgtgttcatcgcgtttctggtggaattcctgcttgttccggatgcggcgacgcaggtgttcttcattcttctgacgatcgcgctgatcgacgtggtcggcggtttcgcggtgtcgatccgcagcgccgggcgggatgtttcgatcgggctgtaagcttttgggcatctccccgagctttcggcttgaggagatgctgagtgatccggtctgctatcagaggctgtcgagcttgctctgaagcgcgcgcaactgttccttgagttcgtcgatgtccttggcttcggccttgcggctttccttggcgttcgtcgctggcgccttgaagggcgagaacatctgcatcgcctgctggaacatttcggtgttgcggcgcacctggtcctcgaccatctgcatgggcagctgcaggttcttcgtcagcggcgtctcaccgaaggcgcgcgtcacctgttcgcgcatctgcgtctgctgctcggtgaaggcgcgcatggagtgctccaggaagctcggaaccaccatctgcatctggtcgccgtaataggtgatcagctggcgcaaaaaggaaatgggcagcagcgtgttgccggtcttcgattcctgctcgaagatgatctgcgtcaacacggaatgcgtgatgtcgtcgccgctcttggcgtcctgaactgtgaagtcctcccccttcttcaccatctccgccaggtcttccagcgtcacgtaggtgctggttcccgtgttgtagagtcggcgattggcgtatttcttgatcgctacctggccctcattcttcgccatatgaatctcccgaagcgcgtcttattgtcattgaaattcctccacttgggagtgtagacgcaaaatcgggccggtgacaatctctttgtgcgatgcggcaagccccttttggcgttagcataattcacgcaacgtaagttctttcgaaaattcgcggatgctttcttgtcgtttgacttggcgatgaagctttgtcagtttcaacccatacgtggtgaagctaacgaggagaccttcatgtccagtccgtctatcgtcatcgccagcgccggccgtacggccgtcggctcgttcaacggcgctttcgccactgtcgccgcccacgagctgggtgcggccgccgtcaagggcgcgctcgatcgggcgggcgtcgatgccgccgaagtggacgaagtcatcctcgggcaggtgctgccggcgggcgaggggcagaacccggcgcgccaggcggcgatgaaggccggcgttcccaaggaggcgaccgcctggggcatcaaccagctttgcggttccggcctgcgcgccgtggcgctcggcatgcagcagatcgcgctcggcgacgcgaagatcatcgtcgcaggcggccaggaatcgatgtcgatggcgccgcatgccgcccatcttcgtgccggcaccaagatgggcgacatgaagatggtcgacaccatgatcaaggacggccttaccgacgccttctacggctaccacatgggcgtcaccgctgagaacatcgcacgccagtggcagctgtcgcgcgaggagcaggacatgttcgccgtcgcctcgcagaacaaggcggaagccgcgcagaaggccgggcgtttcgccgacgagatcattcccttcgtgatccagacgcgcaagggcgacgtcaccgtcgatgcggacgaatatattcgccatggcgcgacgatggaggcgatgacaaagcttcgcccggccttcgacaaggaaggcacggtgacggccgccaacgcctcgggtctcaacgatggcgcggccgcagccgtgctgatgaccgaacaggaagcatcgcgtcgcggcatccagccgctggcccgtatcgtgtcctgggcaaccgccggcgtcgatccgcagatcatgggcaccgggccgatcccggcttcgcgcaaggcgctggagaaggccggctggtcgatcaacgatctcgatctggtcgaggccaacgaggccttcgccgcgcaggcctgtgcggtcaacaaggatctcggctggaacccggagatcgtcaacgtcaatggcggcgcgatcgccatcggccatccgatcggcgcgtccggcgcgcgcgtgctgaacacgctgctgttcgaaatgaagcgccgcggcgccaagaagggacttgcgacattgtgcatcggcggcggaatgggcgtcgccatgtgcttcgaagcattctaatagcctgctttacattgtgtggtggttgagctccggtcatagcggagccttacatttggggagcggaacatgagcaaagtcgctgttgtcaccggcggaacgcgcggcattggcgcggccatttcactggcgctgaagagcgcgggctatcgggtcgccgccaactacgccggcaacgacgaagccgcccgggcgtttcacgcggagaccggcattccggtcttcaaatgggacgtttcaagctacgaggcctgctccgaaggtctggcgcgcattgaggccgagatcggcccggtcgaggtgctgatcaacaatgccggcatcacgcgcgacgcgatgtttcacaagatgacgccgcagcaatggcacgaggtgatcaacaccaatctcaccggcctgttcaacatgacgcaccaggtctgggccggcatgcgcgagcgcggcttcgggcgcatcgtcaacatttcgtcgatcaacggccagaagggccagatggggcaagcgaactattcggcggcgaaggccggcgatctcggcttcaccaaggcgctggcgcaggaaggggcggcgaagaacatcaccgtcaacgccatctgcccgggctatatcggcaccgagatggtgctcgccgttccggagaaggtgctcaacgagcgtatcattccgcagatcccggtggggcgcctcggtacgccggaggagatcgcgcgctgcgtggtatttctggcttccgatgatgccggcttcatcaccggctcgacgctcagcgccaatggcgggcagctgtttgtctagaacctggcggggccagactagcggatggaggccgtgtcgcggtcgtcggtctgctgcggctgattggcctgaaccctgccggcgtcataggggttgagcgaggccgcatacgtggcgagcgcaatcgtcaggatcgccgccgcgccgatgatcttcgtcattgtctgtcactcccaaagccggtggagcattcctgatctccgccggtgtcgatattggggcgaattcgaggaattattcggtcgttcaaccgttgggatggtgccggttcctgacctttgcggggacgcggatgcgcgcctggctttcagtgcgcagcgccattgctgccgttgccagaaatgccgccgcgatcaggatggcggctgccgaattcagggcgatctgggccatggtctgtcctctcaaatcgtggcgcctgcgatgggccgccgtttcgtgaggggaatatgagcctgccggccattaccggatagaccaggctttggcgaccgattgtcaacatcgggttgacaatcgtcgttccttggtcacgcaggatcgccgctgatccaggtctggttcaccttgatcccgtcggtcatgtgcacgagatcggcgcgcaggccggtcgccaggcggccgcgatccccgagcttgaggaagcgggcggggtagagcgtggccatgcgcagcgcttcggcgagcgagaggtcgagataggtcagaccatagcggatcgccgaggccatatcgacgtccgagccggcgagcgtgccgtcggagagcaccagtcgcgagcagaaggcgccggtctcgcgccgcaccgtgcggccgttgagcgtgaagctgttttcagcggagccgaccagcgacatggcgtcggtgacgaagaacagcttgccctcgccgcgcttggctcgaagcgccgtgcgcagtgccttgggatcgacatggtggccatcggcgatgatgccgcaccagacggccggatgatcgatcgccgcgcccacaagccccggcgtacggtggccgagttggctcatggcgttgaacagatgcgtgacgccacgggcgccggcgtcgaagcgcgcctcggctgcctcgctcgtgcaatcggagtggccgatgctgacgacgacgccggcttcgctcagttcgcgcacctgtcgcaccgtgacctgctcggccgccatcgtgaccagcagcgtgccgatcacctgcgcggcggcggaaagcgcctttacgtcgccgtcgttgaccgggcgcatcagttcggccagatgcgcgcccttgcgggcgggcgcaagatgcggaccttcgagatgcaggccggcgacgccccggtcggttttgaccgcgtctttcgcggcgtcgatggctgcggccgtcgcctcgccggtatcggtgatcagtgttggcagcagcgatgtcgtgccatagggacgatgccctccggcgatccggtacatggaggcgggcgatggttcgtcgttgagcatccggccggcgccgccattcacctgggcatcaatgaagccgggcgcgagaatgccaccgccgagcgtgattgtctcgccatcaggcaggtcgttcatggcggcgatcgcctcgatgcggccgtcggcgacgacaagcgccctgtcgtcgtgaaagcgttcgccgtcgaaaatacgggcgccggagaagatcttgcgcggcatcagacggtctccgtaaccttcaggaggttggccggcttgtcggggtcgaagcccttgcggcgggtgaccgcctcgatcatccggtagtagaccagcagcgagaccagcgggtccagcaggccgttgcctgtggtggggatgcgcaggttgatgccgggaagctccctggtcgagaagggaacggtggtggcgccgagcttgctcaggcgctccagcgccttgacgttgttggcgtaagcggcgtcatcgggcgtgaaggcaaggatcgggaagcccggctgcacgaggcgcatcgggccgtgcatgagttcggcgagcgagaatgcctcggcgtgcaggccggaggtttccttggccttcagcgccgcctcgagcgcgatggcgaaggcggggccgcggccgccggtgtagagcgaggtggcgttgaagagcacgtcttcggcggcagctgtatcgatgcccgatgtggcgcccagtgcttcgggaagcttttcaagcgcggcccgcaggtcgccgttggcgccgattgccgcggtgacgcccgacagggccgcgaccgaggcgatgaaggacttggtggcggcgacgctcttttcggccccggcgttgaggtcgagcacgagatcggcctgtttggcgagcgggctgtcggtgacgttgacgacggcaatggtcgtcgcgccgccttgcttggccgcttcctgaagcgccacgatatcggggctggcgcccgactgcgacacggtgaaatgaatgccgcccttgaggcgcagcggcgcgccatagaccgacgcgatcgacgggccgaccgaggccaccggaatgccgcaggtgatctcgaagagatatttgaagaaggtggcggcatggtcggaggagccgcgcgcggccgtggtgacgacgcttggcgcattcctggagaagagcttggcgatctcgtcgaaaacaggcttttccttgcgcagcagcgtggcgaccacttcgggagactggccggcttcctgcaacatcagcgattggggttcactcatagctcatctccaattctcaattctgcgacaaaatcataggcatcgccacgatagtgcgagcgggtgtattcaacgacgcgctggtcttccaggcgggatacgcgttcgatcagaagggccggggcgccggtcgcgacgtcgagcgccgccgccgacgtcgcgtcgagcgtgacggcggagagtttttgcaacgcgcgcacgggccggtggccgctcgccgtcagcgcgtcgtagagcgagccttcgccgccggcggtgtcatcgaggaattttatggggaccacggagcgatcgatcgccagcggcagcccgtcggcaagacgcaggcgatcgaggcgcaagacgcgctcgtcgacgccgaggcccagcaggaaggcttcctccggcgagggtttgttgatggcgcgcgagaggatcctcgccgccggcacgcgcccgcgcgagcgcatgtcttccgagaaggacgagagccgccagagcgactgttccatgcgctcgaccttggcggagacgaaggtgccgctgccgtggcgcgattccagcgtgcccgtgttgaggagatcgcgataggcggtgcgcaccgtgacgcggccgatcttcagggcttcggccagatcgcgttcgctcggcaatgcggcaccaggcttcagcaggccctcgttgatcaggccggtcagtgcctgcgcaagacgacgatagagaggcccgctgcgcgctgtgtcgcgcagtccgcgcgtgtcgatctccgctatcagactggttctatccatgagattaaaatagaacctctttggaaccaattgcaagtgccaacgcgcacaaaaaaaccctcgcaaagttccgcgagggtttgatgacatcaggagtggtcggcttttcgccgtcagttcttcgagaatatgtagtcggtttcctggcgcagcacttcgccggggcgcagaaccgcgttggggaagccctcatggttgatggcgtccggccagatttgcgtttccaggcagaagccggcgaaggggccgtatttgcggccaccgatgccgggtaccggcacatcgagcttgaaggcggcgtagaactggacgccgggctcggtcgtgcgcacttccatcgagacgccggaatagaggctgcgcgcgagcaccacggaacgcttggcgacacgttcggacgagaggcagaaattatggtcgtagagcgcctgagtgtcgccctcgaagcgcttcagcgaggccatttcgcggaaatcgaataccgttccttgcaccgggcggatctcgccggtcgggatctggcgctcgtcggtcggaagatagctgtcggcggcgatcatgatgtcgtggcccagcgtgtcgtcgcggccgtcgagattgaaataggcgtgctggcagacattggcgatggtcggctggtcgctcgtcgtctcgtaaaccaccgagagctcgccatcgccatgcacgcggtaggtgacgaggatggtgcaattgccgggatagccgccgcgaccatcggcatcgacgatcttcaggacgacgcggtcgctgtcgtgctcgacgatcgtccagttgcgcagcgcgatgttttcgaagccgccatgcaggtggctgacgccgttttcgttgaggtcgagctgatagctattgccatcgagcgtgaacttgccgccgccgatgcggttggcgttgcggccgggcgtcgcgccgaaataggcggagtgcgcgggatagctgtcgaaatcgtcgaacccaagggtcaacggcgcatcatgaccctcgagcctgaggtcctggatgactgcgccccaggtgatcaccttggcggtcaggccgccgcccgagatttcgacgcgatggacggtctcgcccgtcttcgtcgtcccaaaaacgtcccgcttcaatccatccgccatcctgtttcctccccggttcgcgtccacaatttcgggccagaacctgctctcaattgaatgaaatcgcaaccgccgcgctataaaaacaagcgagacgaaaagcctcagccgtcctcgccaatatcttccagattgtagggtgtcgtctggtagatttcgttgatccagttgccgaaaagcagatgcgcgtggctgcgccagcggttctgcggcgggatcgacgggtcgttgtgcgggaagtagttgtgcggcatcttgatcggaacgccggcattcacatcgcggaaatactcgtcggcgagcgacgtcgaatcatattcgacgtggttgaagatatagagccggttgcccttcttctcgtgaacgaggcagacgcccatctcgctcgattccatcaggatttcgagcgtgtcggatttttcgatgtcggcgcgccgcacttccgtccagcgcgagaccgggacctcgaaattgtcggagaaaccgttcagatagaccgacgatggcttgaggttcttgtggcgatagacgccgaaggccttttccgtcagcgcgtgcttcggaatatcgtgaaaatggtagatcgcggccatcgcgccccagcagacattcatcgcggagtgcacgttggtgcgcgtccagtcgaaaatctgctgcatttcatgccaataagtgacgtcttcgtatggaagcgtttcgatcggcgcgccggtgatgatgaagccgtcgaacttccggtgttggatctcctcccaggtctggtagaaggagaagagatggtcttccgaggtgttcttcgccttgtggttcccgacgcgaacaagcgacagctcgacctgcagcggcgaggcgccgatgaggcgcgccatctggatctcggtcttgatcttgttcggcatgaggttcagaagcccgatctgcagggggcgaatgtcctgacggatcgcggccgtctcggtcatcacgcgcacaccttcctgaaccagggtttcaaaggcgggcagggtatcggggatcttgatcggcatagcggtcactcgatgaaaaatacgaatatatcgctatcggtccgcacgcggccctttagcaacttctttaacgtggctgcaagccggccggccaaatcaccacggagcgctctaaatagcgccagtcgggccgcgaatcaatcgtcgaaagaaaccgcctcgtcggcgccatggtcactcccccgttacctgatgctagaaactgttgctggacaggctgactcacggtgctattcaggtgctacagacgcgtaaggaagcatgatggcagaggacgtcaaaagcagaccgagcatccaggggcaggaccgggtcgggtatgatctcagcctgatcttccgtctcaaggtgatgttttcggcattctggcattccaaggtgcgcgtgccagtgctcattctctcgacggcgttgatcggcatcattctggcgacggcctatgccacggtcattctcaaccaatggaacgcgccattctacgacgccatctcgcgtcgcgatctgccggggtttttctaccagctgaagatcttcgcgttgatcgccggcatgctgctcctgctcaacgtgatccaggcctggctcaaccagatgacggcgctctatatgcgcgaggggctgacacgcgatctcgtcgaccagtggctgcagcgcaagcgggcgctcaggctcgcttccagcgggctgatcggcgtcaatccggaccagcgtctgcatgaggatgcgcgcaatctggcggaaagcaccacggggctcgtcatcggcctggtacaatcgacgatcctcctggtgagtttcatcggcgttctctgggagttgtcgagcggcttcgtcttccgcttcggtgaatacgccttttccattccaggctatatggtctgggcggcgatcttctacgccgcgtccgcctcggtgctgagccagctcgtcggccgcaagctcgtcaagctcaacgcggaccgcttctccagggaggcggagctgcgtttcgcgctgatgcacgccaacgagaacattccggcgatcacggctgcgcgcggggaagagaacgagcgggggcggatcaacaccgacatcagcgccgttctcgccgtcatcaagaagctggcgatggccaacgtcaacctgacctgggtgtcagccggctacggctggctcgtcgtcgtcattccgatcatcgtggcggcgcccgcctatttctccggcggcctcaccttcggtcagctgatgatgtcggtcggcgccttcaaccaggtgaacacggcgctgcgctggtacgtgtcgaacttcggcccgatcgccgaatggcgcgcgaccttgatgcgcgtcaccgatttccgccaggctctgaccaccatgggcgacgatgtcgatctcaaggagacgatcgcctatgaacgcagcgcgccgggcacgctgacgctcgaggatgtgaccatcgccaccaagatggacgaggagatcgaccagtgcggcggcttccggctgcaggaaggcagcgtcaccatcaaggccggcgagaaggtgatgatcaacggcgatcacaacgtcaatcgcaagctgttgttcctggccatgtcggagctgtggccctgcggaagcggcaagatcggcctgccacccaccgacgacatgctgttcgtgccgcaatcggcctatattccgggtggcacgctgcgcgaagcgctggcgtttcccgcagccgccgacacctacaagaacgacgatgtgatcgctgcgctcgaaaaggcggggctgcacaatctcgttgcccgtctggacacgcgcgcgcgctgggacaagctgctcgatgccgatgaacagcgcgccatcggcttcgcgcggctcttgctcgtcaggccgcaatggatggtcttcgacgaagtgctcgagggcatggagccggagtggcagtcgacgatgatgaaggtgctcgaggcgatgccggaggcgacgatgatatatatcggccgctccgacgcctatatcgaggccttccatccgcgcgtgctgcatctcgaagcgcttgccgccaagcccgatcaaggcaaggtcgcggacagggcgccgaacacgccggcgcccgcgctatgatcgtcgtgatcgcgatcacatcggcggaacgatgccgttggtgccgacggtgacccgtgccgcggagaccgttccgtcactggccttttcgcccatgacgatgatatgcgcgcccggcgtcaggtcggacttctgcgcggcggtgaaggtcacgatcggcgtatcgtccgcgatcgagatggtcttttccttgccctggtaggtcagcgtcacggtgtggccgtcgacggatttgacggccttggccacggttgcgttggtcatgctgctgttgggcttcagatcccaggaccggcttccctcaccggtgcctttcatggccgccggaaagatcagcacttccagcgcgccgtcgccgccgtcctgccggggcagcgaggcgatgccgacgaaatcgccgggcttgatgtcgtcgacggatgccttcctgatgccgccgaccttccagtcaggcttcagcgtgaccgtctggtcggcgccctctcgggttttgacgacgagcgtgtcgccggtcaggctggctacatcgccgcgcacgcgcacgttctgtgggtcggcggcggaagtcacatgcgacgtgcccagaaggatgccgacggcaagcgccgcgacatggctggtattcagatagcgagacatgggttttctcctcatggccccgggggctggagcctcccggagcttaggcacgaggtttcagtgctggctaatcaatgaaatgtgaggcaaaccgcgttggcggcgaaggcccgccccttagccttccagctcttcccggagcatttcgagctccagccattcctcttccatcttcaccaggctgtcgcggaatttctccatttcggcggccaggcggttgaaggtggtggggtccttggagaagaggttggggtcggccatcttttcctcgcgccgggcgatctcggcttcggccttggccatctccttggggaggttttcgagcgcgaacttctgcttgaaggagagctttcccttgcccttcggcgcgtccgcggccggagcggcttgctgcgctttcgccttctcggccttttccgccttcttgcgctcgtcggcggcacccttgcgctgcgccagcatgtcggaatagccgccggcgtattcgatccatcggccatcgggcgcgtcgggaacggcgggcgcgatggtcgaggtcacggtgcggtcgaggaagtcacggtcgtggctgacgaggatgacggtacccgggaagccggcgacgacttcctgcagcaggtccagcgtctcgatgtcgaggtcgttggtcggttcgtcgagaataagcaggttggacggccgcgccagcatgcgggcgagcatcaggcgggcgcgctcgccgccggaaaggttcttgatcggcgtgcgggcctgctccggctggaacaggaattccttcatgtagccggtgacgtggcgctgctcgccgttgacaagcaggttctcgccgcgtccgtcggtgagatagtgcgccagcgtgtcctctgggttcagatcctcgcgcttctggtcgagcgtggcgatctccagattggtgccgagcttgatgatgccggtgtcgggcgcgagctggcccgtcagcatcttcagaagcgtcgtcttgccggcgccgttcgggccgacgaggccgatgcaatcgccgcgatgaacgcggatcgaaaacggcgcgacgatcgggcgctcgccataggtcttggtgatcttgtcggcttcgatgacgagcttgccggattcctgcgcgtcggaaacggtcgcctgcacggtgccctgcggtcccttgtggccgcgatagctggcgcgcatcgtctgcaattcgccgaggcggcgcatgttgcgcttgcggcgcgcggtgacgccgtagcgcagccaatgctcctcgcgctcgatcgccttgccgagcttgtgctgttccatttcctcggcctcgagcacctggtcgcgccaggcctcgaaatgggcgaagccgcggtcgagcctacgcgaggtgccgcggtcgagccagacggtggcggtcgagaccttctccaggaagcgcctgtcgtgcgagatcaggacaagcgcgctgcgggtcttctgcagctcgccttccagccattcgatggtgggcaggtcgagatggttggtcggttcgtccaggagcaggatatcgggctcgggcgccagaacgcgggcaagggccgcgcggcgcgcttcgccgcccgagaggttcttcgggtcttcctcgccggtgaggccgagatgcgagagaagataggtgacgcggtagggatcgtcgcccggtccaaggcctgcttccgcataggcctgcacggtgttgtagccggcgaaatcgggcgcctgttcgagatagcgcacggtcgatgacggatggcggaacacctcgccggattgtgcctcgaccatgccggcggcgatcttcagaagcgtcgacttgccggaaccgttgcggccgacaaggcagatcttgtcgccgggctccacctgcagggcagcacccgccagaagcggcgctccgccgaagctcaggaagatatcgtcgagtttaaggatagggggcgccaaaaatcagactccggaaagatcgtaagggcgggcgagcacgatggcgcggccgctttcaagcgagaagcgcacggggccttccgcgacattggaaatggtgcgcgacgagccgaagggcaaatggaaatcgctgagcggatagcgggcgttctcgatgaagagaccgttgagctcgctgaaggcgggaacggaaaacaggctgttcctcggcagatcgagcgtgatgctccccgcgatcagcggcacggcttcttccgttcccgaggtcaggagcacgtcgaggccggtctcggcgagactgacggcgtagatgaggtgctgcagcgcgtgatcggagcggtcgcctgcaagggcgcccgcgaggatcagtcgtgtcgcgccgcgcgcgatggcttccgacacggcgatctcgccgtcggtcgcggccttggcggcggggtagggttttcgcgggatgtccgagaatgcggccgtcagatcatccggcgtggaatcgaaatcgccgacccagagctccggccggacatcgagcgccagcgcgtgccgcatgccgccatcggccgcgatgaaactgctgccggatacggcggcgcgaaggcgctccgtcatgtgcagctcgccgccgagcaggatggtgaaggtggattggctcatgcgcattgcccatagcgcaaagcggaggaaaagggaaagggcgccggcatgtctttatcggcgagcccgggtaacctttggctttattttgacaggctgggcgccggcggcaggttcttgtccttgacggcgaagacgcgctcgaaaccacccatgaacttgtcgaacaggccggcgaaggcttccgcctcctcagccgaccagtcggcgatcacgtccttgatgatggcgagcttctgggccttcagctcttccagcaggcgctggccgaagggggtgacctccacgaggatgcgccgcgcgtcctgctgcgaggcggcgcgccgcaggacgtcccggcccaccatatcggcgacgatccggctggcgcgcgagggatcgatgcgcatggcttcggctatggtgccgacggtgacctccccctgctcggaggcgcgcatgacggcatcgagcacgtcgagatgcgaaagttcgatatcgggcgccaccttggcgatggcgagacgggcgatcaggcgccgccccgttatcacccgcatacgggtcatgctctgcccgatatggacgatgtcctcgatcgcggcgtccggctcgcgggttttttctgcggtctcattcatgtgtcggacgatagcaggaagcgtggcgcaagaaaatatgcagatgtcatttatgtgacattgacatttatgtgctgatgtcacataaattcgccataacctgaaagatcgcccccatgaatgtacagatcgccgcgcagccgctggtgaccgatccgcgtcgccggctcatcctgtttctcttcctgatgaccgccatgttcatggccatgctcgacaaccagatcgtcgccacggcgcttccgacgatcgtcggcgagttcgggcaactcgatcggttcagctgggtcggctcggcctatctgctggctgtcagcgccgtgatgccgctttacggcaagctcggcgatctctttggccgcaaatatgtgatgatggccgcgatcctgatcttcaccgtcggttcggcggtttgcgggatggcggtgtcgatgaacacgctgatcgccgcgcgcctgctgcagggcctcggcggcggcggcgtgatggtgtcgatcttcgcggtgacggccgatcttttcgagccgcgcgagcgcgccaagtaccagagctatgtcagcctcgtgctgatggcatcgggcgccatcgggccggtgctcggcggcacgatgagcgatctcttcggctggcgttcgatcttcctcgtcaatatcccgatcggcgtcgtggtgctcggcggcctggccgtcatgcttccctatcgcaagccgaaccgccgtccgacgatcgattatgccggcgccattctcctggcgctgacgacgacaagcatcgtgctcgccgccgatggcgcgcaggtgttcggctcgctgatcgcaccgctcaatctcgcgatcatcgccgccggcgtggtcctcctggtgtcgtgggtgttcgtcgagcgccgcgccgccgaaccgatcattccgctgtcgctgtttcgcaattcgaccttcagcctgctgctgatcatgtcgatcatgagcggcggcatcgccatcggcatggtgaactatttcgcgctcttcctgcagaccacgacgggtctttctccgtccgcggccgggctgttcttcatcctgctcacaggcggcctgatgtgcgggtcgatctcggcggggcggatcatttcggtgacggggcgctacaagccgttcgccgtcgccagcctcagctgcaatgcgctggctttcgcgctgctgtcgcagtttcacgccggcacgccgatcgtcttcatcggcgcggtgatgacgctgcagggcgtcggcatcggcctggcgcagcaggttccgatcatcggcgtgcagaacgcggcgccggtgcgcgatatcggcgcggcgaccggctcggtgaccctgtcgcgcatgggcggcgcgtcgatcgcgatctcgatctacggcgcgatcatcggctcgcagctcgcgcgcgtcggctcctccattcccggcgtgacagacatcgaacagctgacgccgaagatgctggccgccctgccggaggccgcgcgccaggcggtggcggaagcctatgccaatgccttcgtgccgctgttcatgacctcctgcggcatcgcgctgatcgggctggtcgcggcgctgatgctgaagccggtgcaattgccgcgcgccggggccgcacccgcgaaagcgaccgccgaggccgccgaatagccggcggaccttgccgacgtccgctcttgccagacgccggctacggatatacaccttgcgacgctctaacggggtgcctcgtatccttgcgatatttggctgagaggcttgcgaaagccaacccgcggaacctgatccggctaacaccggcggagggattagacgcgtgacaccaggcaccgcccttttccccttcattgaacctagaggagaggtgtcatgacccatttcaagacctatgcgctcggcgccgccgtgctgttggcgagcttttcggcaacggcggcccaggccgccgacaagacgctcaccatctacacctatgagagcttcacctccgaatggggtcccggccccaaggtgaaggcggcgttcgagaagacctgcggctgcagcgtcaatttcgtcagcgtcgccgatggcgtggcgctgctgtcgcgcctgaaactcgagggatctggcaccaaggccgatctcgtgctcggcctcgacacgaacctgatcaccgaagccaaggccaccggcctgttcgatgcgagcggcgtcgataccggcgcgctgacggtgcctggcggcttcaaggatgacgtcttcgtgccgtatgactacggccacttcgccgtgatctacgacacgcagacgatcaagacgccgccgacgagcctgaaggagctggtagacggcgatcccgcgcagaagatcgtcatcgaggacccccgtacctcgacgccgggcctcggtctgctcttgtgggtgaagtcggtctatggcgacaaggcgccggacgcctgggcgaagctcaagaagcgcgtgctgacggtgacgcccggctggtcggaggcctatggcctgttcaccaagggcgaggcgccgatggtgctctcctacacgacatcgccggcctaccacatggtttcggaaaacaccgatcgctaccaggcagccgccttctccgaagggcactacatccagatcgaggtcgccggtctcctgaagaacgcgccggacaaggcgctggcgcgggacttcctgaagttcatgatcacgcccggttttcaggacacgatcccgaccaacaacaggatgatgccggtgtccaagacctctgagccgctgccggatgccttcggcaagctcgtcaacccgtcgaagaccttcctgatgagctcggatgaggttgccaggaaccgcaaggcctggatcgacgagtggctcgccgccatgagcatgaactgatgagcatgaactgatgcttcttgcgccgtccgaaagacgatatgcgctggtcggcggggcgctcagcctcgccggcatcctcgtcttcgtgacggtcgcgacgctgtcgctgctgatctccaccgatggcatgcctctggggtcgatcctttccgatccatacatcctgcgtgtcctgcgcttcacgcttctgcaggcggcgctctcgacgctgctgtctgtcgtgctggccattccggttgcgcgggcgctggcgcggcaaccgcgatttatcggccgcatctggatcatccggctgatggcggtgccgatggggctgccggtgctgatcggcgcgctcggcctgatcggcatctggggtcggcagggcgtcgtcaacacgatgctgtcatgggcgggcgtcgatcagcccgtcagcatttatggtctgtcgggcattctgcttgcgcatgtcttcttcaatctgccgcttgcctgccggctgatgctggcggcgctggagcgggtgccgggcgaatactggctggtggcgagcgggctcggcatgcggccggtgtccgtcttccgcttcattgaatggccggtgctgcgctcggtcgtccctggcgtggccggactgatcttcatgctctgcgccaccagtttcacgctggtgctgatgcttggcggaggaccggcggcgaccacgatcgaggtggcgatctaccagtcgctgcgcttcgatttcgaacccggtcgcgcggtggccctgtcgctgctgcagatcgcgctgacggcggtggtgctcggcatcctgtcgcttttgccggcatcaggagatgcggggctgaccgcgggtcgcacgatccggcggcccgatggcgccctgttcggcgcgcggatcgcggatcgcgcgcttctcatgctggcggtgctgtttctcgggctgccgctgctcttcatcgtcgtcgccggcctgcgcgccgatctggcgaagctcgtcggcgaagcgatcttctggcgggcgcttgccaccagcggcgtcatggcgctcgcatcggcgctgctgtcgctcattttgtcgatgccgctcgtgcgcgcgcgccatacgctctcgcttgaacgtcgcgcgcgtcgcggcgcacgatccttcttcgccgccatgggggccgcgtcgtcgctcgtgctgctctttccgcccatcgttctcgccacgggatggttcctggcggcgcgcgatgtcggcgatgtcaatgtcgtggcgccagtgctcgtcgtcgccatcaatgcgctgatggcgatgcccttcgtcgtcagggtgctggagccggcctatgcaatccaccagcgccgcacgcagcggctgagcgccagcctcggcatctccggcctcgccaagctgcggctgatctcatggcccgacctgcgcaagccggtgctgacggcgctgtcctttgccatggcactgtcgctgggcgatcttggcgccgtggcgctgttcggttcggatagtttcgtgacgctgccgtggctggtctattccagtctcgggagctatcgcaccaacgacgcggacgggctggcgctgatcctcggcgtgatctgcctgttgctgacgatttcgggcacgatgggctcgggggtggcggatgaaccgaagcgggaggcgctatcgcatgactgatgccatcgagatgcgcggcgtgacgctgcggcttggccagaatggtttcctgttcgattgcgcgctgccggacggcgccgttatcggcgtcacgggcgcatcgggtgccggaaaatcgaccttcctcaatctgctggccggtttcgacacggcggatggcgggcggatcctgttccgcgggaaagatatcggtcgccagcatccggccgagcgtcccgtgtcgctggtgtttcaggacaacaacctcttcgcgcatctcgacgtcttcaccaatatcgggctcggcatccatccggcactgaagctcggcgataccgatcggcacgccatcgcgtcggcgctggcgaaggtcggtctggcaggcttcgagaagcggatgccggcgacgctgtcgggcggcgagcggcagagggtggcgttcgcgcgggcgctggtgcgcgagcggcccatcctgttgctcgacgagcccttcgccgcgctcgatccgagcctgcgccgcgacatggcggggctgcttctggccatgcaccgcgacactggcaatacggtcgtgatcgtatcgcacgacgccgacgagatcaggcggatcgccgactatgcgattttcatcgatcatgggagggtcgccgtggccgcgccgatcgagcgtttttcgaccggcgaggacaatgcggcgctgcggcaatttctacggatcgacgaatcttaacaacacaacggcactttcgccataatttgcggcgacccagagaactccttaaccacgttaggcttgctaaagtataaagccgccataattaggcagagtctcgctatgcaaccgatgcggaaatcagctaaagcaaaggcttgggccctcgattgtgcattgcggaaacgggggcgtacgcctgttgaaccttgatgaagacgaccggggcgcgatgacggcgagccggccgagaagcacgatgactcggagagccagactggaccgcatgacgacgtggaaactgcccgcgccttccagtgatgtgttcttcgcagcgtgccgctgggcgcggctggcgtcgatcctgtccgtctccaccgtggcgctctacggctgccagtcggcgctcgaacaatcctatcaacccagtgtcggcccttcgtccaatccgcagatcgtcgacgaggtgcagaagaacgatccgcgcgcggcgatgggcgcgcgcgaacatccgcgtatcgtcgcgagctatggcggcgaatacaaggatgcgaagaccgagcggctggtggcgcgcattgccggcgcgctgacggcggtgtcggaaaatccgagccagtcctaccgcatcaccatcctgaattcgccggcgatcaacgcgttcgcgcttccgggcggctatctctacgtcacccgcgggcttctggcgctcgccaacgacgcctcggaagtggcggcggtgctttcgcacgaaatgggccacgtcacggccaatcacggcatcgagcggcaaaaacgcgaagaggcggaagtgatcgccagccgcgtcgtcgccgaagtgctgtcgagcgatatcgccggcaagcaggcgctggcgcgcggcaagctgcgtcttgccgccttctcgcggcaacaggagttgcaggcggacgtcatcggcgtgcgcatgctcggcgaagcgggctacgatccctatgcggccagccgcttcctcgattccatggccggttacagccgtttcatgtccgtcgatcccgatgccgaccagagcctggacttcctgtcgagccatccgaactcggcgcagcgcatcgagctcgcgcgcggccacgcccgcgccttcggccaggagggcaaggtcggcgataccgggcgcggatactatctcgacggcatcgatggcctgctctacggcgacagcccggaagagggctatgttcgcggccagaccttcctgcatggcggtctcggcatccgcttcgacgtgccgcccgacttcaagatcgacaacaaggtcgaggccgtgatggcgaccggtcccggcgacatcgccatccgtttcgacggggtggccgacaaccagacccagtcgctgaccaactacatctcgagcggctgggtgaccgggctcgatccgtcgaccatccggcagatcaccgtcaacgggatggaggccgccaccgcgcgggcgagcgccgatcgctgggatttcgacgtcacggtcgtgcgcaacaatgcgcagatcttccgcttcctcactgccgtgccgaaggggagcgccgcgctgcaatcgaccgccgacgtgctgcgctccagcttccggcgcatgacgccggccgaggccgcgtcgctgaagccgctcagggtccgggtgctgacggtgcagccgggcgacaacatcaccacgctggcggcgcggatgatgggaacggaccgcaagctcgatctgttcaagctgatcaacgccctgccaaccggcgcctccgtcgcacccggcgaccgcgtcaaaatcatctcggaataaaaaaaggcccggcttgcgccgggccagttacatcactgggggagtaatctcggagtaatcgggggttagttcgcggccatgtacgggtcggcgctgaccagcgctgtcctgagtttttccatggcgcgactttcgatctggcggacgcgctccttggagatgccaaggtcggcgccgagttcttccagcgtcgcgccatcctcggcaagccggcgggcgctgatgatcttcatctcgcgttcgttgagatgggtaagcgcggaggcaagccacacccggcggcgttcaccgtcgatcatgttggtgacctgttcgtcgggcaacggctcgttgctgacgaggaaatccatcttctcggcgctatcggcatcgcccgagacggacggcgcctgcaaagaggcgtcgttgccggaaaggcgggcatccatggtctgcacgtcggagaggctgacgccgagtgccgccgcgatttcctgatggatcgactgcagcgtcaactgcgtatcgcccttggccagcttggcgcgcaggcggcgcagattgaagaacagcgccttctgggccgaactggtgccgccacgcacgatcgaccagttgcgcaggatgtaatcctggatggatgcgcggatccaccagcttgcataggtggagaagcgcacgtcgcgctccggctcgaaacgggcggcggcctccaggaggccgacatagccttcctggacgaggtcgctcatgggaagcccgaagttgcggaatttcgcggccatcgaaatgacgaggcgcatatgggccattgcgatctggttgcgcgccccgcggtcgtcattgtgcttccagcgcacggcgaggtcatgttcttcctcgcgggcaagatagggagccgccatggcgatcttgatcatgcgccggtctgcagacatgttcttcatatcggtctcctgagctcaggcttttagccccgaaaaagggcaaacaaggcttgcttccggacattgctgaccggatcaaattcatggcttgaagatatgaaagcctcgaactctggacgtctcagagagaggccctagttactgctatgtgctggttatgccgcggggccagatcgttttcttcacgttgccaaatcggcaatttgtggaaggcatgatccgctcctcgtcgcatcctgacatgaaaaccggacctccagcgaaattgctttctcccggaagtccgtggtgacagtgtgtaaacgcgcgaccgtggaaaaggttccaataaaaaacccggcacgatggccgggttttttggtgggaagaaagcccgagatcaggctgcttcttcctcttctgcttcgtcttcctcgacagccttgccgcgcttcggacccttgttcaggttcgtttcgacgagacggacggcttcggtttccgagagcttgttgacggcggcgatttcgcgcgccatgcggtcaagcgccgcttcgtaaagctggcgttcggaataggactgttccggctggttttcggcacgatagagatcgcgaacgacttcagcgatcgagatcaggtcgccggagttgatcttggcatcgtattcctgcgcgcgacgggaccacatggtgcgcttgacgcgcgccttgccctgcacgaccttcaaagcacgctcgacgaaatccgtctcggaaagcttgcgcatgccaatgctcatggcctttgcgaccggcactttcaggcgcatcttgtccttctcgaaatcgataacgaaaagttcgagcttcatcccggcaacttcttgctcttcgatggcgctgatggtaccgacgccatgagcggggtacacgatcgattcaccggtcttgaaaccatggcgggctgctgaaggctttttctgctggatcgtcattcttgtcaaaaactccctgttacgcttccggccaaggccggagccgggtcagtcaggcccggatgagacggtcggatccgtcgggtgactttacttctggtcccaccgggaagaagcaagcatattcagacacgcaatcttggggcgtgacagctcaagatcatgatatgtcacggaaatcgcgcttggatttgtttgctttcgtggtggtttggggcatccttgatgccgcaaaaggaacagtgtgtgaaagttaccacaaaaatatgaggaaatcaataatttactgcgcgtgagtcatgcgggcaacacatgtcgcccccataagtcatgcatatccgccatgagatcggccgagatccggcgttgtctcagactatagtatcatcggtcgatcagtcgccggcgccgggcttttcggagaagtatttctcgaattttccggtctcgccgtccacgtccttggcaccttccatcgcgtccttcttgacggtgatgttgggccagatgctggcgaactcggcattgatcttcagccacttgtcgaggcccggttcggtgtccggcttgatcgcctcggcgggacattccggctcgcacacgccgcaatcgatgcactcgtcgggattgatcgcgaggaaattctcgccttcatagaagcaatcaacagggcatacttcgacgcaatcggtgtatttgcagcgaatgcagttgtcggtcacgacataggtcatgaggaactccaggattttcacgcagacggggccgggcaacctggaacgtcgcgcctttcccctggccggagaaggacgtgagcagtctcgggaaccgccatgccatccggcaagttgcttgtgaagtatcggctttaccgccggatttcaaggataaagaaagcgcgaaagcgccgagtttggagacggattttctaatcgtcgtcggacatcaggcggtcgattgcgcggcgctctttcttggtcggtcgtcccgagccggtgtcgcgggtcgcctgctcgtagggcgtcagccgcttgcggtcttccggcgagggcgaaatgtcgtcgtagaggaggcgcgcctcctcgaaagggccgcgccgcgcgccaccggacttgacgatgagaacgagctcgcgccggtcgagcgagagctcgatcctgtcgccggtcttgatctggtggcttggctgggaaacgcgctcgccgttgatgcgcacatgccccgattggacatgggcctgcgccagcgagcgcgacttgatcatgcgcgtgaagaacagccacttgtcgatgcgctggcgcgaaccgctcgatggctgtgtcttctcgctcatggattacttcttcatctgctccttcaaggcagcgagcttggcgaagggcgaatccggatcgaccggcttttccttgcgcgggggcttcgcctcgaagcgcagcggctgggagccgccacggttgttgttgcggtcgtcacgacccttccgatcgccgccgcggtcctggcggtcgccgcgctggtcgttgcggccctggtgcggcttgccgccgtccttgccacggttctgacggttgccgtcgcggttctcgccttcgccgccctggcgacgattgccgtggccgcgatcctgacgatcgccctggcgttcaccacgctcctgacggtcaccctggcgttcgccgccacggcgctcgccatggccgcgtgcctggcgctggttgttgtcggtgcggccgccaaggcgccacagcaggaccggcttcggctcttcggcttcggcggccggcgcttcagctgcaggcgcagcctcggcggaggcttccgtcgcggtcgcttcagcaactggtgcctcagcggctggcgcttcggggggttcagcagcaggtgcttcggcagccgtttcgtcagcggaggcgctgtcggcgtcgtcgtgctcggccgtttcagcggcggcgtcagcggttgcttccgtcgtagctgccgcggcaggcgtcgcggcggcgtcctgcgtcgccaggtaggtcgcggcttcctcggccttcacggcgtcggcgcggtagccgaggcccttcaggatttcttccatgtcctccagcgtggcgccgagaatggagagcatcgcggtcgtcgtggtgaagcggcggccgtcataggccccctcgggacggttcggctgacccggtttccactgcagcagcggacggatgatgtcggcgaggcgctcgaggatatcgacgcgaacggcgcgctttccaaggaagcggaagcccgccagcttgtagaaattgcgctcgtagctcggatcggtgacgacagaggtacggccggcggcaagaaccggaatgaggtcgccgtagcccggcttgtcgagaccgtcgttcttcagcccccagagcagcgtgatgagctcggccggagccggcttcagcagggcaggaacgaagatatgataggcgccgaagcgaacgccgtagcggcgcatcgaggcgcgggcgtcctgatcgagcgacttgacctcttcggtcacgtcgcgacggaaaagcacgccgagattttccaccagctggaaggcgaggcccttggcgaggccctgcaggtcttcggcgcgcgacagatcgtcgagcggcttcagcacggtcgagatgtggtgattgacgaagcgctccaggcgggcggcgacgtggtcgcgcgcattgccggtcagctgctcgtcggcaagcaggatcacgcgcggacgcatgatatgctcggtgcccgccagacgcgccacgggatcgccgagccaacggatcgaaccgtcggagccgatcgcgagatcgccgttgccggacgcgtgaatacgcgccgcgcgggcttcgaattccaaagcaagcgccttttgcgaagcagcctggacagccttcgcgtccggaccatccgctcccgatacaggcgtgaaccggaaaccggacaactgccccacatgatgtccttctacgaagacatcgccatttacactgatttcagcttccagcatcgcattctctctcaggcgcttcatgagcacagatgtcctgcgatcaacaaagcgtttcgtcaacctttcatgtaacgcatcggacaatcgatcttcgatttcccgcgtcttttcctgccagtgtgtcggatcggcaagccagctgggccgattcgatacataggtccacgttcttatctgcgcgattcgcgccgaaagcgtgtcaatttcaccgtcagttcgatccgcgcggtgcacttgctcggcaaggaaattctcatttaccgtgccatagcgcacgagatcggaaaagagggtggcgatcagatcggcgtgctgggccggcgtaatgcgccgatagtccggcagcgcgcaggcctcccacagcttttcgacccttgccggggtgtcggccagatcgcggatctcgggatagcgtgacagctgctcgagcgcctgctggtccaccgccggcagggcgcgcgtcaggccgagcacgcgcggcccggtttcaaggctggcgcgtagcgtctggatcgacttgaaatcgaggtccgtggtgcgccactgcagcaccttgacgttgtcgaagtggtggccctcgatgcggccgaccagctcctcgtcgaacggatcgacatggcccgtcacgccaaaagtgccgtcgcgcaggtggcgtccggcgcgaccggcgatctgggcgagctcggcgggattgaggttgcggaactggtagccgtcgaacttgcggtcctgggcgaaggcgacatggtcgacatcgagattgagccccatgccgatcgcgtccgtcgccaccagatattcgacgtcgccggcctggtagagcgccacctgagcgttgcgggtgcgcgggctcaatgctccgagaacgacggccgccccaccgcgctggcggcggatgagctcggcgatcgcatagacctcgtcggcggaaaaggcgacgatggcggagcgctgcggcaggcgggtgatcttcttctggccggcgtagagcaggtgcgacaggcgcgggcgctcgacgacggtaataccgggaagcagatgctggaggatcggccgcatggtgccggcgccgagcagcagcgtctcgtcgcggccgcgcagatgcaggatacggtcggtgaagatgtgcccgcgttcgagatcgccggccagctgcacttcgtcgatggcaacgaaggcggccttggtctcgcgcggcatggcttcgacggtgcagacggagtagcgcgcattcggcggcgagatcttctcctcgccggtcaccagcgccacgttatggacgccgaccttttcgcagacacgcgtatagacctcgcgcgcgagcagacgcagcggcaggccgatgatgccagtgccgtgggcaaccatccgctcgatggcataatgggtcttgcctgtattggttggaccgagcaccgcggtcacgccgcgcccactcagtatcatcggctgcgatgtcagtgtctttgtcctgcagacggggcgggggtgccccggggtaaaaccaagctcctgatccgaagcagacaaacaaatggacagccgctcgtgcaaacgcaagggctgatttgaatttcaccggcggattttaggcttcgcgaatagcttgtggaatgctcgcatagcgattcggaacagcagtagaacgaatcggagacgaatcgctgactccagatgattcagtgtttgttcacggctaagtattgattttgaatcactttttcccaccagatgctgaatctcatgattcccgtatggcgtgtgtccgcgttttggtccggttggataggagcgatggcactcgccggctcgtcgtgcgacatcggttccgtccgaaacgtaaaagatccgtttcgaagccggctcgaccaaatccggaacaaacggcagacgaatcagcgacgtcatcgacttcccggtttgttcacgacaacctgttgtattttatggaaattttaaccataggcgaaaatgtgccgccggcccggcgtccgcgcgggcatgccaggcggcttcggattgcccgcgaaaaaaatattgccctgtcggaccatatgggcggaaccaaaagccggcttaggtgtttctggctcattcaaacctaaagtgcgttgaggtcacgggacatgcttggaacaatactactcattatcctcattctgcttttgctcggagccctaccaaattggggttatagtcgtagctggggctatggaccttccggcggtttggggctagttctcgtcattattatcattcttgtactcatgggccgtatctaagcgcccgaaaaacctgggagaaatgtcatgatgaagaagattgtactcatcgctgctctggttggcgcgctggcatcctgcacggccaccgaacagggcacggcaatcggcgccggcaccggcgcggtcatcggcggcgcggtcagccacagctggggcggcgcggccgtcggcgctgttgccggtggtcttgccggcgcgctcatcggccagtcggtcgaacgccgcggctactgcgtctaccgcgaccgctacggccgccgctacgaagcgcgttgcccgcgctaacggcttcggcctgagcgatcaggtccacggatcgagaaaggcgtcgggtttccggcgccttttttgttgtcactatgaagcccatcgggggcgacctatctggtcgtagtcgcctttgctggcacggcgggatagtgctctgcttcgtaattttcgatcagtatgaatagcatgcgaaaacgcgttgcttcgtcggacccttcgtcaggttcgccttcgaagtacggcctgatctcggccaatgcggccctgtattcattttcgttttgaagttcttgagaagtatccgaggcgaacatacagatctcctttcgacgtggcggaagcctacacggcttgacgccccacgccaaagaaaaaggccgcatcgcggagcgatacggcctttgaagcttgggtcggtcggcgccgggtcagttcttggcgcgctcgacgtaggagttgtcttcggtcgcgatgacgacgcgggtgccggcgtcgatgtgcggcggcaccgaggtgcggacgccgttggacagcatggccggcttgtaggaggacgatgccgtctggcccttgacgaccggctcggtctcggtgatctcgagcgtcacgtggcgcggcagttgcagggcaagcgccacaccttcgtgcatcgacaggatgcagaccatgccttcctgcaggtaggccttctggtcgcccatggtctcattgtcgacgacgacctggtcgtaggattccgggttcatgaagtggaagccttcgccgtcctcgtagaggaactggtggttgacgtcttccacgaaggcgcgctcgacctgctcggtcgtgcgccagcgctcggagaccttcacgccatcgacgatgcggcgcatgtcgacctgggtgaccggcgtgcccttgcccgggtggaagttgttggccgtcagaacgacgtagagcttgccgtccacatcgaggacgttgcccttgcggacggaagaggcgatgaccttgaccataagagttccttgtaactcggcttttggcgtcgtagaggactgtcgaaatggccccggagacgcaatcaggtgttctttgggggcgcaactaacctaaaatccggcaaatagccagcccttgcgtgggttgatccggtcaggacggcattgaatgaaaccctcgatcgccaaagcgtctccctggtggacgcccagtgtgcatgccgaccgccgaccgttcctgatcggacgcaaccggatacaggcggctctgcgtggctatttcgcccgcgaggacttcatcgaggtggatacggcgacgctccaggtgtcgccgggcaacgaggcacatctgcatgcgtttgccaccgaggcgctgaccacggacgggcaggcggcgccgttttatctgcacacctcgcccgaattcgcctgcaagaagctgctggccgccggcgaggagcgcattgcttgcttcgcgcatgtctaccgcaaccgtgagcgcgggccactgcatcatcccgagttcaccatgctcgaatggtatcgcaccggcgaaagctacgagagcctgatgatggactgcgtgcgcatcgtagcgcttgcggccgaaaccatgcagacgacaatgctcggctatcgcgaggcggcctgcgatcccttcgccgggccggagcggttgagcgtcgccgaggcgtttcgccgtcacgccgatatcgatcttctggcctcggtcagcgccgatggctcgactgaccgtgaccacctggctgacgagatgaggcgcaacggcatgcgtgtcgccgaggatgaccagtgggccgatcttttcagccgggtgctggtcgagaaggtcgagccgcatcttggcatggggcgggtgacgatcctcgacgaatatccggtctgcgaagccgcgctcgcgcggccatcggccgccgatccccgtgtggccgagcgcttcgaggtctatgcctgcggcgtcgaactggcgaacgggttcggtgagttgaccgatcccgtcgagcagcgccgccgcttcgagatcgagatggcggagaaaaagcggatctacggcgagacctatccgatcgacgaggatctgctcgacgcgctcgctatcatgcctgatgccagcggcatcgcgcttggcttcgaccggctggtgatgctggcgacgggcgcgcggcggatcgatcaggtgctgtgggcgccggtggcggagtatgggcagtgacgatcacccggccgatcaagacggtggacgaactcgccgacgccgggctcatcgccgatcgcgaccgcgaggcgctggacgcggtcgcggcacgctatgcgatcgcggtgacgcctgacatggcgcgactgatcgaccgcgatgatgtcaatgatccgatcgcgcgccagttcgtgcccgatgccgctgaactcctgatgacgccggaagagcgggccgatccgatcggcgatcgcgcgcacagtcccgtcgagggcatcgttcaccgctatcccgatcgcgtgcttctgaaggcggtgcatgtctgtcccgtctactgccgcttctgctttcgccgcgagatggtggggccgcaggggctgggaacgctcgatccggccgcgatgacggccgccttcgactatatccggaaccatgacgcgatctgggaggtcatcctcaccggcggcgatccgctggtgctgtcgccgcgccggctgcgggatatcctcgaacagctcgccgatatcgatcacgtcaagatcgtgcgctttcacagccgcgtgccggtcgttgaccctgacaggatcgatgcggcgttgattgaggcgctgaaggcgagcggcaagaccgtctatgtcgcgctgcatgcgaaccatccgcgcgagctcacgaccgaggcgcgcgccgcctgcgcccggctcgtcgatgccggcatcgtcatggtcagccagtcggtgctgctcaagggcgtcaatgacgatcccgcggttctggcggagctgatgaaggccttcgtcgaaacccgtgtgaagccctactacctgcatcaccccgatctcgcgcccggcaccagccatttccggctctcgattgaagaagggcaggcgatcgtcgcgtcattgcgcggccggatctccggattgtgccagccgacctatattctggacatacccggaggatacggcaaagccgagatcggcgagagctcgatccgcaaaaccggggagggttgctattcggtttccgactacaacggacaagagcatatctacccgccgcgcggggcttgactgttccgttcttcgtttcatttcagcacttgcgctcatcggcgtgtttgccaagcgttgtttaagctttttgcgcaaagcaatgatccgatttgctttatctctactgatcggacgaagacgctaaattcttagcttttcttcggagccagatttaaccacgtgccttagcggaatattgggttttcctccttaaaagcacctccatgacagggcgatgagcgcccgctctggttatgacagcttggagatgtgaggatgaatacaacgatccgcgaactgcttgcgaaattcggcaagctgcccgtgtccatcgacaccgtggccgacgatgccgatctctacgcggcagggctcacctccttcgcatcggtgcagctgatgctcggcatcgaggacgccttcgatatcgagttcccggacaatctcctcaatcgcaagtccttcgccagcatctcggccatcgcgcggaccgtcgatctgatcaaggatagccggaaggtcgcctgatgaacttcccggtcaaaatcacggaagacagtttcgcggcaagggctgcccgcgttgccgccgtcgcggcgaaattcgcggacgccgtcgattttgaaggccggtttccgcgggaagccgtggatgcgatgaaggcggaacgcctgctcggcattcagatcccgcgcagcctcggcggcgaaagcgccaccacgaccgagatcgccgagctctgctcgatgctcggccaggcctgcgccgccagcgccatggttttcgccatgcaccacatcaagctttccagcctcgtcgaacatggagcggaaagcgcttggcatgccgatttcatgcgagggatcgcggccgaacagctgctgatcgcatcggcgacgaccgaaggcggcatcgggggcaatctgcgcaacagcatctgcgccgtcatcgtcgaggacggggtttgccgtctcgaaaaggatgcgaccgtcatttcctacggcgcgcacgccgatgcgatcctcatcacctcgcgcgctcatgcggacgccgctccatcggaccaggttctgacggcgttcctgaaagatcagtacatgctcgaaaagacgcatgcctggaacacgctcggcatgcgcggcacctgctccgacggcttcctgttcaagggcgaagcgccggcgagccagatcctgcctaagcctttcgccgaaatcgccgcgcagtcgatgctggcatcctcgcacctgctctggagcggtgtgtggtacggcatcgccatcgatgccttctcgcgcgcgcaggctttcgtgcgcgccgccgcccgcaaatcgccgggcgctccgcctccgggcgcgctgcgtctcgccgaagtgtcgaacctgttgcagatggtgaagtccaacgtcgtcgccggcctcaaggcctacgaggatgccaaggccgatcccgacaagctgtcgtccatggccttcgccgttgcgatgaacaacgtcaagatcgcatcgtcggaaacgatcctcgagatcgtcaaccacgccatgctgatctgcggcatcatgggctacaagaacggcacgccgttcagcctcggacgacatctgcgcgacgcgcattccgcacaattgatgatttccaacgaccgcatccttggcaacacgtcgagcatgctccttgtccacaagcaggacactagcctactggggtgaacgacatggatatgcagacctcctttctggaccggctcttcgaatccggccttctgatcgacatgggcgtcgacggtctttatggccgcagcggccagttcgaggacgttatcgccgccttcgagcgcctgatcgatcgtttcggcggcgccgatggcgcggaagcgatgcgctttccgcccggcatgaaccgcgagatcttcgagaaaagcggttacatgaagagcttcccgcagctggccggcaccgtacacagcttctgcggcaacgagctcgaccacatgaacctgttgcagtgcatggaagtgggcgacgactggaccaagggccaggaagccaccgagatcgtgctgacgccggccgcctgctatccgctctacccgacggttgcccgccgcggcaacctgccgaaggacggcgcgctgttcgacctgcagtcctattgcttccgccatgagccgtcgcgcgatccggcccgccagcagctgttccgcatgcgcgaatatgtctgcatgggcaccgagctgcatgtcaccgatttccgccagaagtggatggatcgcggtctggagatgatgaagctcgtcggcctcgaggtcaccatcgacgtcgccaacgatccgttcttcggccgcgccggcaagatgatggtcaacaaccagcgtgaccagaacctgaagttcgagctcctgatcccgatcacctcgacggccaatccgacggcctgcatgagcttcaacttccatcaggattccttcggccagaagtggggcctgaacctcgaggacggcagtgtcgcctttacggcctgcgtcggcttcggcctggaacgcatcgcgctggcgctgttccatcaccacggcctcgacgtcaagctgtggccggcctccgtgcgccaggcgctctggggctgagggcaacgatggcatccgtcttcccggggatcagcccggacagctattccccgcatgcgctgcattccatggagcgcatgtggccggagaccaattgctatatcgacctctggatcgaggtgctcagcacgctcgggctcgcgcccgaggcgatgcttggcttcacgctcggccaggatttcgagggcgaccagttcaccttcttcaaggtgccgctcgaggatctggaagcgctctacggcatcagggtcaccgagcttgcgatcttcgacaaggtcgagcggcacgtcgccacgcagattgcgcgcggccgtctctgcctgatcgagatggacagcttctacatgcccgacacgcagggcaccgcctaccggcaggagcacggcaagacgacggttgcgatcaaccggctggatgtcgcgaacaagcgtgtcgactacttccataacggcggcttcttttcgcttgagggcgaggatttcgacgggctgttccagcttgatcttcgtgacgaggatccgcagttcctgccctatacggagttcgccaagttcccggcgacaccggtcgatccgcagacgacgcgcggcgtttcccgcgcgctgctctcctcgcatttcgcccgccgcccacgcgaaaacccgatccacgccttcgcgtcggtgtttccggagcaggtcgaggcggttgccgagcgtcccttcggcttcttccacaagtatgccttcaacacgctgcgccagttcggcgccaatttcgagctcttggccgatcatctggtctggcattcgcaagccgagttcggcgaggccgccgagcatgcgcgaaagctgtcggaggccgcgaaatccgtgcagttccagctggcacgcgccgtcacgcgcaggaagttcgagccgctagcgaccgcgcttgatccggcggccgatgcgtgggattcgatgatggcttcgctcacgaaacgtctttgaagccggaggtctgatcatgcgtgggagactggcgagcatcgcggcggaggagatcgcgctcggcgagggttggaacctggttctgacggaacccggcgcctgcgccaatccgcacgacctgccgctttccgcccagttcatccccgccgatgtgcccggcacggtcgccgccgcgctcgagagagcgggtctgttcgatcgcgaaaaccccgtgccgctcgacagcagggacgcctggtatgtctgccgcctgttcgacgccgcgccgggtgacgccatcctgcgcttcgagggcttggcgacgctatgccatgtgttcttgaacggccaggaaatcctctcgtccgagagcatgttcaccatgcacgaggtgccggtgacgctgtcaggcggcgacgagctggcgctgtgttttcgcgcgcttgcaccccggatcgccgacaacggcccgcgcgcccgctggcggccgcagatgatcacgccgcagggcctgaagaacgttcgcaccacgctgctcggccgcatgcccggctggtgccctgagatccacgccgccggcccctggcggccgatcacgctggttcgccgcgacgtcgtttcgctcgatgacgtcagcgtgcgggcggtgctggagccggatggttcgggcaagctcagcgtgtcgcttcgcaccgacgccgagacacccgatctgtcgctgcgctgcggcggcatcgagcaggcgttcgaaagggtcggcgagcggcattactcggccattctgaggctgaaggacgtggagccctggtggcctcacacgcacggaacgccgcgcttgtacgactacgccgtcgtcgtcgatggcgtcgagcatccgcttggcaagaccggtttccggagtgtggtggccgatcgcggcgccgatggcagcgacttcgcgcttctcatcaatggcgagcgggtgttttgccgcggcgcggtgtggacgacagccgatatcgtgaagcttcctggcgcgcgggcggattatgagccgttcctgcggctggccgccgaggccggcatgaacatgatccgcatcggcggcacgatggcctacgagacgcccgatttcttccagctttgcgacgagctcgggctgatggtctggcaggacttcatgttcgccaacttcgactatccgaagaacgacaaggcgtttaccgcccatgtccacgccgaggtcgaggagttcctgcatggcgtgcagggttcgccatcgcttacggtgctctgcggcggtagcgagatctatcagcaggcggcgatgctcggcctgccgccggaattctggtccggcccgatcaccgacgagatcattccggcgatcgcggcgcggctctgccccgaaatcccctatgtcgccaattcgccctcgggcggtgccatgccgttttcgccgaatgccggcgtgacgcattactacggcgtcggcgcctatatgcggccgctcgaagacgcccgccgcgcccatgtgcgcttcgcggctgagagcctcgccttcgccaatgtgccgcagcagaagacgctgcatcggcatctcgatgtacccccggtgcacagcccactatggaaatcgcgcgtgccaagggatcgcggcgcttcctgggatttcgaggatgtgcgcgatttctatctcggcgaactctacgacctcgatccggcgcgcctgcgccgcgagaaccgcgatctctatctcgacctgtcgcgcgccgtcaccggcgaagtggcggaggagaccttcgcggaatggcggcgcaaggggtcgagctgcaatggtgcgctcgtctggacgcttcaggacctgttgcccggcgccggctggggcgtgatcgattcgaccggcgcgccgaagccgatctggtacgcgctgcgccgcgcatttcggccggtgcaggtgctggtgaccgacgaggggaccaatggcctcgacgtgcatgtgatcaacgagaccgaacacaatctgcagctcgatctcgaggtcgtctgcttcagaaacggccggcagcatgtggcgagcggcgggcgcatcctgacgcttgcgccgcgcagcacggaaacgtttgccgcgaccgacctgttcggtgccttcttcgacaccacctacgcattccgcttcgggccgccggcgcatgacgtcacggtggcgcggctcaggcttcccgaaggtggcgcggtggtggcggatgccttccatttcccgcaggggcgctcgaaagccgtgcacgatgccgagatccaggtctcgctggtcgaggatggcggcgcgtggttcgcggatctcgccaccgacaggctggcgcagtcggtgcatttcagcatcgacggttaccggtccgacgacgactggttccatctggcgccgggtgcggccaaacgcgttctcctgcgcccgctctccgcacgaaacgcggaggaaaagcccgccggcgacgtgctgacgcctggtggcgcgcgtgccttttcgttctaggcgcgcgcgtcgcgaaagatgaggcgcaatcaatttcgaaagactttcttactaatatgggccgtctggaatggcctgaagcggatacggtatgtctaagggaattattgcgaattctgtgatgaacggcgcggcgggcatgctgctcctgataacgggattcctgtcttccatcatcaccgcccggctgctcgggccggaggcgaacggcatcatcgccttctcgctctggctcgtggtcaccggcgcgtcgatcgccgagctcggctccagcatcaccttgtcgaagacgctgccgcagttgcaggcggagggtttcgatgcgcgccggcggctaggcttcgcctcgctgctcgtcactgtcatgctgtgctcgacgctgtttttgcttggcctctacgcgctgttcttcctgacctcggagaagatgcactgggcgaagacgacgccgtcgatcgcctatgtgacggcggcactgttcttcgtgcaggcgatcgggtccttcgtcaaattctatctcatcggtgagcggcggctgaccgatttcttcaagctcgccatgggcgtctgcctgctgcaattgatcggtgtcggcgccggtgcggtgctctatggggtggagggcgtgctggtcggctatctgctcgggcagatggtgttcttcatcgccaccatcccgatcctgatgacgccgcgtgaccgctgcggcgttccgctgaagtatctcgccgcctcctccatgctgctctcggcgcagttcctgatcgattccatcttcctcaacaggctggagctcctgttcctgcagcagttctggtcggtcgagatggtcggcttctatgccgtgggtctgtccatcgccaatatcgcgctgcaattgccgatccagatgacggggagcctgcttccctattattcggagcgacgccattcgagcgacgaccgcagcctgccggtcgaggtgttcgcggcggtcacccgcagcatggcctatattatcctgccgatgagcctcgggctcgccgccatatcgagcgagctggtgcgcgaagtgttcggcgaggcgttcgcgcgcagcggaaccgtcgtggcgctcctggcgctcgccgctccggcctacaccttcatgcagacgctcagcctgtatctgctgtccatggaccgcgcccgcgaccggctgaaagtcagcgtcgtcgccgccgtggtgatgacgctcggctgcctcgcggtcgtgcccttcttcgccgccgagggcgccgcgatggtgcgcatcggcgtgttcacgataatgtgtatcctcatggtgcggctgaccggattcggctcccagctctcgggtctatatgtcacgttattcaagacgctcgcggcggccgccttgtgcgcagttatagcccttggaattttacattatatcaacggttctattggacttgttctcgcagtcgttattgggggcgctggatatattgtcgcgctcaagcttttaaaggcaattccgcaagaggatgccgatgttatgttgtccattgtcaataaattgccggcctcgatgagaaaatccgccagcaaggccatcgccttcgttgcgccatcgagcaagacggcgcaggaggagcccatcgaaatcacggtcgaaaccggtcttgccgaaggcgccggcaacgaggccgcccttccatttgccttcgatggcacgatcggcctgttcaagccggaaaatgcgggcgtcgcgaagcgctccaccgccgtgctcttcgtcaatccctgggggcttgaagaaatgtgcagccggcggttcttccgtgtcacggccgagcatttcgcagcccttggcgtgcccagcctgcgcttcgactatcccggcgccggcgatgcgctcgatatcgacgacacggtcggcctcgcggtctgggaagacgcgatccgcagcgcggccgcgcggctgaagcatttgagcggctgcagccgcatcatcatcgtcgcgcaggggctcggtgcggcgctggcgcagcgaaccgcgccgtcgatcgaaggcgtcgatgccatcgccctgctcggtcccgtcgtcaatggccgtgcctatctgcgcgagcttcgcgcatgggcgacattcatcaatcatcacctgggattgggcgaggatgccattcccgagggcaagcacatgatcgccgggctgcagatgcccgatggcatcgccgcggaactgtcgaaggtgcgcatcgccgcgccggaaacccttgccgccccccgctacctcattctggaacgcccggagcgagccgacgacacgacgcttgccgacaatctgaccgcgcttggtgcgacggtcgagcagcagacgttcaaaggctatgacaggctgatctcggacccggtgttctcgcggacgccgatggaggtcgtcgagacgctggcgcagtgggtgggcgaacacacgtcggccgatccggccgctacgccttcggccacggcggtcgatgcccagtcgatctcgggcgacggcttcgaggaagtgccggtccgtttcggcgcgttcaatcatctcgtcggcatcgtcacgcgtccggtcgggcggccgcgcggcaatagcgtggtgttcctgtcgacggcctatgaccgccagtccggctggggtcgcgcgatcaccgatatggccagggggcttgcccgcgagggcgtcgcctcgatccgcttcgattccgccaatgtcggcgacagcccgccgcgcccggatgcgccggatcagatcctctattccgccacccagaatgccgatgcgcaggcggcgctcgatctgctcgagggcatggtgccggggccgctgatggtcgcgggccgttgcagcggcggctatgtcgccatccgctcggccgtcgacgatgtcagggtcaaggccgccgtgtcgatcaatcccttcgtctattactgggatccgaaccagccggtcgagcgcaagcatgtcgtctcggtgccgcgcagcttcgaggattacggccagcggctttccagcttcgccacggtcaagcgcctgctcaagggcgatatcgacgtgatggcggcgacgcgcaatgtcatcatcgccttctcacgccgcatgtcggtgcgcatcgcgccgctgctcgaatatcttccaagccgccggcacacggcgagcgaggtgaagaaatccttcgtcaccgtcggcaagcgcaaggtgccgctgacgctgatctacagtgaaggcgatgtcgggcttgagcacatgtacttccacttcggccccggaggccgcaagttcgatcgccatccgaacgtccgcctggtgatgctgccagaggccgatcacaatctgacgccgccggaatcgcgcaagacggtgttcgccgagatcgcgcgactggcgaaagcctgagcgcggccaggcggcccgcgctcgctggtttcggatcggccgattgttcggcttgtcgagggaaaaggtgccggctgtcctagccgatgagctcttcatagacgccgatgtaacgctccgcgacgacgtcccaggaataggccgaagcatcggagagaagggcagcccgcaccgccgggccctgcgcttccaggcgcttgtaggccgtttccagcgcgtccgccgcggccgccgtatcggcgaagtcggtgagcaggatgtccttgtggcgcgcgccgagcgtcctaaaggcctcattcgtgttgagcaccggcagcaggccggcgctcatggcttccagcgccaccagcccgaacccctcataggatgaggccgaagcgaagatcgaggcgtcggcgatgatgcgcccgaccgcgtcgttgtcggcgccgacatggagggtgacggcgtcgttcagctgcagccggtcgatctgggccatcaggtcctgccgtgtcagatcggattcgacgccggcgatatcgagatgccagtccggatcgcgcgccttcagcacggccatcgcatcgatcagcctgtcgaggcgcttgttgaccgaaaaccggccgatcgtgacgatccggcgcttgggcgcccgcgacgcgcggtcggcgaacttgccgatgtcggcgccgttttcgatgacgatggtgcggctcggcgcgatcttttcgaactgcgcgagatccgacatgctgcagccgatgacccgctgataggccatggccgagaggcgggtgatggtctggaaccagatcttcttgatcgccgcgtatttcgtcgtgtggaagaagccgccatgggtggtgaccaccatcggcttgcgatgcagcagccggccccaggcgagcgcatcgaagaagaagtcgatggcgtgcacatggatcaggtcggcgtcgctaagatgacgaaagacctctggcgcgagcggatagcgggtgctgcccgaccaggggatgcggatgatgtcgatgccgtcgatggtctggcgtgacggcagctttttgtcgcgggcggtaaacaagctgtcgagcgtaacgacgcggacgcggtagccgcgcttcagcgtctggcgcgagaggttggcgatcacgtcctcgaggccgccgcgattgggcaggaattggcggatgacgtgaacgatcagcggcgcgctggcggcgaccggttcggcgtcatgggtatagagttcggcggcggacatatgtcattccttcggccgcgattgctggtcgcggctttcatcgatgccacatgacaaccgcccgcgttaaggcggcgttaaatgtccgcctccccggggttttgcctttgcggagagttaaccgaccgtgacccggtctcagaatgcccggaaggtgagcgtggtcagcgagcggacgatgccgggaatgctggcgatctgatcgttaacgaatttcccgatgtcctcgccttcctggatatagaccttgagcagcaggtcgtagtcgccgctggtcgaataaagctccgagacgcgttcggtcttgtagatggcgtcggcgacctcataggtcttgccgggggcgcactggagctggacgaagatcggcttcatgggaatttcctgcatcgaattctgttgcgccgcataatgctcgaaagcacccgcccggcgcaagccatagtcttagagagtggcctcgcgcacgatccagtcgcggaaggccgaaagcggggcgtaatcggcgcgctcggccgggaaggccaggtaatagcgctccttgctctccatttcgcgattgactgatgccacgagatcgccgcgcttcagctcgtcctcgatcaggaacgtcggcagcagcgccacgccgaggccggcgatcgctgcctgggcggccgtcgcgaactggtcgaacagcatgccgtgaacggtctgcggcggcaccccgttgtcggcgaaccattgttcccaggcatcggggcgggtggtcagatgcagcagcggcacatcgacgaggtcggatggctggctgatgccgtaccggtcgcggaaatcggggctgcaggcgggcacggtcttttccgacatcaggaagctcagctcggcgcccggccagagcggatgaccgaagtgaatggcggcgtcgatcgaatccagacggaagtcgaaggaggagaggcgggtgacgaggttgatggtgacgccggggttggcggcgaggaagcggccgaggcgcggtgccagccagcgtgtgccgaaggtcggcaagatcgccaggttcagcgtgccgccgtgcggattggcgcgcaggttcaaggaggcgctggagatgcgccgcagcgcctcgcggatctcgcgggcatagccgtcgccggcaagcgtcaggcgcaccgtctggcgttcgcggatgaagagctcgacgccgagctgctcctccagcgtcttgatctggcggctgacggcgctctgcgtcaggtcgagctccttggcggcggccgtgacgctgccggtgcgcgataccgcctcgaaggcggagagcagcgcggtagagggtagaaaacgccttgacgtcagcatgggtcattccatttcagaatgagctatttccgaaatgtcgatatttatggctttcgggcgcttgtaaatagcttcactaatcaaaatcggaatgaacgtggggatctctttcatggcaggcttcgtttccacagaccgcatccgctcgctgttcaccgaagcgatgtcgcggatgtatcgcgccgaggtgccgcaatatggaacgctgctggaactggtcgccgacgtcaatgccgaggtgctggccagggacacagcgctccgcgagcgcctgacgcgggccggggagctggagcgcatcgatgtcgagcgccatggcgccatccgtctcggcacgcccgaagagctcttcaccatccgccgcctcttcgccgtcatgggcatgcagtcggtcggctattacgatctctcggtggccggcgtgcccgtgcattccacctgcttccgcccggtcgaccaggcggcgctcagcgtcaacccgttccgcgtcttcacctcgctgctcaggctcgaactgatcgaggacgaggctctgcgcgccgaggccgccgatattctcgcgaagcgccgcatctataccgcgcgtgccatccagctgatcgagcgtcatgaagcggccggcgggctgacggaggcggaagcgcaggaattcgtcgccgaggcgctggagaccttccgctggcatggcgaggcgaccgtgacggccgagacctacaagcgcctgcacgacgcgcaccggctgatcgccgacgtcgtctccttcaaggggccgcatatcaaccacctcaccccgcgcacgctcgatatcgacgccgtgcaggcccgcatgccggagcgcggcatcacgccgaaggccgtcatcgaagggccgccgcgccgcgattgcgatatcctgctgcgccagaccagcttcaaggcgctggaagagacgatcgcctttgccggcgagaccgagaccaacaagggcacgcatacggcccgcttcggcgagatcgagcagcgcggcgtggcgctgacggccaagggccgggcgctctacgaccggctcttggcatcggttcgcggcgaagtgcaggttggcgctgccggcgccaaggctggcgattacgacagcgagcttgccgaacggttccgcgaactgccggacagctgggcggcgctccgggccgagcaactggccttcttccattattccgcgacgcccaagggcgttgccgcggccgtcgatggcgcgctgcccgatgatgcggaagcgctgatcgagatgggttatctcaccttcgatcccatcgtctacgaggacttcctgcctgtcagcgcggccgggatcttccagtccaacctcggcacggaccagcagcagaactatgccacccgctccaaccgctcggccttcgaagaggcgctcggcgccaccgtcacggatgagcttgacctttacgcggaacgtcaggcacgctcgctggaagcggcgatcgatctgctcgggctttccggcctgcggctgagcgacgtcgcctgaatatccgcgaacggagcccccgatgctgaatgatccgcgctcccatggcctttgggaaaagaccgcgccgcagccgccggcaacggtgccgcttgcgggcgctgtaaccgctgatatcgtcgtggtcggcggcggctataccgggctgtcctccagcctgcacctggcggaggcgggcaagtcggtcgtgctgctcgaggccaacgaagtcggcttcggcggcgcggggcgcaatgtcgggctgatcaatgccggcatgtgggtgatgccggacgatcttcccggggtgctcggcccggtctatggcgagcgcctgctcgacctgctcggcaatgcgccgaagctggtgatggagctgatcgacaagcacaagatcgcctgcgagctcgagcgcaacggcacgctgcatgtcgccgtcggcgccgatggcctcaaggaaatcaccgatcgcgccagccagtgggcggcacgcggcgccgatgtcagattgctcgacgccgccgagacggcacgacgcgtcggcagcagcgcctataccggatcgctgctcgacatgcgtgccggcacgctgcagccgctcgcctatgcgcgcggcctcgcgcacgccgccgtcaaggccggcgttgcgctgcatacgtcgagccccgtcatcgccaccgagaaaaacggcagtcgctggacggtgaggacggcgaagggttccgtcaccgccgactggatcatcgtttcgacggatgcctacagcaccggcccgtgggaacaggtgcgcaacgagcaggtgcatctgccctatttcaacctggcgacccggccgctcggcgataatctgcgcaagtcgatccttgctggccgcgagggcgtctgggataccaaggaaattctctcctcctaccgcatggaccaggccggccggctggtgttcggcagtgtcggcgcgctgcgcaacacagggctttccgtccacaagggctgggcgcggcgcgcgctgaagaagctcttcccgcagcttggcgaggtcgagttcgaatgcgagtggtacggcaagatcggcatgaccgacaatgcgctgccgcgctttcacaagttcgccgacaatgtcgtcggcttttccggctataatggccgggggatcgcgccgggaacggtgttcggccgcacgcttgcccgccacatcctgggcgagatggccgaggccgagctgccgctgccactgactgatcccgccgagccgcgcttccgcgccgcgaaggaattatggtacgaagccggcgcccaggtcgcccacttcgccgatgcccgcttctaagaacaataaggttggaaccacgacaatgaccatcgaaacgctcgatctcgccaccgaaaccaagaccctcatgtccaagctcggcgttagcgccaccagctttaccggcggcacgctgcgggtgacgtcgcccgtgacaggcaaggaaatcggcgcgctgaaggaagtgtccgtcgccgacgccaagaccgcgatcgataatgcccacaaggcgtttctcgaatggcgcgccgttccggcgcctaagcgcggcgagcttgtgcgcctgctcggcgaggagctgcgcgcggccaaggccgagctcggccggctggtgtcgatcgaagtcggcaagatcacgtccgaaggcctcggcgaagtgcaggaaatgatcgacatctgcgatttcgccgtcggcctgtcgcgccagctttacggcctgacgatcgccaccgagcgctccgagcaccggatgatggaaagctggcatccgctcggcgtcgtcggcatcatctcggccttcaacttccccgtcgccgtctggtcgtggaatgcggcgctggcgctggtctgcggcaattccaccgtctggaagccgtccgaaaagacaccgctgaccgcgctcgccacgcaggcgctgttcgaaaaggcgctgaagcgcttcgtcgccgaaggcggcaccgcgccggccaatctctcgacgctcctgatcggcggccgcgatgtcggcgaggccttggtcgatcatccgaaggtgccgctcgtctcggccaccggctcgactgccatgggccgcgccgtcggtccgcgcctgtcgcagcgctttgcccgcgccatcctcgaactcggcggcaacaacgccgcgatcatctgcccgacggctgatctcgacctgacgctgcgcggcgtcgccttctcggccatgggcaccgccggccagcgctgcaccacgctgcgccgcctgttcgtgcatgagagcgtctacgacgcgctggttccgcgcctgcagaaggcctacggctcggtcagcatcggcaatccgctggaggctggcacgctggtcggcccgctgatcgacagccgggcttacagcaacatgcagtcggcgctggagcaggcgaaggctgccggcggcaaggtcaccggcggcgagcgtgtggagaatggtgcctccgacgccttctacgtgcgtccggcgctggtcgagatgcccgcgcagacaggcccggtcgagaacgagaccttcgcgccgatcctctacgtcatgaagtacagcgatttcgacgcggttttggaagaccataacgccgtgccgcagggcctgtcgtcgtcgatcttcaccaacgacatgcgcgaggccgaaaccttcgtctcggcgcgcgggtccgattgcggcatcgccaacgtcaacctcggcccctcgggtgcggagatcggcggcgcgttcggcggcgagaaggaaaccggcggcggccgcgagtccggctccgacgcatggcgcgcctacatgcgccgtgccaccaacacgatcaactacggcaagacgcttcccttggcgcagggcgtcaagttcgacgtcgaataagcctcgcggtcgattgctgcatcgcaggaagggcgataacgtaaccgcgttatcgcctatttcatgacgtgggttcctcatgcatctgacacttgccgccgctgaagccctggttttcgaggtgttgaccagaaaccgggtgagcgaggccaatgcccgttcggtggcccgcgcgctggtggcggcggaagcagccgggcagggcgggcacgggctcaggcgcgtcgaggcctattccagccaggcgagggtcggcaaggtcgatggtttcgcgacgccgtcgcttctgcggccatttcccgccgtggtgcagatcgatgccaatcacggctacgcttatccggctatcgatctcgccttgtccgtcgttcccgatatcgcgcgcgagcagggcatcgcggccgccgccttccgccgctcgcaccatgccggcgtgctggcgctgacggtcgagcgcttcgccgaaatggggctggtggcgctgatggtcgccaatgcgccggcctcgatggcggcatggggcggccgcaaacccgtgttcggcaccaatccgatcgccttcgccgcccccgtgccggacgccgatcccgttgtcatcgacatggcgctgtcgcgcgtcgcgcgtgggaagatcatggcggccaggcagaagggcgtgccgatccccgacagctgggccttcgaccgcaacggccagccgaccacggacgccgtcgaagccctggccggcaccatgatcccatcgggtgaagccaagggcgcagcgctcgcgatgatggtcgagatcatggccggcgcgctcaccggcgccaacttctccttcgaggcgtcgtcgctgttcgacgatcagggggccgctccggcgctcgggcatatgctcatcgtcatcaatccagatgccgccggcggggcggtcgccgccgcgcgcatgggccggctcgccgaagagatcacgtccgatccggatgtgcggctgcccggccggcgcgggcagaacgcccggcgcatggcgatcgagaacggcatcgaggtcgaggacgagctggtctcgctcatccgagcgctctagaatcgttctaaaatataccaattatttcaagcctttgtgatggctcccggggtacgcaaacttgaaattgagtggcaaggaaaatataccgctgccatcatccggatatcgcaggtgaatgccatggagggcatcatgaccgtctcccttagtcgcctctcgcatgccgccgctctcggcgcggtgcttttcgccgcgatatcgcttacttcgggcgccgtggcgcaggaggacgattcggaggggatcgtcgtctacaacgcccagcaccaggctctcggccaggagtgggtggacgccttcaccaaggagaccggcatcaaggtgacgatgcgccagggcggcgacatgcagttcgccaaccagatcatccaggaagacgaggcttcgcccgccgacgtgttcctcacggagaattcgccggcgatgacgctggtcgatgccgccggcctgttcgcgccgatcgacaaggaaacgctcgaccaggtgcccgagcagttccgctcgaagaacggcatgtggaccggtatcggcgcgcgctccacggtgtttgcctatgacaagacgaaactcagcgaagacaagctgccgaagtcgatgctcgatctcgccgatccggcctggaagggccgctggggcgcggcacccgtcggcgccgatttccaggcgatcgtcagcgccttgctgcagctgaagggcgaagaggcgacgtccgcctggctgaaggcgttgaaggaaaacggagtctcctacaagagtaacaccgtcgccatgaaggccgtcaacgcgggcgaggtcgaaggcgcgatcatctatcactactactggttcggcgatcaggcggggacggccgaaaacagcaagaacgtggggctgtactacttcaagaaccaggatccgggcgccttcgtcagcctgtcgggcggcggcatcctgaaatcgagccagcaccagaaggaagcgcaggcgtttttgaagttcatcaccggcaaggccggccagacgatcctgaagaacggcacctcctatgagtatgtcgtcggcaagggtgtcgcctccaacgacaagctggtgccgatggacgagctgcaggcgccgaaggtcgatgcctcgcaactcgacagcaagaaggtggtggagatgatcaccgccgccggcctcatctgaccggctgtccttccgtccctggcgtttcgggcgaaaactattgcttttggctcaagaaaaccttagggcaagacgataaagggcaaccgctttaaacggcggttgccttcctttttcagcgtgtcagaggcggcggtcttgctgcaggacaacagatttctcaacgccggcccgaacgcgccggcagcccggccggcgctgaagctggcgccgccgcgtcggcgcatgccgtacacgcctgtcgtcgccttcgcgaccatcgttgccctgttcagtctcattcccctcggcttcatcgcctggatcaccgtcgatgtcggctgggaaaccgtgaagcaactggtcttccgtccgcgcgtcggcgagctgctcgtcaataccgtggctctcgaagtcatcaccgtgccgctggcgatcgtgctggcggtgacgctcgcctggatcaccgaacgcaccgacgtgcccctggcgcggctctgggcgtggcttgcggtggcgccgctggccgtacccgccttcgtgcattcctatgcctgggtcagcctggtgccggggatgcgcgggctgcagagcggcgtcttcgtttcggtgctcgcctactatccgttcctctatctgcccgtggcggcggcgctgcgccggctcgatccggcgatcgaggatgccgccgcctcgctcgggctcggaccctgggcggtgttcttccgcaccatcctgccgcagctgagacttgccatctgcggcggctcgctcctgatcgccttgcatctgctgtcggaatacgggctcttcgtgatgatccgcttcgacacgtttgcgaccgcgatcgtcgatcagttccagtcggcctataacagcccggccgccaatatgctcggcggcgtgctggtcgccttctgcctgcttctgctcgccatcgaggtgctggtgcgcggcaacgagcgctatgcccgcgtcggctccggttcggcgcggccggccgatcgccgccgcctcggctggtacacggtgccggccatgcttctgcctctcgtcgtcgcggcgctgacgctcggcgttcccttcgtgacgctggtgcgctggctctatctcggtggcgccggcatctggcgcgtcgaggtcggcaatgccttcgtccagtcgatcgtgctggcgctcgccggcggtatcctggcgacgatcgcggcggccccgatggcctggctgtcggtgcgcgcgccgggccgcgtgcagcgcgttctcgaggcctgccactactatgtcggctcgctgccgggtgttgtcgtggcgctggcgctggtgacgatcaccgtgcggctggtgctgccgctctaccagaccttcgcgacgctgctgctcgcctatatcctgctcttcctgccgcgcgccatggtcggcctccgggccagcatcgcgcaggcgccggtggagctggagcgggcggcgatggcgctcggacgcacgccgggccaggcggtgcggcaggtgaccatgcggcttgccgcgccgggtgccgctgccagcatcgcgctggtggcgctcgggatcaccaacgagctgacggcgacgctgatgctgtcgcccaacggcgtgcagacgctggccacgaaattctggtcgctcaccagcgagatcgattacgtcgccgccgcgccttatgccttcatgatggtcgtgctgtcgctgccgctgacccttctccttcatgctcaatcgaaacggaccgccggacaatgacgctgcttacgatcgaaggtgccagcaagcgttacggtcaggtgcaggcgctcgatactatctcgctcgacgtgacggcgggcagccgcaccgccgtggtcggtccctccggctcgggcaagacgacgctgcttcgcatcatcgcgggcttcgagcagcccgatagcggccgcgtcatgcttgacggcgagctcctggccgatgggccggccgccgttccggcgcacaggcgcggcatcggcatcgtctcacaggaaggcgcgctgtttccgcatctcgacgtggccggcaatatcggcttcggcatcgcgcgcggcgctgataaccgcgacaagcgggtgctcgagctgctcgacatggtcgagctcgatcgcggcatgctgacgcgtcgcccgcaccagctctccggcggccagcagcagcgcgtggcgctggcgcgcgcgctcggccgcgaaccgcgcctgatgctgctcgacgagccattctcggcgctcgacacgggcctgcgcgaaaacatgcgcaaggcggtggcccgggtgctgcaggcggccggcatcaccagcatcctcgtcacccacgaccaggccgaggcgctctcctatgccgatcaggtggcggtgcttcgcgacggcaggctggtgcaggccggatcgccgcaatcgctctatctggcgccgcgcgaccgcgagacggcgctgtttctcggggatgcggtgatgctgccggcgatcatccgcaacggccatgccgattgcgcgctcggccatgtcgcggtcgacagcgagcatcagggcaaggtcgagatcatgctgcggcctgagcagatccgcgtcgtcaccgacagcagcgagcagccttatggcgggcgcgtggtcgaggtggatttcgggggcgcgacctgcacggtcgccgtatcgctcgacggcgtggcgctgccgccgatcctgatcaagacctccagcgtggcgctgccttcgcgcggcgatcgggtgcggctggagatcgccggcaaggcgcatgtcttcgcgcgctgagccgtctttgcatcatggcgggcgtttttcgcgcccgcccgaaaccgccgatcaggcgatcgtcattcaggcgaacttgcgctcgtcgttttccgcctcgtcttcgagccagccgccggtaaagccggcgcgcgtgaggccggtgcggatgacgtcggacttgcgcatcaggctccagacgaaatcggagcggtcgttttcgatcgacatgacgagcagtccctggtcgatgccgacgcagcgatcgtccacccagccctcgggtcccgccgtcttcaccgacgggttgaaaccgccgggaaagcgcccttcaccgcagaggttgtgataggtctgcagcagcgcgcgcgtgcccgagatcgccgcctcgcggtcgtagggcagcgacgccagcgcgcaccagggcgccagcgtgccgtcgtcggggccaagcggcgcgccgcgggcggcgtagccgagcacgttcgggcgccggtcgccatgacgtctgcgtgatggcggcgggccgtcggaggcggaaagaccccagatatccctggaatagccgacgaaattgccggggttgcgctcggcgtaatcgcgctgcacctcgatgcagatctgcgtgttgcggaaataatcgctgtcgcgcgccgccatcggcttgtcgcggatgccgcgaaaatcgatccaggcatgcgagaagaggtggatgaagaagggaccggcgtagagatagcacttgtcgccgaacagcatccaggaatagctcgaggtgaaggcgtcgtagcttgattgcgggatcggatgcgtcggcgaagcgagcgccagcgtgtagagcagcaccgcctcgtcatagccctgccagcgccagcgcaggaagccgctaccgggcttccagcccatgcagacggtctcgcccttgttcagcgcccagcgccagtcgatgcgctcgtagatcagcgtcgcgagacggcggatctcggtctcggcctcgctgtcgccatcgaaataggcggcggccgtcagcacgccggccacgagcagcgtcgtgtcgatggtcgacagctcgctgttccaggcgcggttgccggtgtccatgtgcaggaagtggtagaagaagcccttatagccgatcgcgtggcgctcgcggccctggtggccgttggcgaagaagcagagcgtcgtcgtggtgcgcgatatcgcatcggcccgcgtcatccagccgcgctcgacggcgaccggataggacgacagcgcgaagccgacggcggcgatgctgcagggcacgcccgcgaccgaggtgtcggcgatgagcccgttatcgggattggcatgtttcaggaagtagttgaacgccgcctgctgcagcctgtcgatcagcgcggcatctgtttcctcggtccgttgcagcatgtgctcccgcccaatcggttgtccctggttcagcatggcccctggttcaacatgggcaacagcgatgcgcaaatcaatgtttcttgagggtccggcgcggcggagcggtcaccccgccgccaagctcaatcccgataggccgccgttcccggaatgacctcgtagggtaccttgaacaccttgtcgtcgaactgcacgccggtctgaacgttgaacaccatgacggaggtgtccttcccctggttgtcggtgatcgtccactggcgcaggtcgaaggtcttcggatcgaacatcatggtgatggtcgagttgccgaacaccgtgctgttgccgagcgcgatggtcgtcaggtcggattcttccttgacgctcttcaccgagccggccgacagatcgatcttctgtgccagaagcaggctgagcggcgtcttcgacagcgggtagaggtcccaggtcttcagcttcatgttgccgatcgccacgttcctgccgtcggcgatgacgcggatcggcgacgggtcgtcataattgaagcgcagcttgccggggcgctggatgaagaacttgccgccggtctgctcgcccttggggccgaactgcacgaactcgccctgcatcgtggcgacggaggagaaatgatcggcgatcgcctgcgcggtgttggcgctgggcgcggccgcggcctgggcgaagacgttgagcggcagcgccgtggacgccgccgcgacagcaagcgcgcccagcatgtggcgccgtgtcagcgtgaggcggtccaggaaagtgtcggagtggttcatgaaagtctcctttatgcagtctgcatgctgccgaaacgcggcgtcttcatggcgtgttcgcaggaccggccaaaggtaacgttttcgcaccgatcaggtttccgtgaagtcccggcccatacgagataaatcggaacgccggcgcgggaatcaagggcgctttcgcccctagcggtcgagaatatcgccttccgtcggcaccaggatttcgcgcttgccggcgtggttggccgggccgatcacgccctcctgctccatgcgctctatcagcgatgcggcgcggttgtagccgatgccgagacggcgctggatgtaggaggtcgaggcctttccgtcgcgcaggacgatggcgacggcctggtcgtagggatcgtcgctgtcggcgaggttgccggtgccggcggggccgccgccgtagtcgccgtcctcgtcgtcatcggcggtgatggcgtcgagatattgcggcgcgccctgcgtcttcagataggcgacgatgtcctcgacttccatgtcggccacgaacgggccgtggacgcgctggatgcggccgccgccggccatgtagagcatgtcgcccatgccgagcagctgttcggcgccctgttcgcccaagatggtgcggctgtcgatcttggacgtcacctggaaggagatgcgggtcgggaagttggccttgatcgtgccggtgatgacgtcgacggacggacgctgcgtcgccatgatgacatggatgccggcggcgcgcgccatctgcgccaggcgctgcacggcgccttcgatgtccttgccggcgaccatcatcaggtcggccatttcgtcgatgatgacgacgatatagggcagcggcttcaggtcgaactcttccgtctcgtacatcgcctcgccggtctcccggtcgaaacccgtctgcacggtgcgcgagatcgcctcgcccttggcgagcgcctgctcgacgcgggaattgaagccgtcgatgttgcgcacgccgatcttcgacatcttcttgtagcgctcttccatctcgcgcacggtccacttcagcgccacgacggccttcttcggatcggtgacgacgggcgagagcagatgcgggatgccgtcatagacggagagttcgagcatcttcggatcgatcatgatcaggcggcactgctccggcgtcatgcggtagagcagcgacaggatcatggtgttgatggcgaccgacttacccgagccggtggtgccggcgacgagcagatgcggcatcttggcgagatcggcgatgacggcttcgccgccgatggtcttgcccagcgccatggcgagcttggccttggaggtctcgaagtctctggaagcgatcatctcgcgcagatagacggtctcgcggatgttgttcggcagttcgatgccgatggcgttgcggccgggcacgacggcgacgcgggcggcgatggcgctcatcgagcgggcgatatcgtcggcaaggccgatgacgcgcgacgacttgatgcccggcgcgggctccagttcgtagagcgtgaccacggggccggggcgcacatggatgatctcgcccttgacgccgaaatcctcgagcacgccttcgagcatgcgggcattctgttccagcgcgtcggcggacagcgtcgaatcgcgcacgacggccttgggctccgcgagcagatgcaccgacggcagctggaaaccttcgggacggatgaaggagccctgctgctcgcgctccatgcgggcgccgggcttgggccgggcggcggcctgctgcacgcgcggctcggggcgaccgccggcctgcttggcgggcgcgcgcatcatccagccattgtcgtcctcgtcgtcgggcaggatatcggccgggcgcggcggcatgtcgccgtagcccatgtcgtcgtcttcatcgtcgttgagcgagatcgacggcgccgagaccacgcggcgcggcgagccggcccggggagcgatcgacgggtccatcgacggatccatgcgctcgccgcgttggggcgccttggcgcgcaccggctcgttgagcttgccgaactcgtcatcgttgaaatcgtagggcgcgtcgtaatcatcaagcttgcgcttgcgcgggcccataccgagcatgcgccgcatgcgggcctggctcatgtaccaggcatgcgtcagcgcgccgaaggcgagccagccgccctcgtcgtcatcctcgtcctcatcgcccaccgagcgcagcttggagcggctggcggcgtagttctcttcctcttcctcggcttcctcctcctcggtgcggccgatgatgccggcggcaaacagcatcatccagacgcagggcaccgcgaagatgcagccgacgacgatggcgaaggtgccggtcgggtaagcgccgacgaacagcgccgggaagcgcaggatcatgtcgccgatgacgccgccgatgccgttggggatcggccaggtcagcggcggcggaaagcagccgagcacggccgaggacagaacggagccgaggccccaggcggcggcgcgcgccggaatgcgggtgaagcggcggccggagatcagcgccagcgcccaggcgaccacgggcagcagcgccacgacgctcgccagcccgaagaattgcatcaggatatcggcgaaggcggcgccgctatagccgagcacattggtgggctcgttgccggtggcgtaggaatagctcggatcggcgacgttccaggtcgccagtgccgcgattgccagtgccagcgcgatgaagatcgcgaaccccaaaagggtctgcgcctgccggaagatgaaccccgagagggagaaacggtccggccggccatccattgctggcgatgtgcttcttgccatgtgttgtacccgtccaatgcctgaaagcgtgcgaatcgccaatgcacttcgcgcccaatgcgtccgctccacctaatcaaaggacggttaaagcgatgttaaccatgcggggtccgtcccaggcatgtcgcgcgaaagcgcgcggcggtttcgcggcaacgacatgcgataaaacaagggcttaaagcctgacgggcgaatccttgggggcgcgacgcgcgcccggcatcggaaaataaaaaggcccgaacctttgcgaggtccgggccaggagcggcataagtgttgatcaggccgtgacaggctgttcggcggcgccctttgttcgggcgccgcaagccttgattacgagtggtaggcggcttcgccgtgcgttgcgaggtcgagaccttcgcgctcggattcgaccgggacgcgcaggccgacgataacgtcgacgaccttgtagaggatcgccgagccgatgccggaccatacgatggtgatggcgatcgcggtgatctgcgtcatgacctggccgcccatggtgacgccctcggcatagccgacgccgccgagcgacgcgctggcgaagatgccggttccgatcgcgccgaacatgccgccgatgccgtgaacgccgaagacgtcagcggtgtcgtcgtagccgaacttgttcttcaccacggagacgaagaagtagcaaagcggcgaaacgatcaggcccatgatgatggcgcccatcgggccgacgatgccggcagccggcgtgatggcgaccagacctgcgaccatgccggacgcgccgccgagcatggaggccttgccgcgggtgagcgtttcaacgacggcccacgacacgacggcggcagccgtggccacgaaggtgttgacggtagcgagcatcgcgccgcccgaagcttcgaggttggagccggcgttgaagccgaaccagccgaaccagagcatcgaggcgccgaccatggtgagcgtcatcgagtgcggcgccatcatgtccttgccgaagccggtacgcttgccgaccatgatcgcaccgatcagaccggcgacgccggcattgatgtgaacgacggtaccgccggcgaagtcgagcgcgcccatcttgaagagcaggccgttggcgtcccagaccatgtgggcgatcgggaagtagacgaaggtggcccacaatgcgcagaagagcaccacggcggagaacttgatgcgctcggcgaaggcgccgacgatcagggcgggggtgatggccgcgaaggtcatctggaacatcgcgaagatgtactcggggatgacgacgccctgcgagaaggtcgcggcggtggaatccttggtgatgccggcgaggaacatcttcgccgtgccgccccagtaggcgctctcggagccgccgaaggcgaaggagtagccgtagatgacccagatgagcatcatcacggcggcgaccatcgtgcactgcatcagtaccgacagcatgttcttggcgcgaaccaggccgccgtagaacagcgccaggcccggcaggatcatgaacagcacgagcagcgtggagatgaacatgaaggcggtgtcgcccttatcgggaaccggcgcggctgcggcagccggagcggccgtcgtggcggcatcctgcgcgaaggcgacgaccggcgcgaggagcgccgcggacgcagtggcaaggcgcgccagagtgggagaaaacttcgaaattgacatagagaaaagctccttggctctaccgttacttacagcgcttctgcgtcggtttcgccggtacggatgcgcacggcatggtcgatcgagtaaacgaagatcttgccgtcgccgatctggccggtcttggccgacgcggcgatggcttcgacggccttgtcgacgatctccgttgcgacggcgatctcgatcttgagcttcggcaggaagctgaccgcgtattcggtgccgcgatagatttcggtatgtcccttctggcgcccgtaacccttcacttcggtcacggtcaggccctgaatgccgatcgccgtgagggcttcgcgcacctcatccagcttgaacggcttgataatggccatcacaattttcatctggtttcccatccttcgttaccctcggcacggagccgactctccttgccactgccgtttgcgaccagcgaccagcctcctacattcaaggcccgtgccagattcgaaacgatttgttaaggtattgaaaaataaggaggatatttattgacgccaataaacaggcaaatgattgcctaatagccgcccaagaaatgcgcaaatggacaaatttgcactcaaattagtcatttgcccttttacgaatcaggccttcctgcgccaccgacgcaatcaggacaccatctcgcgtatagaggctaccgcgcgtcaggccgcgggcgccggatgcggaggggctgtcctgtgtataaaggagccagtcgtcgagcttgaccgggcgatggaaccacatcgaatggtcgaggcttgcgacctggatcgtctggtcgaagatcgaggtgccgtgcgggtagagcgacgtgtcgagcagcgtcatgtcggagatataggcgagcaccgccgcctgggcgtgccggtcgtcggggacgggaccgttggcgcgcacccagacatgctggagcggatcgagtttcttgtcggagaaatagtgggtgagcgagaccggccggatctcgaccggccgctcgcggccccagtatttgcggatcgcctcgggcgcattggcgaggtagcgcttggcgatctcgttctcgtcgatcagcgtttcgggcatcggcacgtcgggcatggcgacctgatgctcgaagcccggctcgacgatctggaacgacgcagacagcgcgaagatcgccttgccatgctggatggcgacgacgcggcgggtgttgaagctcgatccgtcgcggatgcgctcgacctggtagacgatcggcacggaggggtcgccgggccgcatgaaataggcatgcagcgaatgcaccagccgctcgatgtcgacggtgcgctgcgccgccatcagcgcctgcgcgatcacctgtccgccgaagacccgctgccatccgacctgcgggctggtgccgcggaagatgtccacctcgatcggctcgagatcgagcgtcgcgagcagggtttccatcgcggtcggcttttcggtgtggcgcgtcattttgtatggctccggcaggtaggaagtgaggcgatgatgatctatatagatcaataggatattctaaaagaacgggacgggcgttatgcgtgacatgcttgtggttggcggggggtatgtcgggctctccatggctgtcgcggtcaagcaggcggcgccgcatctcgacgtcgcggtggtcgaagcagcccccgagcacgtctggcgcaaggacccgcgcgcgtccgccatcatcgccgccgccaccaagatgctcgacgttttcggcatctggaacgagatcgagccgacggcgcagccgatcaccaagatgatcgtcaccgattccaagacctccgatcccgtccgccccgtgtttctgaccttcgacggcgaggtcgaggacggcaagcccttcgcccacatgatcccgaacgtcgccatggtcggcgcgctgcgcggcgcctgcgaacggctcggcatcgagatcacccacggtctcagcgccaccggcctgaagacgctcgatacccacgccgagatcacgctctccgacggcggcacgatcgagaccagactggtggtcgcctgcgacggcgtgcgctcgcacctgcgcgatctggccggcatcaagacggtgcactgggagtatggccagtccggcatcgtcaccacggtcgagcacgagcgcccgcacaatggctgcgccgaagagcatttcctgccgtccggccccttcgccatcctgccgctgaaggacaaccgctcctcgctggtgtggacggaaacgacggcggacgccaaccggctggtgcgctccgacgacctgattttcgaggaagaactggagcgccgcttcggccacaagctcggcgcgctgaaggtggtgggcgacaagcgcgccttcccgctcggcctgacgctggcgcgcgccttcgtcgcgccgcgcctggcgctggcaggtgacgccgcccacggtatccacccgatctccggccagggcctcaatctcggcttcaaggatgtggcggcccttgccgaaaccatcgtcgaggccgatcgcctcggcctcgatatcggctcgatcaacattctcgagcgctaccaggcctggcgccgcttcgacactttccgcatgggtgtgacgaccgatgtgctgaaccggctgttttccaacgatctcgcgccgatccgcatcgcccgcgacttcggcctcggcctcgtcgaccgcctgccgggcctcaaatcctacttcatcgaccaggccgccggcacgacggcggcgggcaacccgcgcctgctggcaggtgagcgaatttagggcttgatctattcctcgatctcgcgcgcttcggacaccagcatgatcggaatgccgtcgcgtatcgggtaggcgagctttgccttttcggagacgagctcgttgtgctcgcggtcataggtcagtcgccccttggtcagcgggcagaccatcagttccagaagcttgggatcgacgcggctcagtttttcgtccatgcgaccgcttctactgcaaaatcgtgtccgagtcaccgaagacccgggcaagcacgatctcggtgatcgcgatcagcgtttccgcccgtgtcttgaggtcgggcgcctccagcagcgcctgcttttccgccgggccgaagggcgacatcatcgccagcgaattgaccagcgtcatgttgctggcgcgctccacgctctcccagtcggcctccagcttgttggcctcgagataggccttgaaggcggcgagaagggctgcgcggtcgaccgcgtcctcctcgttgcgcgccgaaaaatcggagatgaagggcgcgatgcggaaggtgcggtaaggctggtgcgtctccttctcgtcgagcagccggaagcggcagacgcccgtcagcgagacgatgtagcggccatcgccggtttcggcgaaggaggttatgcggccgacgcagccgacggcgctgagattggcttcgctgtgcttctcgtcgctgtcgccgagcgccggctgcaccatgccgatcaaccggttgcctgcgatcgcggcatcgaacatggcgagatagcgcggctcgaagatgttgagagggagctggccggtgggaagcagcagcgcaccggtcaaggggaagacggcgatcgtgtcgggcacatcgccgctcttcagatatcgtgcattgcccacttgcatcggcactcgtcccgcataatcggcgggcctaaatcacgcgcccgcatccaagggaatgtggggtacgttgccgaaaacgcaagggtcggcggcggcaaagcgcggggcgaaatgtcgcgcgcgcccgcgtgccttaggaaaacaacagagccgaaagcttgcggcgtcccgagacgctggccgggtccttgaagccccagacctcgaagaactgcaacagctgacggcgcgcgccgtcgtcgtcgaaggtccggtccttgcgcatgatgtaaagcagatgatcggccgcttcctcgcgtgcgccctcgacattgcggatcttggcgagcttgatgcgcgcctcgtgatcgtcggggttggcggcgagcgtattttccagcgccacggggtcgccgagcttgcgggcttcctcgatctgttccagcttcttcaccaccgcctggatcgcaggatcggccgccatcgtctccggcagctcgctcagtacctcgcgcgcgcgctcgtgctggttggcggcgatcatgcactgcgccatgccggccagcgccctggcattctccgggtcggcctgcatgacggcgccgtagagctgtgccgcgccattgacgtcgccattggcgagcaggccgtcggcctcgacgaggacggcctcgatctcggcggcctgatcggcgccagcgggaccggccacgcgatcgatgaattcacggatctggctttcgggcaccgcgcccatgaagccgtcggctggacggccgccgacgaaggcgatgacggcggggatcgactggatgccgagctggccggcgatcgagggatgatcgtcgatgttcatcttcacgagcttgatgcggccctgggcctcgttgaccaccttttcgatcacgggtgttagctgcttgcacgggccgcaccagggcgcccagaaatcgacgagcaccggctggttgcgcgactcctcgatgacgtccttgccgaaggtcgccgtcgtcgtatccttgatgtagccgccggccgccaccggtgccggcgccgctgcctgggcgggtgccgcgggcgcgccgccatagctcgccgttgccgacatctggccgaaggaattgctgtaggggttgtcgttgccgctcatgagtatctcccgccgcgccggtcagccggcttttctagcgttaaaatcgtatgtcaggacgtcactttcaagacaagcggcgtatgaccggtcgcttccatgaagcgcacgaggtcggcgcttgcgatcgacgtcgtcgcgtcgttggacagcggatggcaattgataatctcgtccttcatcagatcggcatcaagaacgaatgtgaccttgtgatcggaatcgttgatggcgccgaaggcggtcaccgcgccgggaatgacgccgagatattccatcagcttttccggcttgccgaacgacaccttgctggcggcgccgatcagcgtatgcaccgtcttcaggtcgaccgaggcattttcctcgacggtgagcaggaagaactggtccttcttgtccttcacgaacaggttcttcgtgtggccgccgggaatctcgtcgcgcagcgccaccgattcggccaccgtgaagaccggcgcatgcgtcttggtgctgtgcctgatgccgagcccgtcgagaaaggcgtagagttcggctgcggtcttcggcgtcttctcggtcatggctcgttccagcactctaatgggataaggcgccccctgattacgtctccctccggttttttgcaacgtgcctgttcgccgcttttccctgcatttgcggcattttaggtggggcgggaaaagcttttcaaatttttcttcgcctttccgtcatttccctgttgcatttgaaaatcgtttgggcgatatagcgcccgtcgccgcaaggtggcgcccatggtcctccaaactaccacaggccgtcgggattatgagcgggtgtagctcagtggtagagcacaaccttgccaaggttggggtcgagggttcgaaccccttcgcccgctccaaatcttcccaaccggttgatataattaggatgtgatcgcccggcgatcgtatcgaccggcctcgccgcgcaagccggctatcctcctggatagcaatcccggaagcgctaggcacgtctcccggaccagcgcgcctctccctccattttcttcacgcgcgtccgttccatccatgcggcctttgctctaaagccagtcgaacggaactggaaaaggcagcgcaatgggcttctcgatcaccacctggaacatcaattcggtccggctgcgcatgccgatcgtcgagcagctcgtcctcaagcatcgccccgatatcatctgcctccaggaaaccaaggtgccgaacgagctgtttcccttggcgccgctgaaggcgatgggctacgagcatgtgatcatccatggccagaagggctatcacggggtggcgatcgcctcgcgctttccgctcaccgaggaccatcgtcaggattactgcaaggtcggcgattccaggcatatttcggcggtgttcgagcgcgggggaaagcgcatccgcattcacaatttctatgtgccggccggtggcgacgagccggatcggacgatcaatccgaaattcggccacaagctcgatttcatcgaggagatgaagctgctcaaggccgatggcgaggccaatacctcggcgatcctcgtgggcgatctcaatatcgcgccgatggaacacgacgtctggtcgcacaagcagctgttgaagatcgtcagccacacgcccgtggagaccgaggggctgctcgaggtgatgaagcgcggccagtggctggacctgatgcggcagaacgtgccggagacgcagaagctctatacatggtggagttaccgcgccaaggattgggaagcggccgatcgcggccggcgtctcgaccatatctggtcgtcgcacgacctcgggccgcatctgcagcgcgtcgagatcctgaaagaggcgcgcggctgggaccggccgtccgaccacgtgccggtgacggcgcatttcgatctttaaacgtcgaaaagagcctcaggcgaagcggtgaagctcggcggcggcctttgccgccagggctgcgatattgtcgcggatgcgctgctggatcagcaaagccgcatccggatattcctcgatcagccggtgaaacagcgcgcgggtgatgcggatgatcgccgtgtcctcgcgggcgatcgccgtgaacttgcgctcgaccagcgtcaccagcgcaagctccgacaaaagcgtgccggacccgacaaccgcctgaacctcaggcttgttgtcgcgtccggtgtggctcagttcgacgctgccgctgacgatgacgtaggcgctgtcggcgggagagctttcgcgaaaaagcatctgcccgttggagatcacgcgccgatccgcgccgaaggcgatcagccgcagctgatcctccgacattccgttgaaaagcggaagctgcgccagcagctggatatcgtcattcagcgccatggctacggtacgatcttgtagccgccgttttccgtgaccaggatttcggcgttcgacggatcacgctcgatcttctggcgcaggcggtagacgtgggtttccagcgtgtgggtggtgacgccggaattgtagccccagacttcctcgagcagcacgtcgcgggtcacgaccttctgttcggcgcggtagagatagcggatgatcgccgcttccttttccgtgaggcggatcttctggccgttttccgtggtcagcaacttctggctcggcttgaagacatagggtccgacgctgaaggtggcgtcctcgctctgctcgtgctggcgcagctgcacgcggatgcgggcaagcagcacggcgaagcggaagggcttcgtcacgtagtcgttggcgccggcctcgaggccgaggatcgtatccgaatcggtgtcatggcccgtcagcatgatgatcggcgccttgaggccgcccttgcgcaagagcttcaccgcctcgcggccatccatatcgggaaggccgacatccatgatcaggagatcgatggccgtcgcgcgggcgcgttcgacgcccttggcagccgtggattcctggagaaccgtgaactcgtcatagagcgcgagctgctccgtgagggtttcgcggaggtcgtcgtcatcatccaccaacaaaatggtgcgtgctgtcatgcggctatgtccctcgccatctggtccccttactcctacgccaactttaggatgttggcaaagatcaggataccaagctgttgtcgtatatggtgctatatgatttcaatcactgccccggcaattgcaaaaacatgtgagaaacatggaaaaaacaaggcggaaaccgtctatacaaccaaggatcatcaccgttcgaccgtcaccggggcagaaaagccgggctttgctgcaattcgggacaatcacggtgcccgccgcggttggtcgctcggggcgcaccacacgcaagcgtgaaggcgacggcgccactccgatcggcgaaatgcggctgctttcgggcttcgcgcgcggcgaaagaatctccggcctgcgaacccggctaccgattcgcctgatccgcgccgacatgctgtggtgcgatcagcccggtgacgccaactacaacaggctggtcagggcgccgtttggcaaaagccacgaaaagatgaagcgcgacgacgggctctacgacctctgcctggtcatggactggaacgtcacctcgcgcgtccgcaatcgcggctcggcgatcttcttccacctgatccgccccggctaccagccgacggagggctgcatcgccgttcatcggcgcgacatgaaccggatattgccgcatctgcgcaagggtacggtcgtcagggttttatgaagctggcgcgggcgaggggtgatatcgccgcccgcctgacctatatgcaatgcgaccggcgcccgggctgagaggcgcttcgggaaacggcggcacggtcgccgttcaacacgccccgttccattcatcgctttcgcggagatttattgtggcacagcaatccatcatcacgtttcacgacgggcattccataccccaggtcggcctcggcgtctggcagacgcccaacgacatggcggcaccggcggtacgcgcggccatcgaggccggctatcgccatgtcgatacggccgccgtctatgaaaacgaagagggcgtcggcgagggcatccgctcgtcgggcgtcgaccgcaaggacatctttctcacgaccaagctctggaattcggagcagggctacgagacgacgctgaaggcgttcgacaacagcctgaagcggctgggtaccgattacgtcgacctctacctcatccactggccggcgccaaaccgcgacgcctatgtcgatacgtggaaagccttcatcaagctgcgcgaagagggccgggcgaagtcgatcggcgtctcgaatttctatcctgaacatatcgaacggctgattgcagagaccggcgtcgtgcccgtcatcaatcagatcgagctgcatccggacttccagcagaaaatcgcgcaggaagcgcacaagaagctcaacatcgccacgcagtcctggagcccgctcggccagggcaagctgatcgcccacccggttctcgccaagatcgctcagaagcacggcaagacgccggcgcaggtgatcattcgctggcacatggacagcggcctcgtcgtcatcccgaaatcggtgacgccgtcgcgcatcgtcgagaacttccaggtcttcgacttcaagctcgatggcgacgacatggccgagatcgccaagctcgacagcagcacggcacgcatggggccggacccgaagacggcgacgttctaaggatttgagtcagggcctggagccagctgccggctgctctaggccccgccctgccacgtcttcaccgcttccagcggccagaccagcatcagcacgttgagcgtcaggttgtcgcggatcatgtagccggtgaagagctcgaagaagatggcgagcgtcaccgtcagccagaccggcgcgcgccaggcgaagaagaagccgagcgccatgaacacggtgtccatcgcggagttcaggatgctgtcgccgtaatagtcgagcgagatcgtcgcggtgcgatagcggtcgatgatgatgggcgagttctccagaagctcccagccggattcgatcaccaccgccaggagcagtttcatcgcgatcggcttgccgcgcagcacgagatgcgccagaccgtagaacacgaagccgtggatgatgtgcgacggcgtgtaccagtcggagatgtgctgcgagttgccgctggaattgacggtgccctcccacagcttgacatagccgcaggtgcagatcagcgtgcgccccatcagatattcggcgacgatctgcgccagcagaacggccaggcaggcgatgaaccagaaggtctggttcctggctctctccgccgctccgagcgctgtcactggccggcttctccctcgggcgcgatcgtgtgcttcatgatcagcggcatctgcgccagcgtgaacaggatggtgatcggcatcgtgccccagaccttgaaggcgacccaggtgtcgtcggagaagttgcgccagacgatctcgttcagaacggcgaggaacaggaagaacaggccccagcggaccgtcagcttgcgccatccctcggcgtcgagctggaaggcggcgttgaagacgtagccgagcaatgatttgccgaacagaagcccggcgagcagcgtcaggccgaacagcgcgttgatgatcgtcggcttcatcttgatgaaggtctcgtcctgcagatagatcgacagcgagccgaagatcaaaacgacgacgcccgaaacgaagggcatgaccggcaggtgcttgaggacgatcttcgagatggtgagcgagatcaccgtcgccgccatgaacagggccgtggcgacgaagagggggccgccgagcgaggccaggacggggaatttctcgaccagccaggggccgcgcagattggcgaagaagaagatcagcaacggcccaagctccagcgccagcttgagcatcggatgatgcttgtcggcagccgacggggtgatatcgctttcggtcgtcatgaggtccctaatccgttccctggtgtagtcttgggtctagtcttgatccgcgacgcttgcgcgccgttgcgggcatatctgtggcatcaatcgccattgacggcaatggcaccgcgctgatcgggccgatcagccccgcgcctctcccagccccgcgatcgcctgggcgaaatcctcggcctcgaagggctccagatcgtccacgccttcgccgacgccgatgaaatagaccggcagcttgtgcttggcggagatggcgacgaggatgccgccgcgcgccgtgccgtcgagcttggtcatgatcaggccgttgacgccggcgacgttgcggaagatctcgacctggctcagggcattctggccggtagttgcgtcgagcgtctgcagcacggtgtgcggcgcgtcgggatcgagcttgccgagcacgcgtacgatcttctcgagctcggccatcagctcggtcttgttctgcaggcggccggccgtgtcgatgatcagcacgtcgcatttcttctgcctggcctgctcgaaggcgtcataggcaagccccgccgcatcggcgccgagcttggtgccgacgaattccgacttggtgcggtcggcccagatcttcagctgctcgatcgccgcggcgcggaacgtatcgccggccgccaccatcaccttcagtccggcgccggagagcttggcggcgagcttgcctatcgtggtggtcttgccggtgccgttgacgccgacgaccaggatgacatgcggcttgtggctgagatcgagctgcaggggcttggcgaccggcttcagcaccttggtgatctcggccgccatgatccggctcacatcctcgcccgacacgtccttgccgtagcgttccgacgccagcgtatcggtgacgcgcagcgccgtctcgacaccgagatcggcctggatcaggaggtcctcgagatcctgcagcgtgtcgtcgtcgagcttgcgcttggtgaagagcgccgagatctggcctgtcagctgcgaggaggtgcgggccaggccggcgcgcaggcgctggaaccagttgagcttggccggggccacgatggcgacggattcgggggtcgcggcggcggtggagaagcccttggggaggatgggggcgtcggtgtcggtcggacgtggttcggtggagtcgatagaagctgactcggagggtgcgatacccccctctgccctgccgggcatctcccccacaaggggggagattggctgggcgggatcgctcgtttcatcctcgatcgtttcgtcggttgacggctcggccttgccactctcatcaacatgaggggtctggtcgggagcttcccgcgagtcgatctccccccttgtgggggagatgtccggcaggacagaggggggtatcgcatcctcgacgctggcgacttccgcctccgcctccgcctcggcctccagcaaggacaacggcaccagcccgacatcatcggtcgccagcgccgtcggcaaatcctcggaaacctcgtcctcggcgacatcctgacgatcggccgaaggtccgcccgcggtgtccatctcttccggcagcaccggatcggcggcgagcggcaggtcgtccaccggcgcgggcggcggcgttacatccgcagaggccggtgtctccgcgaccggctcgatcgcgacctcgggggccttggtctcgactgtatccggcgtctgctcttccgccgtcttgtcggggccgaaggtgaagacctttttgatgaagctgaacgccatgagaattccgtcaggtcaggccgcgtcggcggccgtcagttgcatgtcgaggtgcttgccgtcgtggccgatgatatcgacctcgaccagcgcccgtggcttgagccccggtgccgcgacaagcgtgaagttttccgtatgcgccagtccgttgttttccaccagcagccattgccgcgtgcccaccatgccgtcgagatgggactgatgcagcatatgtccagtggcgcgcagccgcgccgcccgttccttgacgagccgccggtcgagctgcggcatccgtgccgccggtgttcccggtcgcgggctgtaggggaagacgtggagatgcgcgatttgcgcgtcctcggcgagcctcaccgcgttgtcgaacatctcttccgtctcggtcgggaaaccggcgatcatgtcggcgccgatcgagatctccggccgcagccttctgacctcgttgacgaattcgagcgcatcggcgctggagtgccgccgcttcatccgcttcaggatcatgtcgtcgccatgctgcagcgacagatgcagatgcggcatgaagcgcgcttcgtcggcgatgagatcgaggagatgccggtccgcctcgatgctgtcgatcgacgacagcctgagacgccggatatccggcacctgcttcagcagcgtcttcgccagcagcccgagcgtcggctcgcccggcaggtcggcgccgtagctggtggcgtcgacgccggtcagcacgatctcgcgatagccgctttcggtaagcttgcgcgcctggtctacaaccgatcccatcggcaccgagcgcgaattgccccgcccataggggatgatgcagaaagtgcagcggtggtcgcagccgttctgcacctggatgaaggcgcgcacatggccgtcgatatgcttgaccatctgcggcgcggtcgccttgacgctcatgatgtcgttgacgcgcagcttctcttcggccgagacgccgaaatccggaagcgcgcggtaactggcgctcttgagcttctcttcgttgccgagcaccgcatcgacctcgaccatcccggcgaaggtttccttctcggtctgcgccgcgcagccggtgacgatgatgcgggcttcgggattgtcgcgacgcgcgcggcggatcgcctggcgcgcctggcgcacggcctcgcctgtcacggcgcaggtgttgaccagtatcgcgttgttgagcccggccttctcggcctcggcccgcatcacttcggattcgtaggtattcagacgacagccgaaggtgatgacctcgaccccactcacttggcgtccgcccccggaacctcggccgcatcgcgccgccacgcgccggttgagggatcgacggtgccggaccattcccattcggccgggccggtcatgaccacatggtcgtcgtcccgccattcgatgacgagcggctgccggctcggcgcggaggcgacgtcgatggtcaccttgcgcccggtgcggccggtgcgcgcggcggaaacgccggcggcgcaggcggccgaaccgcaggcgagcgtcaggcccgcgccgcgctcccaggtgcgggtgcgcaggctgctctcggacgtgacctgcgccagcgtgatgtttgccttttcggggaacatcggatggttctccagcagcggtccgaaacgctccagatcgaagctcatcggatccctgtcgacccagaagatcgcatgcggattgcccatcgacatggccgagggagagtgcagcaccggattgtcgatcgggccgatctgcaactcgatgcggctggtatcgaagaattcttccgacagcgggatcttgtcccactgaaacaccggtctgcccatgtcgaccgagatggtcccgtcctcgagttcgacggcattcaggatgccggcgacggtctggaaggtgaagaccttcttgccggtttcggccgaaagcgcctgcaccacgcagcgcgtgccgttgccgcaggcctgcgccttggtgccgtcgcagttcaagatgtcgatccaggcatcggtgccctcggccttcggatcatggatcgccatgatctggtcgaacgcagtctcggcatcggcattgagcgcgatggcggcctgaggcgtcaccttgtcggtgcgcccgcgcatgtcgacaaccaggatcttgttgccaagcccgttcatcctcgcgaattcgaccgttgcgctcatttgtctctgatccatgtccgttcgggctgtatatggcggaaatgcgtgggaattaccagtgggcggcgcgcggtccatctgcttccttcatcccgtcgcaacggggaaaatttcgcgccatggacaagaaacatcgcgacattatcagcagcatagcgaaattcgcgacagtttttcatccccgtcgcccgcgatcgccacacactgtccaggtcattggacagggagccgggttcgcgaaccggtaacgccaaggttggcatccggcgttcagtgatggttgtcagaggtggatcgaaggccgtcggggcctgatatccatccggcaaggaaaggccgagagacgctcctgtcggcccggacgacccggaaacctcgaagcagccgggcaggcggaccgcctgacacacataccacccatacaatgccgtctgcccgttcccgtttttgggtccgccgccgtcgccgagcttcgctccgcgcggggtttcgtggtgcgcgccgtccaccccatgcaaaagcagcagccgaatacaaaaaggcccgcgcgaggcgggcctttcgaaaccagatcagcagtcgatcacttgaccagattgcgcttggccagcgtgcgcaggcgcagcgcgttgagcttgatgaagccggcggcgtccttctggtcgtaggcgccctggtcgtcctcgaaggtaaccagcttgtcggagtagagcgacttgtcgctttcgcgaccgatgaccatgacgttgcccttgtagagcttcagcgtcacttcgccctcgacatgctcctggctcttgtcgatcagcgcctgcagcatctcgcgctccggcgagaaccagaagccgtaatagatcagctcggcgtagcgcggcatgatctcgtccttgaggtgggcggcaccacggtcgagcgtgatgctctcgatcgcacggtgagccgacagcaggatcgtgccgccgggggtctcgtagacgccgcgcgacttcatgccgacatagcggttctcgacgaggtcgaggcggccgatgccgttgtcgcggccgtaagtgttgagtgctgcgagcagcgtcgccgggctcatgcgcacgccgttgatcgagacggcatcacccttctcgaagccgaccttgataatggtggccttgtcgggtgccgcttccggcgagatggtgcgcatgtgcacatattcgggcgcctcgacagccggatcttccagaaccttgccctcggaagaggagtgcagcaggttggcgtcgacggagaacggcgcttcgcccttcttgtccttggcaaccggaatctggtgggcttcggcgaaggcgagcaggtcggtacgcgacttaaacgaccagtcgcgccaaggagcgatgatcttgatgtcggggttcagcgcgtaggccgagagctcgaaacgaacctggtcgttgcccttgccggtggcgccgtgcgcaatggcgtcggcgccggtcttcctggcgatgtcgatcaggtgcttggagatcagcgggcgggcgatcgaggtgccgagcaggtagacgccttcgtagacggcattggcgcggaacatcgggaagacgaaatcgcgcacgaattcctcgcgcacgtcctcgatatagatctccttgatgccaagcatctcggccttcttgcgcgccggctcgagctcttcgccctgtccgaggtcggccgtgaaggtgacgacttcggcgttaagctcggtctgcagccacttcaggatgatcgaggtgtcgagaccgccggaataggcgaggacgactttctttacgtctttgtgcgatgccatgatgatgagatccgttgtgccaggagggtcgcggccagccgcaagacccggtatcgccgggcacttttagcgagattgacgccggacgcaagggcaaggacgtcgagaaaccgggccgctagaggtgctttgcgatgttcatgcgacgatgcaggatgcggatgatggtgagttggtcgccgaccgcgcgatcgctgagacgaattgcctgatcatcgagcgcgtcgcacgcgttttgcctttatgaatgcatcgaaatcgaaggggcgcggaacgcccgattgctcaccctccatgatcgccgcctcgatcgcatcacgctcggccttgtgctgcagcacacgcaatgccgcatcgacgacctcgtcgacggaaccgtaattgccgtcccgcaactgtgtatcgatgaactcttccatctgcgcgtcgaggcggatcgtttccagcctgcccatgcgggagctcctagcggatatatttgcgatgcacctctttcaggaatgcctcgccgtcaaattcctccggctcgcctgactgctcgccctcgatgatggctgcccggatcgcctcgatctcggcctggtcgcgcaagagctgaaggccgtgatcgatgacttcgcccgccgaggcgtaacggccatcgccgagctgctcttcgatgaaatcttccatgcgatcatcgatcgttaccgacatgaccctgatcatctaggctcccgcgatccgcttgccagtggtttgacttgcccttcgagattaccatatctggccgcgagcgaacaatcccaggcgaaaggctgaagccgtgaccgatctcaccgatatcatcaagccctccaacgtcgccgtcatcaccggtggcgcctctggcatcggcctggcggccgccaagcacttcgcgacaaagggcatgaacgtcgtcatcgccgatctcggcgccgaccggctggccgctgcggcaaaggcggtcgcggccatgtccggagacgaccacgtcatggctgtcgagaccgacgtctccgacaaggcggcgctgcgggcgctggagcggcaggtcgtccagcgcttcggcaaggtgcatgtgctgatgaacaatgccggcatcgggccggagacctcgatcttcagcgccgacagcggctgggacgcgatcctgggcgtcaacctgatgggcgtcgtcaacggcacgcgtactttcggccccggcatgctcgcccatggtgagccgggcctgatcatcaacaccggttccaagcagggcatcaccacgccacccggcaaccccgcctacaacgtctccaagtcaggcgtgaaggtgttcaccgaggcgctggagcacgagctgcgcaacaccaagggcggcaaaatctccgcccacctgctgatccccggcttcgtcttcacagggcttaccaagggcgaccgcgccgataagcccgccgccgcctggaccccggaacagacggtcgatttcatgatcgagagcatcgagaagggcgatttctatatcctctgccccgacaacgacgtcgcccgccctgtcgacgagcgccgcatggcctgggcgatcggcgacatcatcgagaaccgcccgccgctgtcgcgctggcatcccgactatgccgagcgcttcaaggcgtttctcgaaggcaagtaagagctgaagcgatcgggcctattagaaggtttgattggtgcatttcctgaaacccggatatgagacattgctttcacatccggcttcaagagtgtgcaatggattttctgccgagcctgccgacgcttctgaccttttccgccgccagcctgcttttggccgcgacacccggccccgacatgacgctgtcgatcagccgggcgctgtcgcagggcaagaagccggcgctctatgtcgtgctcggcaccagcctcggcatcgtcgtccataccatgctggtcgccttcggcatctcggcgctgatcaccgcctcgccgacggccttcatgatcctgaagacgggcggcgccgcctatctgctctggatggcggttcaggcgatccgctacggctccaagctctcggtcgaaaaggtcgaggacgcgaaaggcacgccgctgtcgaacatatcgagcggcttctgggtcaacctgttgaaccccaaggtcatcatcttcttcatgaccttcctgccgcagttcgtcacatcaggtgatcctgatgtcacgcagaagctgctcttcctcggcttcttcttcatcgtcatcggcatgccggtgaacgcgctcgtcgtgctcgcctccgactggctggcgacctggctgcagaacaacaggaaggtgctgcgcgggatggactacaccttcgccggcgtcttctccgtcttcgcggccaagatcttcttcacccaggcgcgctgatatcagccgatcagcagcgcgtcgtcgtcgagcgtctggccgcgcatcttgcggaacatgtcgatcaggtcttcgacctgcaggtccttgcggctgtcgcccgacacgtcgagcatgatctcgccgccatgcagcatgatggtgcggtggccgtagtccagcgcctggcgcatcgagtgcgtcaccatcagcgtcgtcagcttgcgctccgagaccacgcggtcggtgagccccatgacgaactcggccatccctggatcgagagccgccgtatgctcgtcgagcaacaatacctcggagccggcaagcgtcgccatgacaagcgagatcgcctgccgctggccgccggagagaagatccatgcggtccttcatccgggtctcgaggccgagattgagttcggcgatgcgttcgcggaaatgctcgcgccggcgtggcccaagcgccgaggtcagcccgcgccgctcgccgcgccgtgccgccagcgccaggttctcctcgatcgacagcgcgccgcagcttcccgtcagcgggtcctggaagacgcgggcgacgaggccggcgcgcgccgcggtcggcttgcgagtgacgtcggtgtggccgatcatcacctgtccctcgctcgccagcacatcgccggcgagcacgcccaagagcgtcgacttgccggcgccgttggagccgatgacggtgacgaacgagccttcctcgatcgtcaggctgacgccgttcagcgcctgcttctgcagcggcgttcccttgccgaagacgaccttgatatccttgagcgtgatcatgacgaggcacctccgcggcgaaggcggggaaggatgagcgcaaccgtgaccagggccgcggtgacgaaattgaggtcggaggcctgcaggccgatgacgtcgctcgacagcgccagctggatggcgatgcggtagaggatcgagccgatgacgcagccgatcagcgcgatcagcaatccgcgccggccgagcagcgtctcgccgatgatgacggcggcaaggccgacgacgatggtgccgacaccggaggtcacgtcggcgaagccgttggtctgcgcgaacagcgcgccgccgagcgccaccagcgcgttggaaatcgccatgccgagatagatctggcggttggtatcgacgccctgggcgcgggccatgcgggcatttgcgccagtggcgcgcatcgccagaccggaatcgctctcgaggtagcgccagacgacgatgacggcgacgacgacaagcacgccgacgaagagcggccgcacgtagaaatcgcgcaagccgaggccgaagaacgggctgatcatcgtgtcggcattgatcagcgcgacgttcggcttgcccatgacgcgcaggttcacggaaaacagggcgatcatcgtcaggatcgatgcgagcaggttgaggatcttgaaacggacgttgagcatggcggtgaccatgccggcggccgcccccgccgccatggcgatcagcgccgccagccaggcgttcacgcccgcgatgatcagcaccgcggtcacggcggcgccgagcggaaacgagccgtccacggtcagatccggaaaatcgagcacacggaatgcgaggtaaacgccgagcgcgacgaaggcatagaccagccccagctccacggctccccagaatgcgatctgactcaaggcttttgccctttcctgtgctgtttccgtggcaaagacccctcccaaccctccccacaagggggagggcttaacccagccgatccgccctgccacgattggggcagacgggtgccacgggtcttctcccccttgtgggggagatggccggcaggccagagagggtcttcatctctatgcgatcagccgcccccgtgcaaacgggagcggctgatcattcaggtgttgatggtgactggctcagtcaatcgtcttcgtcgcgcgcttcagcacgctctcgggcagcgtcacgcccatcttggcggccgcacccttgttgatgacgagatcgctgccggcggcgaccttgaccgggatgtcgccggggttctcgcccttcaggatgcgaacgacgatctcgccggtctgcttgccgacgtcgtagtagttgaagccgagagcggcgaccgagccgcgcgaaacggaatctgtgtcggcggtgaagagcggcagcttggcctcttcggcgacggccacggcaccctcgagcgccgagatgatggtgttgtccgtcggcacgtagatcgcatcggcgcggccgacgagggcgcgggcggcaccctgcacttcggcggacttggtggcggcggattcgacgaccttgaggccggccttttcggcctcgaccttcagcaccgcgagcagcgataccgagttcgcttcaccggaattgtagaggtagccgatcgtcttggcgttcggcaggatttccttgatcagcgccacgtgttcggcaaccggcgacatgtccgagaggccggtgacgttgccgccgggcttgtccatgttcttgaccagttgcgcgccgagcggatcggacacggcggtgaagacgaccgggatgtcgcgggtcgacgagaccacggcctgcgccgaaggggtcgagatcggcacgatgacgttggggccgtcgccggcgaactggcgggcgatctgggcggcggtcgcgggattgccctgcgccgactggaacacgaacttgaggttcttgccttccttgtagcctgatgccgtcagcacgtcgagaacgcccttgcgggcggcgtcgagcgccggatgttcgacgatcgcggtgacggcgacggtcacgtcttcggctttcgcgggaagggaaagggcaagtgtcgcggccacggcggcgagcagtacggaacgcatgggtatcctccaactatgattttgggccgcttgtaggaaaagcgggccctgaaatcaatcatcagaagatgctgttaggatcaaacttgctgatcactcacgcgaatgtcagtcgtccgagccgtgattggcgatcatcatcgcctcgaaggccagacgctcggtcttgcgcatgcgctccgattccgacttcagctggccgcaggcggcgagaatgtcgcggccgcgcggcgtgcggatcggcgaggcatagccggccgagttgatgaaatcggcgaacttctcgatctgcgcccagtcggagcactggtagttggtgcccggccatgggttgaacggaatgaggttgatcttcgccggcacgcccttgagcaactggatcagccccttggcatcctccaggctgtcgttgacgtccttcagcatcacatattcgaaggtgatgcgacgggcgttggacagccccggatacttgcggcaggcgtcgatcagctccttcagcggatacttcttgttgatcggcaccaggatgtcgcgcaggtcgtcgcgcacggcatgcagcgagatcgccagcatgacgccgatctcgtcgccggtgcggaagatttcgggaacgacaccagaggtcgagagcgtgacgcgtcttttcgaaagggaaagtccgtcgccgtcggtggcgatcaggagcgcctgcttgacgctgtcgaaattgtagagcggctcgcccatgcccatcatcacgatgttcgaaaccttgcggccctcggccggcatgatcgtgccctgcggcgcttcgcgatcggggaagtcgcccagccggtcgcgggcgagcaggagctgcgacaggatttcctccgccgtcaggttgcgcacaaggcgctgcgtgccggtgtgacagaaggaacaggtgagcgtgcagccgacctggctggagatgcagagcgtgccgcgcccttcctcgggaatatagaccgcctcgatctcgacgggacgaccggcgccgcgcggcggaaagcgcagcagccacttgcgggtgccgtcgttggagacctgctcctcgacgatctcgggtcttgcgatcgtgaaatgcgtcttcagcgtctcgcgcatgtccttggagatattggccatgtggtcgaagtcggagaccccgcgcacatagatccagttccacagctgcgccacgcgcattttgatctgcttgtccggcacgcccttttcgcgcagtgcctgtcccatttcctcgcgggtgaggccgatcagcgagggcttcggcagggcttcgccgcgcgcgggctggttgcccgcgggcttgagaacggtcatcgcatccatgacggacatttcatctaatcccgaattcaacatgcgatcctcccgatagtctcaacgactggcgggcggaacgggcatgaaggcagaaagtgaatgcggaccttggcggccgagccgcgatccatccgctgttgtgcgcgcctttagcatcatttttgccatccgtcactatagatggaaacgacgaaggccggcgcaaggccggccttcgaaaatccagggtgtgccgccagcgcttacttgcagctttcgatctgcttcagcgacgccgaaatgccggccagcgagtagctgtaggaggtctgcgtgcccttgcgggagacggcgttgacggtcatcgagcggccgcccttcatggcggcgacgagcgccggttcctgggcggcgttctcgacccagccggccctgtccttggtgaacatcacgaaggtcttgttgtcgatgatgacgtcgatcttcgaggcgtccttgacggtgtagcccatcatcgcctgcggctcgtaggagatgttctggcccgggcgctgcgagacgatgaagaagttctcgccatggtcgatgccggcgggcttcttttcggtcggtaccgagagaacgtagcagacggtgctggagccctgcttgtaggaataggcgccccaggcctggaactgctggatgcgggtcggcgccgaggaagcggcggcggcgggttgctccgcggcggcgggcttcttggactgagcggatgcgatgccggcgccggcgagaacgagggaaagggcgagtacggtactttttacaaacatggatattcctgccggttcttgcgattcgagcccgagcgagcgggcggcgcataatcacgatctgctttattttgacttaattcaggttaccaaagcgtcaacgcaggtcgcgagaagtccgtgcctgtgccatttccacccgggtgtcaatgttgagcgccggattaacgctcgggatgatgtggtccgaaaacgatctgaaaccatcgctcttaaggaatttaagacataaagataaaggcaagagtttgacgtttcggaaatccgatgtaggtcattaaggtatggaaatccgttaaggaattcgcggagccagggggctttgaagggaatggacgccgaggacaaacagcgcttcgctgccctagccggggctgtggcggaacgccgcgaccagcaggcgttcgccatcctgttcgactatttcgccccacgcctgaaatcctggcttctcaggcagaaaatgacggcgagcgaggcggaagagctcgttcaggaagtgatgatcgtgctctggcacaaggccgctctttacgattcgtcgcgctcgtcgctgtcgacctggctcttccgcatcgcccgcaatcgccgcatcgacctgcagcgccgcgcccgcgcccgcatcctcgacgaagacgatccggctctgcagccgtcgcccgagatcggcgccgacgagatcgtcgccaatggcgatcgcgatgcacaagttcgtgaagcggtgagccaattgcccgaggaacagcgcgaaatgctccgcgccgccttcttcctcggccaatcacactccgaaatcgccgaatcgactggcctgccgctcggcaccgtcaaatcccgcatccgcctcgccttcggcaagctgaaaaaggtgctggaagcggaaaacgcgtgagccgaaccgccatcgcgcccttgcaacgaagggaagaatagtatcggatgccttcatccacagatggaggtaatcacatgcgccgtcacatgttcgaagccaatggagccactcccgtagccatgaacatgttgtgcgatgcgaacactcaatcttggaatcctggcgcatgtagacgccggaaagactagcctcaccgaacgcctgttgtttcacgccggtgtcatcaagacgctgggcggcgtcgataccggcgacactcagaccgacaccttgcagctggagcgcgaccgcggcatcaccatccgctcggcggtggcgtcgttcagcgcgcgaggcacgcggatcaaccttctggacaccccgggccatcccgacttcattgccgaggtcgaacgcgtgctcggtgtgcttgacggcgcggtgcttgtcgtctccgccgtcgagggcgtgcaggcgcagacccgcgtcctgatgcgcgcccttgcccggctgaaggtgccgaccgtcatcttcgtcaacaagatcgatcggcgcggcgccggcggcggggcagcacttgccaatctccgcgaccgcctgacgacggccctcgtgccgatgggaaccgtcagcgcacccggaacgccgctcgcgcgcttcgaccccggcgcctggcacgaccgagccttccaagccagcgttctgcaggcgctggccgagcgtgacgatgacctgctcgctgccttcgcggatgatcgcgccgtggaggcgggcacgctacgcgaacggttggcgcggcaaaccgcccatggcctgatcttcccggtctatttcggctcggccataacaggcgccgggatcgaggagttgattgacggcatcaccgactttctcccggcgccgataccgccgaaggacggcccggtgtcggcaaccgtcttcaaggtcgaacgcaatgcggcaggggagaagctcgcgctgcttcgtgtggtctcaggcgccctgcgcgttcgcgaccgtatcccgatcgcggactcactcgccggcccaatcgcctacaaggaaaaccgcatcaccgatgtcgaggtctttaccgaaggacgcgtgagacgcagtgatgttgcccaggcaggcgatatcgccagagtaagaggtctgtcagacatcaaggtcggggactggatcggagaccgcgccacggccccgcaaaggcagttcgcgccgcccatgctggaagcggcgatcgtgccggatgacaagggagatgcccctgcgctgtggaaggccctgtgccagctctccgaacaggacccgctgatcaatctgcggcagggcgacggcgaggatggtctgtcgatctcgctctatggcgaggtccagaaggaagtgatcgagcacacgttgaaggttgactacggcctttccgtgcgcttcctcgacacctcaccgatctatgtcgagcgcatcctcggcgtcggaaatgccatcgagcacgcgcccgatccgtttctggcaaccattgggcttcgcgtcgaagccggcgaaaatgaaggccggcatcggctggtcttcgaggtcgaaccgggcgccgcaccgccattcgccttcaaggcgatcgacgaagcccttgaagccgcgttcggccagggaattcatggctggcaggtgatcaacgcctcggtttcaatcaccgagatcaccaggcttcgaaagtggacgacgagtaccccgtcggaccatcgcaatctgacgcctctggtgctggcgcaggcattgcggatcgccggaacggaggtctgcgagccgatcgaccgtatcacgatcgacatgcccgccgacgcgctgccacgcgtgcaaagcctgctgatgcgcctcgacgcagcactcgaaccgccggtcgccagcggagagatgatgatgctcactggcacgatcgccgccatcaaaatccacgacatccaacgcgccctgccgtcgctgacaagcggtctcgggacgatggaaacggagttttcaggctatcggccggtcaggggcgcggcgccagtgcgccgtcgatcggggccgaacccgttttcccgcagcgagtatctggcgcagctgaaaggcgcgcgccaagtgtgaaaagtcagcgtgaggggccggcaaacagccggccctcacactgctgacaaagatgtttctggtggcagaagcctcgaaatccctcattcctgtccttgtgacaggaatccagccacgacgcgtcggcgtcgtgaaaatactctttccgtccaaggacttggacgactggattcctgtgacaagcacaggaatgagggatgctgggcatccgaccgcgaccaagttggacttcgttattgttcaaccgcgagctttgtcagcattctgggccggcgaacagccggcctacaccgtcttcatatcctcgggccgcacgcgatcgggcgcgtccgcgagcgccttgtcggcggcgtcgtagtggctgggccggatattgcggttgaccatcgcgaaggcggccgagagaacggcgatgtcgtcggaaaagccgatgccgacaagcaggtcgggcaccatgtcgactggcagcacgaaataggcgagcgcggcgagcagcgtgccgcgcaccttgagtggcgtctcacggtcgagcgcgcagtaataggcggcgacgagatcgcgcgagaagggaaccctgcgcgccgccttgcgaaaggtcggccagaatttccgccgaacgttcttctcccgccgctcctgcgtttcctcatcgcccggcagcaggatctcaccgtacttgacgtcgtccatgtccacttgaccctctgttttcacctggccccttatatccgtcggccctttccggtcaggcccgaatatgggggctcctgcgtcgtgattcaatcgatccgccgcgccgccgccttttccatcaggccggcgagcttgaaatcgagttccgtcagcccgtcggccgaatgggtgctgagcgccacgtccaccttggaatagacgttgaaccattccgggtggtggtcgagcttctcggcggcaagggctgactccgtcatgaagccgaaggcctcgacgaaattcttgaacttgtagctcttggtgatcgacttgccgccgtcgccgagcgaccagccgtcgagtttcgccagttcgtcgtaaatcgcctggcgttccaatttgtcccgtttcatgcgattgtcctttgcgttcaccatgggtcttttatgaaacgcatcagtatcctgtttgtttgcatgggcaatatctgccgttcgccgctcgccgaaggtgtcttcagccatctggcaaaagaggccggccacgccgaccgctttctcgtcgattcggccggcaccggcagctggcaccagggcgatgagcccgacagacggtcgatcgcgaccgcccgccatcacggcatggacatatcgggccagcgcgcgcggcgcatccgcaagcacgatttcgccgacttcgacctgatcgtcgccatggaccgcgacaatgtcgcggctttgcgggcactcgatccgcaggcccggaatatccatctgttcggcgatctggcgctcgggagcggagaggacatccccgatccctattatggcggcgccgacggcttcgaggccgtctatgccaggctcttggccggctgcaggaaactgttgtccatgctcggcgacgacagcgcctcgcgcagcgggaatacctcttccgtcagatagggcccgccgccgaccgaatcgcgcgacgacagcagcacgaagcgcggcacggtgaaggatgcggtctggaaattgccgcgtccggcgagatagtgcaccacgtcgtcgacgcgcgaggatttcagccgcgccagcgtcacatgcggggtgaacttgcgcggatccggcgaaaggccgatcctttggcagatccgctcgatttcggcctgcagggcatacatttcgggcgactgcgtgacgccggcccaaaccgaatgcggcttcttcgagccgaaagcgccgataccgtcgagcttgatctggaattccggcctgtcgatgcggtcgagccggtcgacgatctcgtcggccgtgcgcccatcgacatcgccgatgaagcgcagggtgatgtggtagttctccacatcgatccatcgggcgccagggagaccaccgcgcagcaacgaaaggctcattgccgcattgcgcggaatttcgagggcggtaaatagtctcggcataacgagcactccccgaatcttttgcaggtgctcacacggaatcacgcattgactacgtgcgcaagtccctaattcttcacagtcggcaacgttcccacgaattgtgtgattgccggttccatcttctcgaccatcacgtcgacgcccttgctgttcgggtgcatgccgtcctcgagcttcagcgaggcgtcgagcacgacgccgtcgaggaagaacggatagaggctaaccccatatttcctagcgagtttttcatagatcgggttgaaccgcgccgcgtagtcgccgcccatgttcggcggcgccatcatgccgacgaggagcaccgcgatcccgcgctcctttagccgggcaagcatctggtcgagattcttctcgctctgttcgggcgcgatgccgcgcagcgcgtcgttggcgccgagctcgagaatgaccccgtcggtgccgtcgggaaccgaccagtcgatgcgcgccagcccgcccgtcgtggtgtcgccggagacgccggcattcgtcacggacacgtcgagccccttggccttcagcgccgcctgcagcttctccggaaagccgtcgcccggcggcagctggtaccccgccatcaggctgtcgccgaagccgacgaggttgatcgtgcgcgcctgcgccgcaaccgagagcatcatcgagcagacgatgacagcgatgtgaagacccgcaactttaaatctcattcctgtttccctagattggcggcacgatcggcttcatatagggcatttaacgttggctaaaaccatcatcgacttgaaacgggccgatttgacgctcgggagcgccgctgcgtccgtgcatgtgctgaagggcatcgaccttcggatcgccgccggcgaatcggtcggcatcgtcggtccctcgggctcgggaaagtcgacattgctgatggtgctcgccggcctcgagcggctggacagcggcgagatcaatatcaacgaggcgccgctgcacacgatgagcgaggatcaggtcgccgatttccgtggccgcaacatcggcatcgtcttccagtccttccatctgatcgccaacatgacggcgctcgaaaacgtcgccgtgccgctcgagctcgccaatgtcgccaatcccttcgagatcgcccgccgcgagctgaaatccgtcggcctcggcgaccggctcaatcactatcccggacagctttccggcggcgagcagcagcgcgtggcgatcgcccgggcgctggcgccgtctccggcccttctgatcgccgacgagccgaccggcaatctcgataccgataccggtcgccagatcgccgacctcttgttttccaagcagaccgagcgcggcatgacgcttgtactcgtcacccatgacaatgcgctcgccaagcgctgctcgcgccagatccgcgtccgctccggcaagatagaaggcgacagcgccgcgattgaagccgaagtggccatcgcatgacgctgatttcgccgcgtgtctcgctcgccttccgtcttgcccttcgtgagctgcgcggcggcctcaggggcttttacatcttccttgcctgcatcgcgctcggcaccggggcgatcgccgcggtcaactccgtctcgcagtcgatcaccgacacgatttcgacgcgcggccaggagattctggccggcgacgtccgcttcgagctcaacaaccgcgaggcggcgccggccgaactggatttcctgaagtcctacggcaaggtttcggtctcgaccggcttgcgctccatggcccgcaagccggacgggtccgatcaggcgctggtcgaggtcaaggccgtggacgacgcctatccgctctatggcagcttcgaggcgcagcccaattacaccctgcccaagctgcttgccaatcaggacggcaccttcggcgcggtggcggcaccgctgcttctggaacgcctcggcctcaagctcggcgacgagctgctgctcggcaacgtcatggtcaacatcaccggcacgctgaccaccgagccggatgcggtctccgagggcttcggcttcgcgccgcggctgatggtgagccgccaggcgctgcaggaatcgggcctcatccagaccggcagcctggtcgagcacgcctacaaggtgcggctgaacgaccggtcgacgctgccggatatccgcgaccgcgccacgaaggatttccccgccgccggctggtcgatccgcaccagcgaccgcgccgcgccctcgcttaccgaaaacatcggccgcttctcgcagttcctgacccttgtcggcctgaccgcgctcatcgtcggcggcgtcggcgtggcgaatgccgtgcgcgccttcctcgacgccaagcgcaccacgatcgccaccttcaagtgcctcggcgcgccggcctcgaccgtcgtgctgatctatctcttccagatcggcctcatcgcgcttggcggcatcgccgtcggcctcgtcatcggcgccgccgctcccattctggccgcccagttcctggcgcagttcctgccggtctcgaccgcgccgacgctctatccggtggcgctgtcgctcgccgtgctgttcggcgtcctgacgacgctcgccttcgccatcatgccgctcggccacgcccgcgaagtgccgccgacggcgctgtttcgcgagcagggcttcgaggcccgccgcctgccttcctggccctacatactgatggcggcgatcttcctcgccgcgcttgccgcccttgccgtggtgaccgcctatgatcgcttcatcgccgtcgtcttcatcggcgccatcgcattcgccttcgtcgtcctgcgccttgtcgccgccggcatcgcctggctggcgcgccgcagcccacgggtcaactcgccggcgctgaggctcgccatcggcaatatccaccgccccggagcgctcaccccctccgtcgtcctctcgctcggtctcggcctggcgctgctcgtcacgctgacgctgatcgacggcaatctgagacagcagctcaccggccgcatggccggcggcgcgccgaacttcttcttcgtcgatatccagggcgccgaactcgaaggcttccgcaatctcgtgacgtcgcaagcgcctgacggcaagctcgtcgaggtgccgatgctgcgcggccgcatcctcgccctcaacggcgaggaggtgaccaagcgcaaggtgccgccatcgggccagtgggtgctgcgcggcgaccgcggcatcacctattccgagacgctgcccgaaaacgccgccctgaccgagggaacgtggtggccgaaggactacagcggcgagccgctggtctccttctcggcggaagaggccggcgagctcggcctcaaggttggcgataccgtcaccgtcaacgtgctcggccgcaacatgacggcgaagatcgccaacctgcgcaaggtcgagtgggagagcctgtcgctcaacttcgtcatggtcttctcgcccaacaccttcaagggcgcgccgcacgcctggctggcgacgctgaccgatcagaaggcgacggctgccgacgaagccgcgatcctgaaatcggtgaccagccgcttcccgacgatcaccagcgtgcgcgtcaaggatgcgatcgacatcgtcaattcgctggtggcgcagctggcgaccgcgatccgcgccgcagcctcggtcgccctcatcgcctcggttctcgtgctgtcgggggcgcttgcagccggcaaccgcgcccgcacccatgatgccgtcatcctgaagacgctcggcgccacgaggcggatgctgatgcgcgccttctgctacgaatatctgatactcggcgtggcgaccgccatcttcgcgctgttttcgggcggcgtcgccgcctggttcatcgtcgcccgcatcatgaagatcccctcgcagttcctgcccgatgtcgccggcatgacgctggtcacggcgctggtgctcaccgtcggcatcggcctgatcggcacatggcgcattctcggccagaaggcggcacccgttttgcgcgaactgtgagggtgccgggttgaaataaatcctgcaccttacggcgatttaacgcgatggcgggttgcaaggcccttgtttacgtgggtcgaagggctcatattatccacaggcaagctgaagctccgcagcggcgcctgggcaagaaagcccgacaccgtatccaatcggggctgacaagaggaaatcatggctgacctacgcaattaccagggccgcgttcagagcggtgtccaggccggagagatcgatcagggccttcgcagctacatgctgaaggtttacaacctgatggctatcggcctggcgatcaccggtctggccgcttatctgtcgttcacattcgccgtctccggcggccagctgaccgccttcggcgccgcgatctataccagcccgctgaagtgggtggtcatcttcgctccgctggcgatggtcttcttcctgagcttcaagatcaactcgatgagcgtatcggccgcgcagacgaccttcggcgtctatgccgcgctggtcggcctgtcgctgtcgtcgatcttcctgatctacaccggccagagcgtcgtgcagaccttcttcgtgaccgccgcctccttcggcgcgctgtcgctctacggctacacgacccgtcgcgacctctcggccatgggctcgttcctgatgatgggtctgttcggcctgatcatcgcctcgatcgtcaacatcttcctggcctcctcggccatgcagttcgcgatctcggtgatgggcgtgctgatcttcgccggcctgacggcctacgacacgcagcgcatcaaggaaatgtactacgccgccgacgacgccaccatggccggccgcaaggcgatcatgggcgcgctgacgctctacctcgacttcatcaacctcttcatgttcctgctgcagttcatgggcaaccgcaagtaagacggaacgggtatcggaaaaggcgctcttcggggcgccttttttgtttcggggatcgggtcgtcctggggtggttgcgcatccacccactccatcgtcattctcgggctcttcccgacaatccaagcacgcctctacatatgcgacgccgatggaccacccgccccctcccaaccgtcgcatcccgtccgctttccccttgccaactgccgccgcgaatgctcttcaagcggacagccccctccagccatcggcctgcccatgcccgttctcatccgcgacgccgctccctccgacatcgacgccatcaccgccatctaccgcgagtccgtgctgaacggcgtcgccagctatgaaatcgccccaccggatcgggacgagatggcggcgcgataccaggccatcgtcgcgaacggctacccctatatcgccgcgacaggcgaggatggcgcgctcatcggctatgcctatgcgtcggccttccgcacgcggccggcctatcggttcatggtcgaggattcgatctatctggcgccggaggcgcggggcaagggtgtcggcaagcggttgctggaggcgctgatagcgcgctcgacggcgctcggtttccgccagatggtcgccgtgatcggcggcgcgcatccggcctcgatcgcgctgcacgccacgcatggtttcgaggagatcggccgcatcaagggctccggcttcaagcacgggcgctggctcgacaccatgctgatgcagcgtccgctgggcgacggggcttccggcgatcccgacctcgcggcctatccggcgacgctgtttgcggagtgagaggcctcccgcgcggtcgcggaaaacgggaccggcgcggttgtccggctcgttcgcgacgctttacttctcgacgagcttcagcgacttgttgaacaccttcagcacctgctgcaggtcatggccgcgcttcaggatctggccgtgggtattgacgacggaataggcgccctgcttggcggcgagcttggggtttttctcgatgcggtagagcggcatctcgccggaacgcttgaaaacggagaaaacggcgagatccttcatgtggtcgatcgcgtaatcccgccactcgccttcgccgaccatgcgcccgtagatccacaggatcgcatccagctctcgccggtgaaacgtcaccggcaacgggtccttgctctgcttgtagtccctgatatccacgacgacgggggtgtcgccatcggtggcccgattgctcccacgccgcaaatccggctgatctgtcatcagtctcgaatgcctccgttcgtgacacgcgggtgacagtttgccttagcgtttacaaattgcaagcgcggcctcgtgcgcattaagcatagtctgtgcaatctgcggcgtgccgcatttcagtcaaaacagcgcctcaattaaaagagaaattcgctcgcacttgaccggcgcatccttgacggattcgccgacactgaattctgcgcatcgtctttcggtactttgggggcgatgtgactgtttggcgccagcgcgccaaagggcccggctgaccgtatcgaccttaaccccagccccgaatacgatcagtcgggccgccccgctttcacctgacaggcagatgaaatccttcggatggccttgccggcttgctggccggctcagatgttcttgccggccatgatcaccgttgcgccgaggatcgccgagggcgttccgtcgggcgtggacgactgcagcagaaccgcgcatccctcgagatcgggcttttgcaacagggtggcgggcagcgtcaggcgggtctgctttccatcccacatgccgacggtttcgacattcgagacactgtgcgtgtaggcgatcttctggccgctgttttcgcccttctgcacctcgatcgtcttctcgcgatcgaaatagaccatgacgacattggcctttccctggccggggccgacggtgatctcgagctggtcgcccttgacctcggccttgacaggcacgttcagcccttcgccgccgttgacgaagccgtcgatcttgcgctcgatgccgccgagatccgagcccatcacgtgatcgcggccgttgaccacgacctgcggcgtgtagacattggcgcgacccatcgtcttggcatagccgtactggcgctcagtgttttccttcgagctcagcgtatcggcccagcccatgtagttccagtagtcgacatgataggcgagggcgatgacgtcgccgcgctcaaccagcttgcgaaacgccgcatcggcgggaggacacgacgagcagccctgtgaggtgaacagttcgaccacgcccttgggcgcctcgtcggcgagcaacgggctcgccaaggcgacacttgcaatcagcgaaatcaaaaaccgcggcgacattcacctctacctcttttcctctctatccccgccgaaaaggccggccacatggactggccaaccacgcgggcaggggctccaactcttcaacctagagataatctctcccgatccaaacgaaaaatcacgaacgggtgagacggcgccggggtgggacaactccgcaacacttcgccgtgagggatcgcagccatccaggacgaaaaagccgccggaaatcgctttccggcggccattatcgtgcaacccattaaaattgtgggccgatcaggccgcgagatctcgcaacaccgtctgcaggatgccgccattgttgagatagacgacctcgtcaagcgtatcgacgcgcgacaggagcggaacgtccttcacggtgccgtcgccataggtgatcctggcgatcttcttctcgcgcggcttgatgttctcgagcccctcgatggtgacggtctcgtcgcccttcagccccagcgtcgcccaggtcgtaccctcctcgaagacgaaggggatgacgcccatgccgacgaggttcgagcggtggatgcgctcgaagctctgcgcgatcacggccttgacgcccaagaggttggtgcccttcgctgcccagtcgcgcgacgagccgttgccgtattcgacgccggcgaagatgacaagcggaacaccctcggccttgtactgcatggccgcgtcgtagatcgattcctcctgcttcgacgggtagtggatggtgtagccaccttccttgccgttcgggccgagcatgtggttgcggatgcggatgttggcgaaggtgccgcgcatcatcacttcatgattgccgcgacgcgtgccgtactggttgaagtcggcgacgccgacattgtgctccagcagataggcgccggccggcgaggcggccttgatcgaaccggccggagaaatgtggtcggtggtgatcttgtcgccgaagaggccgaggacgcgcgcacccttgatatcggagacgccggagccggtcttgcccatgccgacgaagtagggcgggttctgcacataggtcgagttgtcgtcccaggcataggtctggcccggaggcacctgcacggcctgccagttggcgtcgcccttgaagacgtcggcatatttcgtctcgtagagttcgcgggtgacgtatttctggatgaaggcctgcacctcgtgcgaggtcggccagatatccttcagatagacggggttgccgctctggtccacgccgatcggctcactcgtcaggtccttctgcaccgtgccggccagcgcataggcgacgacgagcggcggcgaggcgagatagttggcctgcacgtcgggcgagatgcggccttcgaagttgcggttgccggagagaacacccgagacgatcaggcccttgtcgttgatcgtcttggagatcggcgcgggaaggggcccggaattgccgatgcaggtcgtgcagccgaagccgacgaggttgaagccgagcttgtcgagatcggcctgcaggccggatttcgccagatactcgccgaccacctgagatcccggcgccagcgaggtcttcacccacggcttggtcttcagccccctggcgacggcattgcgggcaagaaggccggcggcgatcaggaccgacgggttcgacgtgttggtgcacgacgtgatggcggcgatcgccacgtcgccatggccgagatcgaaatccgtgccttccaccgcgtagcggttggcgagctggccgggcttcttgtaatcggcatccatcgagccggcgaaaccggacgcgatgttttccagcgggatgcggccttcgggacgcttcgggccggccatggcgggcacgacatcgccgagatcgagctccagcgtatcggtgaagacgagatcggagccatcgccctcgcgccacatgccctgcgccttcgaataggcttcgaccagggcgatgcggtcatgcgagcggccggacatggtgaggtagttgatggtttcgccatcgacggggaagaagccgcaggtggcgccgtattccgggcccatgttgccgatcgtcgcgcggtcggcgagcggcatgttgtccatgccggggccgaagaactcgacgaatttcgacaccacgcccttcttgcgcagcatctgcacgaccatcagcacgaggtcggtcgcggtcacgccttccttgagcttgcccgtcagcttgaagccgatgacttcgggaagcagcatcgataccggctggccgagcatggccgcttccgcctcgatgccgccgacgccccagccgagaacgccgagaccgttgatcatcgtcgtgtggctgtccgtgccgacgcaagtgtccggataggcgatcgtctcgccgtcctcttccttggtccagacggtctggccgagatattcgagattgacctggtgacagatgccggtgcccggaggcacgacgcggaaattctggaaggcctgctggccccatttcaggaagcggtagcgctcgccgttgcgctggtattcgagctcgacgtttctggaaaacgcctgcggcgtgccgaattcgtcgacgatgacggagtggtcgatgacgagatcgacgggcaccagcgggttgatcttctccggatcgccgccgagcgacaccatcgcgtcgcgcatcgccgcgagatcgactacggcgggaacgccggtgaagtcctgcatcagaacgcgcgccgggcgataggcgatttcgttttcgacggtgcccttgttatcaagccattcggcgacgccaaggatgtgttccttggtgaccgactggccgtcctcgaagcgcagcaggttctcgagcagaaccttcatcgaatagggaagcttggaaacgccgggcaggccgtttgcctcggccttcggcaggctgaaatagacatagtccttaccatcgacggtaaggacggaacgacagtgaaagctatcaagtgatttagacacgagagaccccgtttctgatcgcgaacacaattgtgcggacgcctatgcactaaaggcacatcaggatgcgggtacggccatttccgcggtccgcacatgaagtcagacctcatgttcggcgctaggatgaaattcacgccgaccgctggcgtggtaatccacatatagataacttcatcaaaagctgccagagagggaccgtccatttctgatttttttgcctcgcatgactgaaaacctgaaccccggaacccccatgcatctgcacgcctccgatctcgctgcccgcagaggcgaagagctcattttcgaaggcgtgtcctttgccctggcttcaggcgaagccctggttttgactggcaaaaacggatcgggaaaatcgaccctgctgcgtgtgctcgcaggcttgctgcggcaggaaacgggcacgatcacggtcatggacgcgaacggcgcgaccgatttcaggctccccgagatcagccactatctcggccaccgcaatgccatgaagagcgagctgacggtggaggaaaacctcgtcttctggcgccgctatctcggtaacgccgacggcggcaccggcatgtcgatcgaagacgccgccgatgccgtgggcctgcccggtatcacccatctccccttcggctacctctccgccggccagcaacgccgcttcgccttcgccaagctgcttgtctcccaccgccccgtctggatcctcgacgaaccgaccgccgcgctcgacgcca

SEQ ID NO: 14 - DNA, 95771 bp, Rhizobium matallidurans
  source 1..95771: mol_type = genomic DNA
tccagcaacagtccggcgccgctatacctcgcttcgcttcagcaggtagtccaagccacctgcccgataccagcgaaacccatagggctctagcaccatgtgatgctcgtaagttcccgttgcctggctgtcgtgtccgtcgagaatgtcaatcaacattcccggattgccctcattgttgaggctgaaactgatttcgacgggcttgtcgtggaaattatggatgatgacgacgacgttttcgcgccattcgtaccgcatgatcagaacacctggatcctggcagtcgatcacggtgcaagtgccccatccgatctctggagcttccttgcgcattcttatcattcgctcggtccagttcagcatcgagtcactatcacggcgctgaaaagccacgttcacattctcgtacccgtatggaccctgtgaaatcagcggtaatacgggtttctgacctttcgtgaagccaccttggggctcgtttgaccactgcattggagtacgcgcgcagttacgctcgggcagcgataagtcatcgcccatgccaatctcatcgccgtagcgaagaaccggtgtgccgggcaaagagtacatgaggctgtaggcgagcttgagacgacggatgtctcctcccagcatcggagctaggcgtctgcgaattccgcgatcgtatagctgcatgtccttgtctggcccaaaggcggagaagactgcttccctttcattctttgatagccgaccaagatcaagttcgtcatggttgcgtagaaatatgccccattggccagtacgcgggagcttctccgtgtcccgcattgcctttgcaagcggacgggtgtccgcgctcgccagcgcatagaagagcgactggttaacgtggaaattgaacatcatctgcaggcgctcgccgtcgtgcccgaagtactgcatattttccctcgggacgacgttggcttccgccaggatgatgctatcgccctttcgccactgaagaaattcgcgaaaagcgcgcagcatgtcgaagtattccttgggctttttcacgtccgcgcccttttcggcgattacgaaaggcacggcgtccattcgaaacccggaaaccccgagttggatccagaagcccatgattttaaggatctcggcctgaacaagcgggttggcggtattaaggtcaggctggaaatcgtagaagcggtggaagtaatattcgccggaatgcgtatcgcgcgtccaagtggatttttgtacaccggggaagaccatgccctcgcttgcgtttttcggctttgtcctggaccagacataccagtcccggtactttgaggttttgtcagccctggcctccttgaaccagggatgttcgtctgaggtatggttgacaacaaggtcgatgagaactcggatcccgcgctgctttgcgccatgcgtgaactcgacaaaatcccccaaggtcccatagcgcggatcaacgttataatagtcggagacgtcgtagccgtcatcgcgaccaggcgatgcctggaatggcatcaaccaaatcgcggtgacgccaagcccagccaagtagtccaagcgacgttgcaggccttggaaatcgccgattccgtctccgttggaatccatgaacgtctccaccgataggcagtagacgaccgcgttcttgtaccaaaggtcgttgatcaaggcgttgctcccatcagcagattgatatggtggtggaaggcatcggcaacggaaaggttccagggtgtgagctgcccgcgagattttggcagcggtttcgacgaggttctgggagccagtgtagttgccgctacataccagggacgtgcaatctcccgcggaccttgaccctcgtgcgtccttcagggccgaccgatgccttatcttcgcgcaacaatctggtgggctcttcccacgccgaacaggagcgccaggagtaaacttggcgaagacttcgcgtcaccgcgggtgccacgtcatgggaggcagaacacgtgaagagtgaaaccacctcgcggtttgcgtggaagcgtgatcggcgggcgtcgaagtcgatgacatctcgagtcccaccacttgaaattagagacgatggcgatagttatgtccgctaacgtacaaagctcgcgctaagtctcgggagcatactctttcagagaagcgagccccgcatgcccacggaccagatagtcgtgctcgtcgtggacgacgagcttattcttcgcctgtcgatctcggccgagttggaagacgagggcttcgtcgtgtttgaagctggcacggcggacgaggcgatagcgaccctcgagcggcatccggaaatccggctcgtgttcacggacgtggacatgccaggaagcatggacgggctgaaactcgcagcgttcgtacgcgatcgttggccgccgatcaaaatcatcgtgacgtcaggctaccgccagccggaaattggccagcttccgcagggctcgcccttcttgacaaagccctatgcttccaccgacgtcgcgactatgatccgtgggctattaatgggttgacacgggcttggccgtagaaaggccatcaagccatcaagccatcaagccatcaagccatcaagccgctattcgcgctggtcaagcgtcgtcgatgtgacccgcgttttcagtgaactctcgttccttggctatccgcacgtcaacggacatcttttcgctcttgtatggtccgagtgacccggtggcgccgtcgttgttccattccacccaatgacccttgtcatcggatcgaacgactacggatagtgagtgcttctcttctgacatgactaggtcccctactgtcgctaccacagctggaatgatggcaatgcgccgctggaattcgcgatcgaagctagctcagcgagtttgatccctggcctcgtcacgcgcgatccgcgcttcgcgaagccgttgagtcttagcttgtcgcgcctgttcctcggtctgaagttcctcgacggcttgaccgtgtgcgaagaattgggattggacgcggtcgaatgcggcttcggcctgctgcctggacttgctgtgggtcatgaaacctccttgggtttcggggctatgaagcgaaaaggccggacaacattgcccggcccttcaaacgcgctgccccattgccagtacatccgtggtcaatggggcggcccgttcaatcatgcagcttgcaggttgcaggcagacatcttgccggacttggcgtcgcgctcgagatcatagccgatcttctggccctcgacgatttcgcgcattcccgcacgctcgacggcggagatatggacgaacgcatcagcgccgccgttatccggctgaatgaagccgaagccctttgtggaattgaaccattttactgtgcccgtggtcataatgaaccctttcaaagcatagagtgaggtaccgcggaagcaaggcttcgcggacggtgatacgactatttttgagagagaaggttcgaatagagcgcggtgccaatcgcgcggtagacaaagctcggcaagcaaaagatcgattaagtcatagatagaggctttacgccgaaagtcaaccgatagttttccagggaccggtcgcttctcttttcggatttggcctcgattgatggtgtggatggctccttcttccgccggcgtattccggcatggtttcggtgtcattgcctgaagcaaaggagcgcttcatgtcagaacttgccacagtcggtatcgacctcgcaaagagcgtcttccagatccatggtgtggaccaaacggtctggtccttgtgcggcggcagcttcgccgcagccaattgcttgcgttcttccagaaccatccccggtgcctcatcggcatggaggcttgcgctggtgctcatgactgggcacgcaagcttcagtaactgggacatgatgtccggctgatgccaccatcgtaatgtaaagccctacgtcgcggaaagaccgacgccgcggacgcggccgccatctgcgaggctgtgacgcggtcctcgatgcggttcgtcgccatcaagagcgaggcctgctcgtgggtaatggttcttcaccgcacgcgggactttctggttcgccagcgcacgcagatcggcaatgcgatccgagcgcatatgacagaattcggcatcataaccgcgaagggcgtgcaaaatgtcgagcggctgaaggaacaagtggatcaattaccgcaagcggttcggatgcccttgatcttactattagaccaactgtccgagacgaacacgcggatcgagcggctgaccgacgagatcgaagagacccattcgcaaagcgagacaagtcagcgtctggcgacgatccccggtgtgggggtactgtcggcgacgatcgcggcaacgacctctgatgtcgacaatttcgactgcgcgagggattatgcggcttggctcggcctcgcgcccaagcctcattctaccggaggcaagcaaagagtgggcgctgtatcgaagatgggtgatcggtacatccggcgcctgctgtatctcggcgccatggcgcggatcatgctccgacgtcggctcaagcgggagccaggagcggactggctgtcgggcatgctcatgcgcaagaagacgaagattgtcgcgattgccttggcgcatcgcatggcacgaatgatttttgccgtcctcggggacggggtctcgatacgagccgcgggtcgcctgacggctcctggaatggtcagggcaacgtgaggtgatggcaaacaagcggagaagaagaaccaggacaccccgatgaatccgaagctcttcgagagcgctcgattgagtgggacctgttctccaagcggatattcatcagggctcgcagcggtttcgctgcgccgtatacatggccgcaaccgacctatttaccggaaccgatctcgtcctttgctcgcaggagccatccatacagggattcaggtcggcgccgatgcgatcgctgtatttcttacgcgaggttaccaacgctatcctatatcggtcgtacgaagagatgacctatattttcattcggcacgaggtttcgagactgacaggcacgcgcacggctgccggcttaggggttgtgcccttccgtcggccgagcaaggcgagacatgacgtgatggtcttgcgactatttccgggcccgagcgtccacaacaacctggaattagggcggccgaggacagccgaattcgcatcaataactacggttgcctacaacatgtgacggtttcggggaatgcgatccgccccgatttctcgacgggccacttctctcgaaacctggaaacaggagaggccgcgcccggaggtttaccttttacgttttcgatccaaggatggtggaggatctgctggatcgaggagccgtggacgaatggcgcgaggaggatgcggtgacaaaggccgaaaaacgcagacaggcggcctacaaggcaaagcttcctctgtcgcttaagcaagttagggaagctctgaaatcggcgagtgagaagacggatgacgcgcggccacgaagctgcgcggatgggaggaattcgatctcgatggcttgctccattgacggagttggattgataaacctcgtatcccggaacacatcggcgttggagacgttttccagaaaattgtcgaggttttgatcatgagaagcttgatcatgaaaaccatagcgatcgtcatcaccgcgctgttggcgacttctcccgcggtcgcgatctcacgcctgagcccgctcaagatgacgtgcgaacaggcgcgcgcaaccgtccacaaccaaggcgccgtgatttttcgctggtcgtcgcccaggggacttccgctgtatgaccgcttcgtgcggaacagccgctattgcgacgcgaacgagtatgccgaatggaagcggattccgacgcgcgaccaatcatgcccggttttgttttgcgagaaccttgatcgtctggacggcgactttattatcccggacaactcgctctgacggggtcgaacgcgcgtgccccacaagggcttttgttgacgggctacgatccacacatcattccgggcgaactcgcggatatcgtgaggctcaaaagccgatcgcgctccgcgatatcgttgatgcggtgagcaaagctctgaatggcccgcggcgatagccccgaccactcattcagcgtctggcggggcgcgccagcctaggctgctggccgactccacccgcgtcagtccgccaagccgcccgcgcgaaaccgccgatcagataagatcccgcgccgcgccctcgcgcgccctcgcaatcccgcggcgctgcaacgcatcacgaaacaccgcttcgacctgattggctgccggtgtcaacactggcggcggcggctagaagagcttcaagaaatggcaggcggtcttcaaacccggtcttcaagtcaaacagaatccgcttgcccttagcggttgctctcgctaactttttccactccgccagtatcgctgcgctagcgcgctcatgaaattcgaccgcggcgccgtccggccccactcgcaccgatgcaattccgagacgacctgcctgggctcgaatgcgggccgttcgaagcaacgccgccactgggtcggggaggtcaccgaagcgatccaacatctcctcctccaactcgtcgaactcttccttcaacctcatcttcgacagacgtgtgtaaaagcctagtcttacggttggatccgggacgaaatcggagggaatgaagccggttacgccgacctcgaaatcaggaagatcagggaaagcggcttttccgccgcgaagcgagctgaccgcctttgcgagaagctcctggtagagaccagttccgagaacctttatgtgtcccgcctgttcctcgcccaccacgctaccgccgccacgcagttcaaggtcattcatcgccacgtcggctcccgatcccagacgatcgaacttgagcagtaaggataggcgctgacgactatcatcgctttccttctcacctggctcggtcagcatgtaggcgagcccttgcgatcggccccttccaacgcggccccgcaactggtgaagctgcgccaggccgaattgatcggaacgccagacaaaaatcgtgttcgcgcgagggacatcgagaccgctttcaacgatattggttgacagcagaatgtcggcctcgccttctgaaaagcggacaaccgcgtcatccatcttgtccaccgacatcttgccatgcgccaccaggaccgagagttccggcgctatctccgcgagcattgcctggagcggatcgatgtcggcgacccgtggggcgacgaaaaaggactgcccgccacgacgtctctcgcgcagcaaggccgcgcggatcgttgccgcgtcgatttggaggatcgaggtcctgatggggcggcgccgagatggtgcggtggtaagcaggctcacgtcttgaacgccgatgagagcggattgcaatgtgcgcgggataggcgtcgcggacagcgccaggacgtggacgttcggcgaaagcgctcgcatggcggccttgtcagcggcgccgaaacgatgctcctcgtcgatgacgaccagtcccagtctctggaagctcacgttctttccaaggattgcgtgggtcgcgataacaatatcgacggtccctgcccttatctcatcgcgcgtgcgcgtgacctcgtcgttcctcacggcgcgagacagcaggccgaccgagagcccagacttctcaaatcgcttcttgaacacgtcatgatgttgtctggccagaacagttgtaggcgccacgaccgtcacctgcagattggacatcgcgacggccgccgctgctctcagggcgatctcggtctttccgaacccgacatccccgcaaatcaggcgatccatgggacggccactcgccatgtcggcgagatattcatctatcgcgctcatttgatcggtggtgagaccgtaggggaagcgcgcgcagaatttccgatactcgtcttgcggcggcactatcggtttcgttttagtttccgaacgtcggcgggcaacgtcaacgagatgcttggccgcggaccggatatcccgctggaggtcatttcgcttgcttgcccatacatttgtattgagccggtccagggtaacggatgacgcttcggcgccgtatcgccaaaggaggccaaaatccttcatcggaacgatgatcgaggcgcccccgtgatactcaagccgcgcggagtcaaattccacgccttcgacaacggtggtttcgatcgcccgcaagatcgcgaccccatgttcctcatggacaacaacatccccgatcttgagatccggcgcccgcagcgtcgaccgggtatggtcgcgttggtcgccgatgggcggcccaagaatgtcctggcaagccacaacaacaagatttcgtccacgatccacatacccttccgtccacgggatccttccgcttcgaacgctcgatcccgtctccaacagctcttgccaagtcgtggctggcacgacgttcgtgttcagcgatttgctcacccgatccgtcaatcggctcaactggggttcgtctcccactatcgcgagatgggtgccatttgtggcgacattgttgacaagctccgttagagctccgaaccctttccgacccgcttccagcggcaggtatccatccgtatcaagcagtgaccagccgggccccgagcgcgcgtcgtcccaagcctcgcgatcgaggtagagtgagcgctgcgtcaagggcgccccggaggatattcgcgcgtcctccatgatgtcgagatactcgtccactctccggtcgacgtcgtcctcgataaggaaggtggcgggtttaagcacgtcaaacactgtttcgagcgcgctgtaatttctcaacatccgtgtgtataccgcctggccatcggaggcttcgtcgagctcgccaggggcaaggattatttctgaagctggtccgaatagcatctctttgacactcgcttgcgtgcgctgtgtcgccggatcgtaaaaccagagttcctcgacgatgccgtcctcgttcagatagcatcgcatggggaggttgccgccggcgggaaatatatcaacgacgccgttaaggatagcgacctcacctggttcatcgacaacaccgtccaccgcgtagcctgtccgcgaaaggaaggcttcaaacgacgacagatcaaaccggccgccgacagcgacttcgaagcatgcagactggatgacgtccgcgggtggaattcgctgaagcaaggcttcaagtgatgtcacacacaatcgtccgcccggccgcgtcgccagccactcgcgcaaggcatccattctcattcccattgaagctcgcgatggcggtaccctatcaaatggaagacagtcccacgcgggcagataaaagagtttgctcccgagcgagaggcattcgcacgcctcgatgatgcgcttcgcacgtccgtccgagcgtgcgacgaagacgatgtcgtcgccgtgctcagcgccgacctggcgcgcgagctcgctagcgataaatgatgaattcgcggcgctatgttggttttgaggggctactggcatcgatccttaccatgtatcttggaggcgggcgaaaaggcgatagtcaacgatgatcacgcggctaggttccggatggatggatgctggttgctttcgcgagatcgcgccatgggacagagccttttgccccggcatgccctgtctactcccgcaagcgggcgcgtggcgcgtggcgggagtggccatggaccgtgggatacgtcttccaaaccccggccaccgattccatcccggacactggctatccgcgcccgcggctcttggattttggcaccgatctggcctcgctgttcgctcagacgcctgcaccggtcccggacgagtttccaatggcggcgccgaggcaacaaagcccgctttcgagcgttaatccaaaggtgaaagggaggacgttcatgtctaacgtgtcaaaagcaggtggcgacgaccacaacaatgccacaactcgcaacacattcggttcatcagtcgagagccaggcgcagatttcggacgcggcggccgcgggagcatcggggggtgaagcggaaaagctttcaatatatcggctggagccaatcgcggcaccgggtgatccgcggtgggtgaactcgcccggccacggggtcgtcatggtcgcggcccgaacgtcgggggacgctaggatcgtggccgcgagtcgcgaactcgacttcatggaagtggatgccgcgcccgctgaggatgtgacgacgttcaacgcaagcgcttttcgcgacgataagctctacaccgtgatcgaggtcgagcgagggcggaccgatatcgcccgcggagtgatcaagggcgagatctcggttgataccatcaggccggtgcaaccagactgagacgcggttcgcaacctcgctcatccatgccagaagcaacacgggatcggaagatgtagatgtcggtcccgtcagtgtccaacatatgccgaaggcgggaggcgcccccaccgaacgcaagtgcgcgatatcaggcgccctccccccggagaggctcgatcggataagcgctaccgacggccaagctcggaagcctacttcacgggggctcggcggcggaaaatccgtcccgtcattggaagctgaattcgggtcgtggcggctttttgctcgaggaggcccgcatattcaatctgatcaacgagaccgcgatataaggttgataagctcaaggcgggtcgtgggttcagacatgaacgccatttcattgcgcggatctcggcgcgcgaacttgattagccccgacgtcacgatgatccgaatgctcggccaccggctccgcacggtggcgacgagtcccagcccgtccatcgatccgggcatgtcagtgtccgtgaacagcgtgtcgacgatgttggtctcaagaagaacaagtgcctcggcagcgttggcgggcttcaagcgttcggaagccggctctgtccaggaagtccaccgtgtcgcggcgtatccgcggctcgtcctcgacaatcagaatgtttctgtttttggcatcgctccggttgtcttggcaagcaaattcgccacgcagttttacgaggacctcgcgcccatcacttgatgcgcgcgtcgcctccaataaatcgtactcggcggatgcctgatcccagtgatatttatcctgtccgaagggccggccggcctcctcccacaaagcataggcacgcctggcgatccattcgccacgattttccattccaacctccccatgatccggattgcgcgaactattagccaaacctcctcggatcaaagcagctccggcctggacagagccgaacccgcgttgccatcgacggccttcgtttgtctctcggcggctcaaacctcgttaatgtcgcgaggttcccgtcgcgaacatggcgaagcgacattctcgtgagatattgatttgatgctgatcgattggcgcgcgagccgacagctggcgatggtgaccggtgcccgacgaggctaggcctgctccaacccgcaacacccaagtacgccccgcttgaagcgatttagcgcggtaacgggaacgaacactcacccttggagtttcaaaatggaaaaattccttgaagggctgacatgacgaattctcacggcggtaagcaaattgtagccggcgactggacgcgtctcggcgcgaacttcgatggcgatggagtgaacttcgcgatattcagtgcgcacgccgagcgcgtcgagctgtgcctatttgacgagacgggaataatagagaccgaccgcgtcgtgcttccggaattcacgaacgaggtttggcacggctacgtgccgggtctgaagcccggagcactttacgcgtacagggtccacgggccttacgacccggagagcggccatcgtttcaacccgaacaagttgctgatcgatccatatgcgcgcgagctggtgggggacgtcgaatggagccaagcgcagttcgcgtataagttggacgccgaggaaaaggacatgtcgttcgatgagaccgacagcgcccagtcaatgcctaaatgccgcgtgattgacccgtccagttacgactggcaaggggacacgaagccgcgggttgcctggtcgaacacgatcttctacgagacccacgtgaaaggtttcaccaagctccaccccgccgttcccgaggagctgcgcggatccttcgaaggattggggcaccgagaggtcgtggactacatccgcaacctcggggtcacgtccgtcgagcttctccccgtccactggtttccagatgacgcgcacctgctcgacaagggtcttaaaaactattggggatacaattccctaggcttcttcgcgccaactgcccgttactacggcccgaagggcattgttggcttccgggacatggtccgcgccttccatgacgccggcgtcgaggttattctcgacgtggtctacaaccataccgctgaaggcaacgaactcggtcccacgctgtcgttcaaggggatcgacaacttttcctactaccgcacgatgcccgagcagcctcgctactacatcaacgacacaggaactggaaacactgttaacacctcccatcctcgcgtcctgcagttgataaccgacagcctccgatattgggctgaagagatgcatgtggatggcttccgttttgatctcggtactatcctcggccgtgaaccggaaggctttgatcaacgaggcggattttttgacgcggtcgggcaggaccccgttctgtctcgattgaagcttatcggggagccgtgggacatcggtccaggggggtatcaggttggtggctttccgccggggtgggccgaatggaatgacaagtatcgggatacggcgcgcgattactggaaggacaccgatggcaccacgggggatttcgcggcgcgtgtgcttgggtctggagacgtgtacgaccttcgtggccgcagaccgtgggccagtgtgaatttcattacggcgcatgatggtttcacgttgaatgacgtcgtttcctacgatgagaagcacaatgacgataatggcgaagacaacaaggatggtcatggcgacaaccgaagccataatcacggcgtcgagggtccaacggatgacctagacgtgatagatgttcgagaacgacaaaagcgcaacttcctggcaaccctgttcctatcccatggcacgcctatgctgctcgctggcgacgaattcggtcgcagccagatgggcaacaacaatggttattgccaagacagcgagcttagttgggtccattgggaaaacctcccggtctccgccgatagccttcggggcttcgtgaagaggttgatcagcctgcgtcagtccaatcgaattcttcggcgggagagctggcgcgatggcaccctggtgacgtggcttaatccaggcggcggcgaacagacgcaagagcattgggccgatcaagggagcacgaccataggcttgcgtctgacggcaagttcggacacggaagggatgaatgacgtcatcattctgttcaacccgcatgatggtgacgtggagttcagcctgcccgagagttcgggcaagggctgggtggttactttgacgaccgccgatccgatcattggggaacaagatatcggcgagacggagtcctatctactctctccgcgcagccttgtgctgctatccgccaaggggtgaacccggcaataagggtgagtgattggttgacggatggaaaccacaatggccgtcagcatgttacgccctgttctcgcctaagctttaccggtgacggtttagcatccttgatcccctacgccagcgaagataagggaactattgctcgaagcaaaggttcgggtgacaggcttgatcgataatccatactctttcctcgagatttctccgatcaagcctttcgacacgcaacccccatggagacaaccatgtccgacggaaatcaaggccctgcctggtggttcgcctgggtgggccataccaacaccaatctcggcatggcccgatttctcgcggtccccgttagctttgttgtcatcctcgggctcgtggcatggtcaatatggccgtgaagccttggaggattcgggcaagacctgattcgcgctatatcgacgaagccacgggcaacttgcgtcatcacgtcatctggtggcgacaggtgatcgacccttcaccagccgtcaccaagcgcggctgcttgaaaaaccgattggtgtttttccgagttcgatggcagtaagtaagcaccgtattcggcggcttgcgagagcctcggatcgcggtggaaacggtgctcgcgggagcctgtcaaaccaggccccgtgggcggtgccctggtcctatcgcatctttccctcattttcctccgcgggatcgaagttgatgtcccaatccttgaccggctttcttcctggaggtgtcttatgttcggtcgcgtcctcggagcctgttatcacggtgggcttagcgctgtgcacccccgtggccttgcgatcagcgacggacttggcaaattgacccttggcgtccttctcgatgtccgacatgtcattcgcctttctgcttaaggccatcggagatcttcttgacctcgggatcggcgttggtttcaccgttggcatccttggccgtgtcgggattgtcttcggcgggaaggtagccaggcgggatattttcccgcggtccttcccatcggggcgattggtcggtggtgccgggagcaccttcactttgcttgctcatacccattgtaaaactccttgtggtgaatgggtaacctcgcaaaacatcacttgttccgggttgatcatgatgtttggtttgatccgagagagacaatctagtgtctcgttccttttccagaagcgattgagagtgtcgcggccttccaggttttccacgatggcgacaaggccattttggtcgcgggagcggatggggacttggcggggggcggggctcgctcgcgccatcaaccaatctccccgcttacgcgatagccacgaaccgaacgtccccaattaaagacgccaggacaggaacgatcaggcgaccaataagtttagtggtctcaactcgccaaaggagcaccatcaaaatgagaaccgccctcgccatcgctggacttgcaatcctatttacttcgcccgtcctcgcccaatccgcggccgaaaagactggggtcaactcggtcatgggcgttgctccaaggaccgaggacttcgtcaccgaggtggcgagctccgacatgttcgaaatcgaatccagcaagcttgccgtcgaacgctcgcaggacgccgcgacgaagacattcgcccagcagatgatcagcgatcacatgaagacgtccgcggagctgaaggcgatgatcgatggtggcaaggtcaaggccgcgatcccgagcgcgatgagctcggcgcaacagagcatgctggacgatctgaagaagctcaacggggacgatttcaccaagcggtaccactcggatcaggaagatgcccatgaagacgccgtcgatcttttcaaacggtacggcgatgaaggcgagaacgcggagttgaaggcatgggccgcgaaaacccgacccgcgttggaacatcatctgacgatggccaaggacttgaataagtagtctcggatatcggattcaaaacgccgtggaccaggaaatccacggcgtttcggtatcgacgcattcgagcgcgttattcgttccatcgcgacgcagcgttcgatggtacagttcaaccttcgcctccaggctcgacgccgttggaaccggtccctgggaatgccagacgtgacgatgtgcactccgtcgcacgcgtgccaatgatgtaggtcccgttgaaggcgaaccacttcacagagggcgggttgtcaccaggacgcaagcggccagcgcggcggcgatccgggcatttcgattgggcaagcagtcactggctccctggaccctcgccgtcttcgacggctcctttcgcgggcgtacccagcgcttccgacgacggagttttcctcaaatcgcccgtggccgaaggcgcatccggatcggcatcgtctccacgcattgccgaacgcagtcctttcgcggcttttttcgccagctcctcgcgccgctcgtcggcgccatccgagacgcgccgctcgtcggttccggcctgtttcgatccagtcatcctatgtctctcgtctgtttgaggagggatgcattgcaaaccgcgctggcatccaaaggttccgtcaggcgtggtccggcgcgcttgccccttcccaatcgagccccgagagcggcagcgaccaggccgggctcggcctcagtaccatggtccggtcaagaccactgacgttgaacgccgtcgacactcggaccgcgacgggaattcctcctcggaagggcgcactcggcacaaaagttcattcgatgtcagattcggatggccccggtttcaaaagcctgcccgacgattagcgcgataggcgtcttttattgggaacaacacgaggttttcgaggttcatgggttccacaacgaaaggaaacaccctgtgctcggggagccggctccggtgaagggcgaccccggcggcaagtcccgccgatcgttgtgagcgacttttccaacccgcctagaaatgtataggaaagctaatgaaaaaggttcgaaatccgattaacgcatcgcgacagcgttctggcctggaacggccgacagaggatcccggcgcgcgggaaggcctggcccccgcgcccaatgaaggggagatgacgtcacctagcgagcctagcgtgttcaacagcgaggatgaaacggtatctgtccacgagcgagagcgcgacgagtggattagcaagcgagcctactcgttgtgggagcaagcgggccggcccgaagggcgccacgtcgagcattgggagcaggcagttatcgatttcaaggaaaaaggaaacgttgacggggaagacgctccagacggggttggcgcgcccggctcgtcagggacgtcgcgcgccacatagcagcgaccgcccggcggacgttgcccggtccgcgccaccttttgccttgcgagcggcgcaacaccggagcccacgtcgttcaactggcgcgacgatgatcgcatcgccgcggatcgggagcgctcctcccttggtgtcaaacgtattggagagtatccttgaaccatatctggcttatcgccgtcgcgggaggtgccgccctactgggattcgcgctcgcgtttggaatgatgaaagaggatccgagacgtacggcgttttcgatcggcgtcgcggtcctcttcgcggtggttgcgcttggagttgcccttttcgtgtcatccttcgcgacggcaccgatccgcgccgccgacagggagcattccgaggaaaagctgccggccggccccacccataccaaggagttgcctgggaagtaacggtctttcctcaattaggtcctcgcgccgcccgctcttcatccggctcaaggcgccgggggcgggaggtcgctcacgaaggtgtcggcaatgagggtgcttggtgttttggtattgattgcatgctgcgcgggcatgtgtacgacagccgcgtggatcgcgacctcaccccaaggggagtttcttcctggagaccctcgactggccggcccaggggatatccgtcgaggagaacagatcttcacggccgcggattgctcctcttgccacgccactcccggccaaaccgaccgccttcaccttggaggcgggctagccttggcatcgaccttcggtacattcaggcctccgaacatatcggccgacccgattgatggaatcggaaattgggacgtctcggacttggcgaacgcactggtggcggggatctcccccaccggcgcccattactatccggccttcccctacaccagctatacttcgatgacaccgggcgacatacgcgaccttcatgcctatctcaggactgttccctgggttaagggccgcgctccaccgcatcatcccagccttctcttcgcgatcaggaggtccgtcggagcatggaagcttctttttttcagtaagggtcgctccgccgccccgccagccaaggcggacaagctgcttgcccgcggctattatctcgtcgagacgctggcgcactgcgcggagtgtcattccagtcgaaacgtcgtgggcgcgataatcccggaaacacgatttgcgggcggaattgatccccaaggcacgggctacgttccgaacatcacggccgctcgtatcgcggattggagcgaggaggatctcgtgcggatgttgacgacgggcgagacgcccaaccatggccgggtcggttcctcaatgtccgacgtcgtggagaacacagctcgcctcccggaaagcgatcgcgaagcgatagctcattacattaaaacgttgggagcgattccctcgccgcgaccttgagcttagtgggtataaagataggcgaccaggtccctggcttcgtcgggacttatgccactcgccggcatcgccgttccttgagcgtactgctctggcccaacaatccagcgccgcgcgttttccgcgttgttgggcagggtcccggctatgtaaacgcgcgcccgcaaccccgacagcgccggcccaacctgaccatcggcgccaggcacgccagggatcgtatgacagccagcgcaaccgtaacgtcgaaaaatggcgggtgcccggtccagctttcctccggtcatcaaaatcgcggtctcgcctatttcatggcgcgtcttgatgcgattgaccatcaggaacgacactgccagcgccgtgcacagaaggcatgtcagcaaagcggggtaacccgtcaacctacgcattttcgatccttgtgctcgattgcttgatccaagccgataggagaaaaatcgcggctcccgcatagaccgtgcccgccgggatccacattaaaagccccgccatttgctgatcttgcaggggcgaaattccccactcgcgggcgtcggcggtctgagcgacataaagaacacgcggcgagagcgcgatcaacgcgcccaacacgctcgtatgcatcatcgtgacgaagagatgccaagccgcgacaccccgttcgctgcgccaaatcatcgcccaccagaagaagatcgccgtaatgaaaaacgccagatgctgggcccgatgcgccgtcgtgtccgcgatggaggtgtccagcagcacgggtgcgtgccagacccatatcgccgcgccgtgcagcagcgtcgctagcaagccgccagttagcgacgtccatgcgacacgaagcggggcagcgttgaacatccggctcgccgccagacgcccggctcgcggaagcgaccacaccataaatgccgccggccgcgaaaggacgataagaggcgccgatacggccatcacgatctcgtgctcgatcatgtgcacggcgaaaagatgttctcccagccaatggatcggcgatatcaaggcggcggccagggagatgaggccggcatggaatgccaggattcgaagaaccggcgagcgcctgttgacgcaaacgcgttttagcaatcgacggctacctatcatggacgctgtcgcggccacgcagatggggacgatgaccagggggtcgaaggtccacggatatgagcgcgcgtgcgtttctcccccatgtgcgaaggcattgccggacacggcgatcagaacggcgaaggcaatcaacgtgcgcatgggtcgaccaacattatcgcggctccctgtagactgatcgcgaacatgaacatggccgcgagaagctggagcgcgcgaccaaccttttcgccaggggttcccaattcttgcctacgccctagaccgaaaatcgatccgaaggcgctcagggcaatcgccgcggcgaacgagacgagcatccagctcgaacccgcggcgcagtcgcgccacggaagtatctgtccgagctgcgtcgtggcggcccaggctatcggcgcgacggcaaggccaacaaatcgaatggagcttggggtcataggcgtgggacccaatagatgcagccgtagattggcagccaagccacgacaacgaagttccagtacatggcgttgtccgccacgtcgtcatggcgacgcgcgttgtccgagtgccttgtgaacatcaagcaagtgagaaccaaggtttcggcgagatcggttagaacatggctggtatgaagacctagcagcaaccagacgatagagccgtaggcattgcgatcccatcccacgtgcagtgctggaaactcatgaattcttatgagaagtggcgctatgccgaggcaagacataaccaagagaccagctcttgccttcggcaggtcccgccgctttgcccagcgtgacaccaggaaatttggaacgaggctggccaacaacaagacggtgatggcggttcccgcccaaagatccggtcgcggcgcgtcaatgggccatgcgggggcaatgctcatcaaatagagatacatgacgatggcgagcgcgaagcccgtgccctcgatcaccatgaatgccagggtaccccaccatgcggggctagcggctccgcttgcgtgcgacgtgagcgtggaaacgtcacaaaccactctctccttcatgactcgtcctccggcacgccttttggccagaaccagcctatcaaggcaatcgcgatggggatcgagccccacacaaccgcccacggggtgaatatcgaccaaaccagaaccatggatgcggccaccgcggcaaggagcggccaaatggaatcgcgcggcgatgactcccttgcttgcggcgtcgatgacgccacggtgctgacgagcaactcgcgtcgatcgacacaaaggcccgtggcgacacaaagttcctcatcgtcccagaggggctcgcctgaacgcacgaccggaatccgcgcgaagttgtaaggcgccggcggagaggccgtcgcccattccagcgtcggggctccccatggatttgggccggcgaccgggccggttcgcgcgcttcgaacgacatcgatcgcaaacaggagaaagccggacgccaggaccagcgcgctgaggctgatcatgaggttcagaccactccaggcaagctcgggttggtaggtgtatacgcgacgaggcatcccggccagtccaaggacgtgcatgggaaagaaggtgagatgaaatcccgtgaacacgagcgcgaagacccaacggcccaaattctcgctcattgtccgaccagtgaattttggaaaccaatagtagatcgcgccgagcaggggaaacaccgcgccgcccacgagcacgtagtggaaatgcgccacgacgaaatacgtgtcgtgaacctgcgtgtcgaacggcaccgaggcgaccatcactccggtcatcccgccgatcacgaaggttatgatgaagccgaaaacaaaaagcagcggcgttttgcagacgggccgacccagccagattgtcgccagccaacagaatatttgcaatcccgcgggaacggcgatcgccatgctggaagcggtgaaaaagctctcccctaaccgtggcaatccggcaacgaacatatgatgaacccataggccgaaggccaggacgcctgttgaaaccagtgccatcaccattgacaggtaaccgaaaaccggccgccgcgtgaaagtcgtcacgatggtcgataccattccgaccgcaggaagaaatatgatgtagacttcggggtgaccgaagaaccagaagagatgctgccacagcaggacgtcgccaccctcggcgggattgaaaaactgcgttcccaccagtctgtcgaggatcagcgaggtactggcgatcatcactgccggcatggcgaggatcaccatgaacgacgtcaccagcatcgaccatacgaacagcggaacgcggtcgagagacatgccaggggcgcgctgcttgaggatagtgacaacgagttcaacggaaacggcaagtgccgacacttcggtgaaggtaatcatctgcgcccagatgtcagcccgctttccaacgccatattgggggcccgacagcggcacgtaggcgaaccatcccacgtcgggaccggcatcgattatgaatgcagcccataaaacaattccgccggccaggaacatccagtacgagaacgcattgagccggggaaaggcgatgttacgggtcccaaccatcagcggcacgagatagaccgcaatcgcttccatgaccggtacggcaaacagaaacatcatgttggtgccgtgcatcgtgaatatttggttgtaccggtctggtccaatgaatcgcgcttcggctcgcgacaactgcagtctcatcaagagtgataaaattccgcccaggaacagaaacacgaacgccgtcacgatatagcggcgacctatgatcttatggtcgaccgtggacaaggcaccccagaagctccgaggcgtacgccagatcgctgtcaggtgccggtcgacgtcggccaggtcaaggtcggtgtcacgaagatcgttcgcacggtcatgagccgtcatttgaggctctccaggtaggccgagacggatcgcaactcgtcgctggtgagagggactgcgggcatgttgttgccaggtttaagtgtttgagggtcggcgatccacgcggccaacgtacccctcgtccggtcgaatagacccgcgccaatcgtcccgcggcttccgacatgcgtgaggtcggggccggtcgtcccgtccgcggtggtcccgcgaacgcggtggcaggccgcgcaaggctttcgcaggaaagcagccttgccgcgcgccagctccggctgatctggcacgagactttcagcaagttggctcgcataccaccgacgatatgaagcttcatcgtcggccatgaccaacagcgccatgtggctgtgctgaagaccgcagaattcagcgcattggccgcggtagacacctggtcgatccgcgtgaattgtcagggtgttggttcgccctggtaccagatcctgcttgccggccaggcttgggacccagaaggagtggacgacgtccgcgctctcgagttgtagccgcacacgggtgcccacgggaatatgtatctcgttcgccgtttggaatgccgattggccatcttggagataggtgacgcgccaccaccattgctcgcctcgaacgaccaccgtcatctccggctccccgataccgtcgatcagccgcgtggtgtagaagctcgccaccgtcaggccagcgataatcaccgccgtggcgacgaccaacgaggtcacgatgaacctggcacgtctgtccgagcgggcggcgcggtcgatcggagaggaccgatgatgaagaaccgcgtaggcgagagccgccacgacaatgaccccacaccgtcacgcccacgaagatgaggatcagcatgagctgccttaggtggaccgcgggctcgccatgaacgtcgagcgctgactgtgttcccgcgcagccggcaagtgtcccgatgacaaatatgaggggtatctttccattcacgggcttggcccttgccgcgggtggacacctatcggaccctcttcgaacaacatgaccgccggcccgcggttttccgcgggccgcgcatgcttggcgtcatctcgtccgggagcactgactttcggtgtgtaggaccccatggactgaacatagccggcgagctgccagatctgctcgatcgggatgcgttcacggaaaggcggcatgccgtgcggccgtccgtcacggattgacgcaacgatcgaaaccatctccgggccataaagccaccagccatccaggaaagacgggccttgcccacctcgtccgtcgccatgacatgtggggcagccgaaccaagtataaaggcgcttgccttggctcaggttataagcgtcgttttcgtatggttggccgcgcgcgaagtctatctcgggcggcgctccacttatgccgttcggcatcagcctgaaaccgtccagttcggaattaacgggcggatcgagccggaaccttctgccttcgtcgatccagcccatcacgccggcgcctacgataagcgcggcggcaacacccgaccaagagatgacatgcgaccaagtgacggcatgccggatcggcgaactttgatcacgacagtccacgggttgatcgcgatcgccgcgtggagcgcgcgccacgcccgaaaatcctcggcgggctgggcgccacgtcacgaacaaggccaccccaaccagcagcatcgtaagcccgtttataagcctggaagatgttatgatcatccttcttaatcttcacgttagtcgcgaggtgcctccgaggatcgggtgaccgtgacaggaagcagcttgtaggacggggttttggaccttgggtcatggtggtccaagggaaatagcgggttggcctccggaaaataggcggcgcacgagcctctcgggatgtcgtactcgacaattcgaaacccgtggaccatgcgtttgcttgatgggtcgatcgcggtgacaagatcgaccgacatcccgttctcaagaccaagggccgcgatgtcggcggcattcatgaatacaactcgcctcgttccatccacgccccgaaagcgatcgctgtagccatacacggtcgtattgaattgatcattggaccgaagagtggccaagtgaagaacgtcggtccgtccctgcgttgacaggtccgggaaaagcctccgcggcgtcaagaaattcgccttgccgttcgcggtgacccactttcgttcgcgcgccggaacgggtcgaggaaatcctcccggcttgaaaagccgcttgttgaagtccctgaaggtttcgggatatgtctcctcgatcgcatccctgatcttggcgtagtcgtttgtccactcgtcccaaggaacgctatctgatcgcaacgtggccttggccagccccgcgatgatcgcgggttccgagagcagctccccgctcgccggtttcattttgccaacggagccgtggaagtgagcgatcgaactttcgatcgacacggcctggggacccgtggcctgttgatcgatctcgatcctgcccaggcagggcaagaggtacgcgatttctccgtggacgacgtggcttcgattgagtttcgtcgcgatctgcacggtcagtcgcatttttcgccaggctcgttccattgcgtcggtttccggcgccgccctcaggaaattgcctccgagaccgaggaaggcgcgcgcctcccccccaagatcgcctgacaggtctccactgtcgtgcggccagtccatcgaggcggttcgaagtggtagagctcggagagcttgtccaagggtaccagacctggcttctcggttatgcccacggttcgttgcccctgcacattggaatgtcccctcaccgcgcatatgttcgcgccgggctttccgatgttgccacgaagcaaggctagattggcgaccatgtggaccgtctgaacgcccatgagatgttgagtgagacccatcccgtagacgagtagaaccgccttggcgttagcgtatatggtcgcggcctgctccatctcttgacgtgagagacctgagattttttccagttcgctccagtcatggccgcgagccgcggcggagaattcctcgaagcccgccgtatgctccgctatgaagtcgtgatccagcacatgtttcttatccacggccgccatcgaagccgcgaacgctaccatcgcggcgttcgagggatcggcgggttgaccgtcatttcccgccacttttgtgctggtttcggcgcgaagggcatcgtccgcctcgatcaaggccttgcatataccaaacagcgccgcgatatctcctccgttgcgcacctggtggtagctcgacgagatcttggtttcagggccgcctagcatttgcgtcggcgattgcgggttcacgaagcgctcaagccccctttcccgaagcatgttgaaggtcacgatcgggacgcctcgatcgaccgcgtcctgcaggtcatggaggagcctcggcgacgatgtcccaacattctggccgatgtaaaatatgcaatcggtgttttcaaagtccgacaggatcgctgtcccgacggaggcgccgatactttccggcagcgctaccgacgaactctcgtggcacatgttggagctgtcgggcagattgttgctgccatagatgcgcgcgaacaactgatacatgtagctcgcctcgagggacgcgcggcccgaggtgtagaagtcgacttgccttggctcgaagccccggagttccttgcctatttccgcgaatgcttccttccatgaaaccgggacatacttgtccgtcgaaggatcccagcgcatcggatgggtcaagcgaccctgctcctcgagatcgtgatcgcgccatcgctcaagctcgctcaatgtgtgggatgcgaagaatgccctgtcagctcggcgatcggtgatttcccatgcggtcgcctttgctccattttcgcagaactcgaggggatgggttttcgcgggcttggcccatgcacagctcacgcacatgtaaccttgcggcttgttttgctccgatagccttctagcgcctaaggcaaccttgcgctcccggagcaatatttcggcgacggatttggccgatccccagcccccggcgggtcctcggtaacgcttgatcttgggtggatggcctggtttcgcagacatggcggtccctcttttgtcggcaaaccacgaaacgtgccgtttgttcccgatggtcatggggtggtccgcgtatcgaagccggggcggctccacgcagcctcgctcgatggtaagattggccgacagacgagcgggaagcgtgcctaaactaacgttgggccgtggaacgtaaccacaccagtcccgtggaactatccttcatgaatggtgttgggacttgccacgccagcgaaatattttcttggctgctgactgtttaaccactggagagaagcctagtgcgacggcccgccctgagactgcttgtcggaaaacgtgtcttgatcgttgaagacgagtatttcctagccgatgagacccggcgagaactggaaagcaatggggcggtcgtcgtggggccggtgggcactgtcggcgccgccttggagttgctcgaaacggaacaggtcgacgccgccatactggatatccatctcgccgacgaactcgtgttcccggtcgccgaggaacttgaacgacgagaaattccctttgtattcgccacgggatacgacccttcgatcctgcccttgaagtttaccggtttcgcgctttgcgggaagccaacggaactcggcaccatcgccgaggctttgttcggcaatggtccggtggaccttcactgacaccgtctatccgagcatgccggccaggcgcgcgcgggcgcggctcaccctgctcttgatggtgccgacaggaacgtcgcaacgctcggcggcgagttcgtagctcatcccctggatcagcaccagatccacgaccaagcgaaaatctcgcggcagagtgtcaatggcccgctccaattcatgggctcgcagcttccaatcctgggtcggtggtgaccaaacctcgccagcgcagtcatccaggccgccgacctgttccctccttgagagcttgtatttcgtgcagaaggtgttgcgcattatcgtgaagagccaggagcgaaggttcgaaccgcgctggaaccggtgcgagctcccgattgccttcgtcaaggtttcctgaacaagatcgtcgacgtcgctcgccccccgatgaaatcgccgagcgaattgctgtaacgcgggcagaattgccatgagttcggcttcagtgaaaccagtcgcgcgatcatccaacatcgttgctctcccttgtcggatgaacatcccttgcgggcagtcgttccatcgacacgacgtttcgtctccgaccgtacagacaggcacgcattgttggtgatttcgagcggtcatcgcggggttgccggagacaccgccacggcttattcgcgaggcgacgatcttccagccaagtcaggggtttgatcgcccctcgcgcatcgcctcgcagattttcaatagcagggggagcttggatagctgatccaaatcgacagacagctttggcttccagttcgggtaactgtcgctcgtgccgggaatgttggttgggcgcttttcgtcagtcatgtcggccaaccgaacagcggcgagcatcgaggaggtcttggcgatgaattcgtgcgcgctcacgaccaattcctccaactttttgtcgttggtggtcaccgctggcggatcagcgggcgggtgcgtgccggtaatgtccagcgcgttcttgagatcctcccgttcgtgacgccgctcctcgacatgggctttcgtcacatccggggggacgatcccgtgtcgcagtcgcgcttgaatatcggcgccacgccaccagccagccaacgtttgatgatcatgggtcgaaatgcacgcgatagacagccgaggataggcgtcggcgggcttgaagccgtgctctccacgctcgtaggacaaaattcggtaggataaaactccagccgcggccagatcttcccgaaggccgtcggggagcaccccaagatcttccccgatgacgatacaccgaaaccttttggaggtctcggccagaattcgcagcagttcatctcgcggatagtcgacgtaagcgccctgatccggcgtgcattcgatcggcacgagaaacagacgtcggagcgccgcggcgtgatcgatcctgatggctcccgcgtagcgcatcgccgaggacagcatgcgccgaaaaggcgcctcgcctcctgacgccatggcggcgggatgaaaggccgccagatgccaatcctgtccttgcgtcgcgaacgggtcaggggggcttccgatggtcgcgtcggagatgtaggcgtcgcgctcaccccaggtggccgacccatcgatcgcctcgccgacagccagatcgagatagaggccaatccggagaccctcttggcgcgcggcccgcgcggcagtcatcagttgccgatgcgcatgccattgcagccacatgtgaaagtcgattgtttcggcgtgttccttggcgaaaacggcagcctcggagctggtggcgcgctggtaatggaccggccatgatttccatcccgtaccccgtccgagcccgcccatgtgggacgacagggtttcaaacatggcgtgccgtcgaagactttcacctccgtcctcgacgaaagcgtcgaactcccgccattcatccgccaactcgcccctcgccgcctggaattttttccatagatcacgcaacaccttgatcttcgtctcggcgacgccgacatagtccacgaggtcggttcgtcttagcgactccaacctcgcgtccagttctgggctgctttcaaaacccgttatcttgtcggccgctatgtacaacggattgagcatttgccggttcgatggttcatagggactgcatcgatccgggtcggccaggaacggcgcatgcagtggattaaggccgacgaagtcagcaccctgggaagcagcgatcgtgatcatttgaacaagatcgtcgaagtcgcccatgccccagttgcgcgccgagcgaagctcatagagctgcaggctgatcccccagacccgctttccctcgagaaagccgggcagaaacgacttgggaacgatcttttccaccacttgccttggtgtgggcttgggggcggtttggcgggcggggtcggtctcgacccctaacgcggccagaatttttcgcttggtggcgtccgtgatcggcacctccacattctccgggctcggccttgtaaggctgatcccgtgttctcgcgcaagctggtcaagattcggttccattatttttctttctggaatacgctctcgcatctcaattggccgccggactaatgttggctgtcacggcccatggcccgaaaatctcgtcggtggccgcaccacgcgagaaaatgacttcgccagagggtggtgatggcggtgttcctgtcttatccgaaaggttcgcgagcagacgtagcgttgacccattgttcagcacccactcggcaacggtcatgctcccatgtcggtggtgccttcccaccccgccaccggtccccttgagcaagggaacaatccgttgatgccgcagcgtgagaagtgaccgataaagcgcgagcatttccagcgcttgtggttcggcgagcctggaccagtcgagcctggccatttcgaacgtcgacatcgcggtcggatcgagaagctcatcggtgtcgaagccgggaagacgagacagctcctttcggcgtccctccctcacctttccgttcaattcttcattgaaatcacaaaaatatggaaacggctcgcgcgcgccccattcctcgcccatgaacagcatagggatctgtggcgacaacaaatagagcgtcgcgatggccttgagccggtcgagcggccggtatgtgatcatgcggtcgccgagcgcccgattcccaatctgatcatgattttgaatgaaggaaacgaaggcggtcggtggtaggtcgcgtgtcggcttgccgcgatttccgccacgatatggcatatgttcgccttgaaacacgaaaccctgcgcgagcgcccgcccgagcttgtcaggctcatcggcataatcctgatagtagccgaacgtttcgcctgtcgccgcgatgtgcagcacatggtgcatatcgtcgttccactgagcggtgaataaggtggcgcgtccagtctcgtcgcgctttaggagatcgctgtcgttgtcttcgttctcgacgacgaggtgaacatgccgtttgtcggccgcccaccgaacacggcgcgcaagctcgtgcaaaagatgttcctcgctgtcgtccttgatggcgtgcacggcgtcaagacgcaaaccgtcaaggcgaaattccgtaatccagaaaatcgcgttctgaatcatgaattcccgaacggcggccgaagcctcgccgtcataattaagaccgttaccccagggcgtcttgtgatgttcggtgaaaagcggcgcgtaattgggaagatagttcccgtccggcccgaagtggttgtagacgacatccatgaagatgcaaatgccgcgttggtgagcggcatccaccagcgccatcaaatcctccgggcggccataggtggcgtcgggggcataggggaggacgccgtcatagccccagttgcagcggccagggaagtcactgacaggcatgatttgaatggcggtaacaccaaggctcgccagatggtccagtctttcgatagcggctcggaacgtcccctgcgcggtgaacgagccgatatgggcctcgtacagaacgacttcctcccaaggccggcccggccatgaattcgtgttccatcggtgggccttcaggtcgacgagttcacttgggccgtgaacgtcgtggggctgatggcgcgaggcgggatcggggaccgccgttccgtccggtaaaatgaacctgtagaggtcaccgggtcccacttcagccacgcggcatcgatgccaaccgtcatcatcccgctccattcgccagggctcacggccgtcgacgctcaagagaaccttatccatgaagggggcccaaagccgaaactcgacgccgtcgtcaagaaaccgagggccaaaggaataatccatcacgacatcacctcgttatccaaatacatgttgaaaccgacgcggcactcccgcccgacgttcgaccaaggtgggcgaccggacgtgccgagatccttgagacccgaaaagacgatcacgtcctcaccgtccttgcccggccgtggcgccggttcttgacgggtgaccggccttcgggcgaccgacgcgtctctcggctccttcgctttccgcgtgctcgtgcgaaatgtccgcatgaagctggatggcttggcgcacacatcccggtcgcgcgcgagtgctccgaccttcaacccttcagcggcacgtgccaacgccgcggccctcccaatcgccaggccggctccggtgacaagcgctgctggtggcgtcatttctagcctccaataatgtagatggtcgtcaggaacccgtgacattgatccgggttccccggccgggggcgttggctggatgaacaagacctgatccgtgatgcgactggagccgttggcgcggcaggattgcgttgaatggacgggcaagcccggttccaagtcgcgggccagcggcgattggaaagtcagcgcttggaatcctccgcgttgctgtcatgcaagtaccttggccaccacggcggcctccacgaatgcccgtcgagcgagctccgggctgccgtggcgggcgatggcgtccacgcaacggcgcttggcgatcgcgtattccgggtaagtattggatggccagcggcgaagaagctccgagagtgccgcgtcgggcccgtctatccgttcgcggaaccctgttcctatcctcacgaaaacgggcgtctcccaggtaacgtggaagtccacgtcaataatcctttccatgaggggctcctttcttgacatctttgccgacaaaccacgcccgggccgccaagttcctccaccggtcggttcgtgcgctaacggacacgagccatccggttgggaacccgtggcgaaagccagggttgggtgggtgcaaccaaaacacatggagatcgaaaatgttctatactgacgggaaactgcaattccccgtgcgcgttgagacgcccgacccgcaattcgcgcgagccttgcagcaggcgatcggcggggttgagggagaaattcgcgtcgccatgcagtactttttccaggcctgtggagcccgtggcaatccaaagttccgcgacctcttgatgaacacggccgcggaggagctgggacatatagagatgctggcgaccgccgtcgcgctcaatttggaaggggcgccggtctcggtcaaggacgaggtcgcggcggacccggtggcgagcgcggtgctcggcggcctcaacatgaagaacctgctgtcggctgggctttccgcgatgcccgtcgattccgacggcgtcccgttcgatatgtcgcacatctacgccagcgggaacatcgcggccgacatgaccgcgaacgtcgcggcggaatccactgggcgggtactagcggtgcgtctcttcaatctgacaaacgacgcgggcatgaaggaaatgctttcctacctcatcgcgcgcgacacgatgcaccagaaccagtggttggccgcgctcgaggagcttggtggtcccaccggcgtttttccaatccccaacagctttccccaagaaaaggaacttcaggaattcagctacacctatctcggctttcaagccgacggcagcgccccggccacgggtcggtggtcggaagggccatcggtcgatggcaagggaacgtactcgatgcgatctctatcgccgatgggcgagacacccaatcttggatccgcgaagccgaacagcggcgcgcaagccgagcaactttgataaaatggcgggcttcggcccgcctcgccggatgagcgatgaaggatattttccagcctttctgtctgcctgaccgcgctacccgccgcgacttccgatgacgcgcgcgaagcaggaattcgcgcgaaaggtcatcacgtcaaatctgctcgagatggatgcggcgaaagtcgaagtcgccagggggcgagcgaacgatgccacgttcgcccaggatatgccgcggaaccacggccaagcagcgacgccgctctcggaagccgccaggagcgatgctgtgaccgtcgcgcgatcgctcgacttggagcatggaaaaactcgacgcgttacgagcgagcgacgccgctaatctggacctggcgtgtctctcgacgcaaatgatcgctcatcagcagacattcgaaatgttcgaggcgtatcagagggacggtccggagacggttccttgaggaactcgccatgcgatgatgccggacccgcgcatgcatttagctcgtgtccagggattagccaacacatagagatactcacgacgtgtcggctcgcgttatttgagccacctttgggatttagtcatgaggtaatagtcgcgcgacttgccacgggatttttttgcttccgcgctcgtcaactcctattccttgatgaacatgagcgtggataacggcggcaaatcggcttcgatcgagaatgaacgaccgtgagcgggtacgggttggcccgtggcatcgcgagcgtccattcccgatccaccatagaccacatcgtccgtgctcagtatcctacgccacaagccatccaagggcacgcctatcctgtaggcgtggcgaggcacgggagtaaagttcgatacaacgaggcaagcgctgctccgcgtcttatcgtaccggaccatggccaggacggatcgctcggaatcgtcggcgaccgcccactcgaacccatccgaattcagatcgccgtgctgaaggctcggaaaatgcgaatatacccgattcaggtcccttaccaatcgctggagccctcgatgacgaggatcgtcgagcagatcccattcgaccgaaccctcgtggttccattcacttcgctggccaatctcgcaacccatgaacagcagctttttgcctggatggccccacatgaaagcgaacagcgctcttagattagcgagtttgccccattcgtcgcccggcatctttcccagcatcgagccttttccgtgcaccacctcgtcatgggaaaacggcaacacgaaccgctcgtcatatgcgtagatcatgccgaacgtcatggaaccgtggtggtattttcgatagaccggatcatccgacatgtagtgaagagtgtcatgcatccaccccatgttccatttcatgtcgaaacccaggcctccgtgggcgggcgatcccgtcactttcggaaaggcggtggattcctcggcaatcatcaacacgttgggatggcgttcgtgaacgacgctgttgaggtgcttgaaaaactcgatcgcttccaggttctctcgaccaccaaaccggttggggatccactccccttcagggcggctgtagtcccgataaagcatcgaggccaccgcgtcgacgcgcagaccatcgacatgataccgttccaaccactcgagagcgctggcgatcaggaagtttttcacctcggatcgtccaagattgtatatcagtgtgttccagtcccggtgatacccttcccgtgggtcctcgtgctcgtacagggcggtaccgtcgaagcgggccagtccccatacgtcgcttgggaaatgggccggaacccagtccaagataacgccaatgtcgctctcatggcatcggttgacgaaatatccaaagtcctcgggcgtgccgtatcttcccgtgggcgcgaaaagtcccaagggttgatatccccacgatccgccgaacggatactccatgatcggcatgagctcgatatgggtgaaccccatctccttgacatacggcaccagtcgttgcgaaagctcgaaccagtcgagcgaccttccgccgtcggacatctccctcagccaagaccctggatgaacctcgtagatcgagatcggccgatccatgacatccgtcgtcgcgcgtttctccatccatgaagcgtcgcgccacctgacaggttccggcgatgcgaccacggaagcggtggaaggggcggcctcggcactgcgtgctactggatcggctttctgggctagcaggttgccgtgactgtcgacaatctcgaacttgtagcgctcgccgacggtcaagccaggaatgaagagttcccaaacccctgcttcacgccttagtctcattggatgtctgcgaccgtcccaactgttgaaatcccccacgacggagaccctgcgcgcgttcggcgcccaaacggcgaagcggacgccctcgacgccgtcgacgacaagcgggttggcgccaagcgccgacgaaaggcggtaatgagtgccctgcgatatcaaatgcagatcgagatcacccaatagcggtgcgaagctatagggatcctccgtctcttgtgagccttgaggccagataatcctcagcctgtatgatgctccgccctccagggccgcctcgaacaatccgccggcgtcaaccagcaacgacaccgccaagaccgatccgtcgccacgatcaagcaattcgacccctagcgctccaggagcaaaggtacggatttttaactcgccgtccagcgccgggtgaggtcctagaaccgcgaaggggtcgccgtgcctgccctcgacgatcgcggcgagttcgcctggatctagatccgatgtcatcaccacctcggtctccatcatgcgcgatctccccgcgaaggtgaaacgattttcgaaaatccaaacagtggtattggcagccattttggtcgattgcgcgcttcgtaggcgatttcataggctgccttttccaggaggaaaatgtcgagaagctcgccgactgttttcggatcgctcggcagctccggtgacgccgaaagggctcgggtatagttttcaaggaacgctttctcggcggagcctccgaaccgactgatgactagccgccgacgctcgtcgtgatgatcggacaccgcgtcgttctccagggtcgccgtcgccacgaggtagtcgagcgaacgcagcaggcccgccgcgtcccgcagtgggcttgtcttggcgcgacgttcggcgagatttcgcgctggttcgccctcgaagtcgatgatgacagcgtcgccctccgacaccaggatctgcccgagatggaaatcgccgtgcgcgcgtgtcaacaacgtcgccgcggatttctccgaacgctgggcggcaagctcgagaatctgctccttgcgagagagtaagtcgcgaacgccttcgtcgaccgcgtcatcgccagtatcgcccagttcccgcaatttcgagaaagcgtacgcgatctcaccggtgaccgctgtcttgatggtatcgacgtcagtcgacgaggcgtgtcgtggcgcgaacgattggtcatcggtcggtttggccaggagcacgtgcagctcaccaaggcgttggccaatcatggcaacgaaattgaggagcgggtctagctggtcgtcggcaagatcgaggccggcttccgtggtcgccacctcgtccgcgatccgcctcagattggccagcatccagttccacgcgtcgccttgattgcggatcgcgccttgaaccacgacgagggtcgaccgtcgaccttctccatcggtgcgagcgacctcgccaagaaggggcgcggtatgtccatagcctcgctctgtaagaaagcgggtcatctcgacttcggggtgaataccctcgaacacgtgcctgatgagcttgatcatcgcgacgtcgccgatgatgagcgaactattggactgttcggccgaaagccacctgatttccatttcgtcggtgatctcgaggcggtcaagatgctcggtgccaatatattcgatcgtaccggaacgaccggtaatcatcgatctgtttttcaggccctcgattatccctcgccccatggattccacggtaaagccgtccgtcagaaatccgacacgccgcccctgtctaatccttgccaaggcaagctgctggccaaggatgttggtcgttgcgtcgtcccattccacggcgagtggaagttgatagctctcgacgtgatcaggtaggacggcttccagctcgccgagcacgacgccatcggcgaaggggatcggggtggctgaaaccagccttgccgattgaagcgattggtccttggcgccaaaccaacgccgtctggatagatatgctggaaggatgtcgccgctcaaaacccgttcgtgccggggttcgtccacgagctccgtgaggcttcggcgtatgacgaccgtgtgaaaatctggaagttgctcgggcggagcggtgcgccacgctggaccgtccgattgatcggtgagttgaaaccagaaaaagccatatggcggcagcgtcagaagataggtgagctgtccaatcggcgggaaaggcgacatgcccgtcatttcgacgggcactcttccctcgaaggtcgagaggtcgagctcgacggcttggggtactctcgacagattggcgacgcacaggatcacctcgcccgcgtattcacgaagataggcaaggatgcgcctgttgtccggcgtcagaaatcggagcgatcccctaccgaaggcggggtgtcggccgcgcagcgccagcatgcgccgggtccagttcaacaacgaatgcgcgtcggaggtctgggattcgacgttgagggcctcatagccatattgagcatccgatactggcggaaggaccaggcgcgccggattggccttggaaaagccgccattgcgatcgggagaccactgcatcggtgtgcgaacgccatcacgatcgccgagatagatgttgtcacccattccgatctcgtcgccgtagtaaagcacgggcgtgccgggcatcgacagcagaagcgcgttcatcagctcgatccgcctgcgatcgcgctccatcagcggcgccagacggcggcggattccaagatttatgcgtgccctcttgtcggacgcgtaggtgtcccaaaggtaatcgcgttccgcgtccgtcaccatttcgagcgtcaattcatcatgatttctgaggaagatcgcccactggcaggtgtcggggatatctggcgtttgccgcatgatgtccgtgatcgggaaacgatcttccttggcgatggccatgtacatgcgtggcatcagagggaaatggaacgccatgtgacactcgtcgccctctccgaaatactcgcgggtatcctcgggccactggtttgcctcggcgagtaacatgacgccgggatgggtctcgtcgagagctgctcggatgcgcttcaggatcgcgtgcgtttcaggtagattctcgttgttggtcccctcgcgctcgaccaggtagggaatggcatccaaacgaaaaccgtctatgccggtctcaagccaaaagcgcatcactgacaggagttcctccatcacgagaggattgtcgaaattcaggtcgggctggtgcgaatagaagcggtgccaatagtacgcacccgccgtctgatcccacgtccagttagacttttcggtatccaggaaaatgatgcgggtctcgggaaacttttggtcattgtccgaccagacatagaaatcgcgctccggactatccggaggcgctagcctcgccctttgaaaccatggatgttggtcggaggtgtggtttatgaccagctccatgatcactcgaatattgcgttgatgggccgctgagacgaatttgcggaaatcatcgatcgtcccgtaatcggaactgacgctgccgtagtccgcgatgtcgtaaccatcgtctcgtctgggtgagggaaagaacggcaggagccatatggcggtcgcacccaacgccgcgatgtgatcgagcttctcgaaaaggccttggaaatcgcctattccgtcaccgttggcgtcgtaaaaggactttatatgcagttgatagatgatggcgtccttgtaccacgaagtgacgtccgcggtctgcgtggcgcttgcgcctattgacacgtcgtccatatcaaatctctcctgtttcgacgcgccagatggcgaacggcaaatgcgatggatcgagcctgagcgtccgccacttccccgttagcgagaaccggccgccgctgaccaagtcttccacgtcgatcgttccaccgtcgtccttgcccgatttccataggggaatttcaacagtgctttcctccacgccatgcgggttcaggcagatcccgataaggagaacgttatggcggccgggcgcggctttttcgaagaagatcacatttggatttgatgagctgagaagcgtgagcccaagatgggaatggagcgcggaattatctcgtcggatccggttcaacatcgttatttccgccttgatgttgccggggcggtcatagtcccaggcgcggatctcgtatttctcgctgtcggcgtattccttgcgcttgacgtctggtcggccctcgcaaagctcaaatccgttgtaaacgccccacagaccggaaagcgtggcggccagggcggcgcgaatgacaaacgctggccgcggggcgtcttggagaaagtccggattgatgtcgtgcgtgttgacgaaaaagtggggccgaaagtattcccgtgcctcggtctgagtgatctcgagcatgtactgctcgagctcccaccggctgtcgcgccatgtaaaataggtatacgactgcgaaaagcccactttagccagccgatacatcaccttgggtctggtgaacgcttccgaaagaaacacaacgtcgggatgtcgggcgcgaatgtcaccgatcagccattcccagaagggaaacggctttgtatgcgggttgtccacgcgaaagagcttgacgccctcgttgacccatagttggacgatatctctcaactcctcccaaagcgctggcaaagcgtctcgcgcgtagaagtcgacgttgacaatgtcctcgtatttttttggcgggttttcggcgtaacggatcgtcccatccggccgccattcaaaccagcccgggtgctccttgagccaagggtggtctggtgacgcctgaattgcaagatccaacgccagttccagaccctcctgcctggttgccgcgatcaaccgtcgaaaggaatcgaacccgccaagccgaggatggatcgcatcatgcccgccatccgccgagccaatcgcgtaggggctccccggatcatctggcgcggccaaaagactgttgtttcgacctttccggttcgtgcttccgatcggatggatcggtggaaaataaaggacatcaaatcccatcgcgcggatcgcgggtaatcgagcgatgacgtcgtcaaaagtgccgtgccggttcacgtctccactttgcgatcgcggaaacacctggtaccagctagcaaacgatgcctccacgcgttccgcatctatcaacgaaggcgttgaccgcacccggaataatcgcgcgccggcttcaagcatcagatccgatagacgagatgacaaaagcagccgcgtcttctcggtcgcgtccgcgtcatcgagactagcaacgatcccgagaagcctttcgcgcagcgcggggtcgctcgtcccaccagtcatcgcggcggtggctttaccgaccagggtctctccctcgatcagttccagggtgagatcgagaccggcctgcgctttcttggagagctcatggcgatatatggcgaatggattcttccaggcttcaacgcaaaattcaaaccggccaatcctgtccagtcgaaacgcgccgacccatcgatcgttgccatcaagcgccaacggtgccccccgccacgcatcatcgtccaccgctcgatacagcagggctgcctctattcgatcgtgaccgtcggcgaaaatgtcggcttgaacggagaccaaatcgccgacgacccgcttggcgggaaaacgtccgccttcgaccctaggctcaatgttttctatcgcgattcgtgctgattggtctgttgccttccccggcgaggtaacgatctcattcgcgatcacggcgctcgcggccgcggggagcaacgcgacatcgccgggcgaaagcacgccgctcgtggcttcttgatcgggaaagaatggcggggcggccgccgatatgatgtcaatggggtacgaggaaggattgcgaagatcgcggttaatggcgagcaattccacatgcttcgccacgcgaagatccgcagcgtccgagagggtgatgacggtcacttgagcggaagtttcatgggcgaaaggcgcgaccgtttttcgcgatgccatcacctcgttggcgtctctaaccgcggcggaaatatcgaacccgccgtttgaacgcatcatacgcacgttttggcccgcgcctcgggtcgcgtcttgtggcaagacggcgccgaattcgaatcccatggggatcatgatgccgtcgccaagtctcgcggagagccagagcgagcgaagggacttgcgctggcgtatctcttggctatcggttccatgcgcgagcctggtcgcgaacggtgcttcgggaaaggcgacttgcatgccaagtcgctgttgcaaacggtgttcctctagaaaccagccatcgcgcatgttccaccacgcgagcgaggagaacacaccgtcgaagccaaggtcccgtaactttccgcgaaaggcgaaatcggtgccgggcgtgtaaaccagccgcaacgactgagccgtgcccgttgccgatcgagcaacgcgatgaagatccgcgtcgctcaatgcatcaaggcccatgtagcgaaatccggagacgccaagagaagatagccgcgacacaacgtcgttgaggccgtctatatcgggcgctttaaccgaatgctgccaaggcgcggatggcgaacgtcgcggatcgagcgaacccgggccatcgccgaggcttgatccgctcgcggtgaacgcgacatccatcatgagagcgacgccccgcgatcttgcggcttcacacaaaaacgcggcgctttcttcaaccccacccgtaaatcgtaacgccggatcgatggagtcgtagtcgacggaagcaaaaatgcttcctcccggatcatgcctttgaaaaaatggacccgtcagtaccgcgttgaagttcaatgaggcggcatgatcgaacatggcgagccagctcatctcgtcgggcaggtcgagtggattgacataatatatgcggggtctcgagctttcggcgcggctcggaggtatcatcggtggtgtctccacgagcgggcgcgttcagcgccaggttccttgaccagagccatcgaaacttccagacgatgttcttgttcctgggggaggtttggaattgtcgcgctcgaagcgattcatggcctcgccaaggcggtgcgcccgacaatcgaggcgagtgcccgggtcggttcgacgtgaagggtgatttgcgatggaagtgttcccggccaggacgaggcgagcgtcaagagccgatcccgcgacggagcccatgccgtgtggaaagacaacaagttggtcggggcggacattgttcttttgctgatggcacttggcgacctaacgatgttgacccgaacaaagaagtcggccgcgaagctgggtgagggccgcgagacgtcgaccgcggagcagctgaaggcttggcgaccaggctggcccgccgctttccgcctctttaccgaagcggtcggagcaattctcacgtcgcgaatgccgcccatttttcgggggctttcacctgaagagagcccgcgtctagttgcggcacaggctctgggcgtttcaccaggtaatgacttcgcgcttctcgatcgattgggcggcgacgttgccggagcgcttcagttgctgccggaaggtgagttgccgcctgtcttttcgcccgccttcgaggtgtttgcactcgttcgctaggactcggaccctgcgcgccgcgtgcctcgtcaggataaagtgtcagcggtggtgctcatccacgcgcgatgccgttcttcatcttgtcgcgcctgcatgaagaaggccttggaggcggggatcgcatcctcgtgtcgggccgcccgctcataagccgtgactgtatcgtcttcattggtcttcatcgccttgaggatcgcggtatcgccaatgagaccggcgagcgcgattttaccggtggtgagcatctgcttcatatcgcccttggtcggggcctcgatcccgagctcgcgagccatcgtgctcagcacgcgcagatgttcaacgtggtcctccttgaacctggcgatctgagtgctgaattctcgattatcgagacgctcgatgcaagaatcgtaggcggcgatcgcatcgtgctcgaggtagatcagatcctttaccaattcctcgatacttgactcatgtccgaccatcgtgaccatcatgctctccttgtacgttggacaatgttggggaacggcgttcgttgaccgatgttcccgcgattacgcgactgtcgtgcgccgtacaaacgcggagggcggagtcaccatggctggctgaccaacatgcggtgagatcttttcccattgggtcagggacaatgtcggtggcgcgtaaatgtctgtcgctgatcggccaccacgttcactgttggacgcatcgttcgcgccttgcatgaccgtagacgcctttcccggggcgattgccgatgatcaatatcgcgaacttctctcagcctctcttcccggcttgctcgccgcgttgtcgctcttccaggtctccattttcagccttccattggtgcccggggcccgatcccttgaaatccagtgtgaacttgaggaacctgagcgggtgaccgtctggatagccaagactgggcttgacggtacttgcacgaggcgtggacgccgacggttattccgagccgatgcatagacggcgcctgtcaagacgaaagcaaggggtcggccgcgcctcgaacgtccgcgacctcgacgtagggaagccagtcaggattacccttctcattcggccggttaacccagatgccgcgaaaacctagcgcgtggcgggctttcatatcccaatacatgcccatggccacatggacagtctcgtccgcggtcaccccgatggcgcgataggcatgctcgaggaactttctcgagggcttgtaggcttgcgcctgttgcgcggtgataacgtgatcgaatgggaggccgatgcgttcgaccatgggggcgatcaggtcgtcatcggaattcgtcaagatggctagcttgtagcgttcaccgagccgccgcagcgcgtctggaacgtccgggtgcggtccatcgtcctaggcgagttcgcgatacgctcgagatcatcattgtccagctccacgtgatgcgttcggaacgccgcgagaaagccggaccgcggaatatcctcgttaggccgatgaggcttcgccgccgtcgttcgccttgcttcccttgaaaagcttcgaggatctgtccggcgtcgacatccgttcgatcaccggctgctagcgtcctacccttcgtccaggagcacttcgtaccaccgcacgagagccccgtagcaatcaaacgtgatgaccttgggagcagggccgataaatgacggttcaggcgcgtggttcaggtctggtggaacctgttcaagggaaccgttttccacggccatgtcggcggtcgcttcgacgagatcgaacgactgctcctcgcccgccagtcgttcgtccgctcgctttgcgagccgcgtatcatggcttgtccgcggccacgtgctcggcaagctcgcccttgctgatgaaggtgtccgtcgctcccgcctcgtgatcagggtgcgaaacctcgatttcgatttcctccggaagctcgagtgcttgttcagcgttcatcaagccaaggggaattcgatcaccatccgatgtgacagctacctcgacgattttggaaagcttatccaagtccatctccttcaatgtgacagtttcaaaaaaccaaaccggcggaggatccgatcagcgcagcgccatctcgtccgctgcccttggaccttggcaaacccgccgtgtcccgccatgaggctggtaggtgttgtcttcaggcctataggaccggtaacgcgatgcgcaccaagtcgccacgcgctcccccacggaggacgatcgcgcggcttggcctttcgagtatttcgagacgggcgcggtggtttcaagcggcggcgaacaggttctgacctcgccgctaaacgagcggtaggaattcgtcgcgggattgaacgaacgatatcggctggcgcaccaattgagatggtccgccgacaagggcacagcgctggccgcacgagacatcgaagccgcgacttcctgttcctccggcgccgttgtcccggcggtccgaacaggtgccgaggcgtatgtcgaaagaacggcgggtatccgctcgaaggtttgggcggaccgatcgatcttgaccggcgccgaggtccacaaatccgacccctccattgtcatcgacgccgacctgtccgagccttctacgactgaagtgacggacgctattccaagcgacgcgccaaccgcgcaggccagtccgcaagcgagagatgtgatggtcttcatgacgttttccagatgccaaattgttccggtggaggaaacgcgaaagaagacaaaccgttcaatcgagtttgaaatcgtcaagaagcggtcgatcgcggatagcgcgagctggcaaacgttggccggctcccggcccgcgacgaagcactggcgtttcgcggtgtcgttgtttgatctccttcgcgcattacaacgcacgggctgatgacaagaacgggccgagcgatcctagcgcccatccctggggcatcggcggtccacttatgtcatcgatgcggaaggctccgcgcgacattagagcccgacatggatgcctgcctcttccctcggaccgcgccggcgcgtttcggttggctagccattcttctcgcgcgcgccgagtgggcggttcgagcgcccgagacccgctggccggcacgccgccgttgtccgcgcgcccgcgagcccaaggggagcgtcgtgggaaactccgttcgtccatgttccgcgaggagaactgtcttcacatgttgcccgcgatcctctcatgcggcatgattggtggtatgctgaacctttttgatccagacaatttcatcgtgcgcgccgaggttcgtatcctcgacatcgaacccgagatcagccgtgttctcgagctgccgatcagcctcaacctcgctcaactgcacgaagtgctgcaggctgcgttcggatggactgatagtcatctgcatcagttcaatatcggcggcctgatttatggcgcgccggagttcgatgaggatggtctgtccgacaacacgaccttcgaggccaccgaagtgaggatgactgattttcattttccctatggcggcaacgaggacgcgctgaccttcctctacgagtatgacttcggagacggttggcgccacctccttcgcttgatccgcgttcctcgcgaggagggtgtgaaatatccccgctgcatcgccggtaaacgctccggacctccagaggatgtgggcggaacttctggttatgccgacttccttgaagcctggctcgatcccgagcacgaggaacacaaggatatgcgacgatgggtcggtcgcaaattccatccggaagcctgcaatctcgatgatatcaataaagcgatcgtcaaagcgatgcgtcgatcaaggggaggctatcgcttccgtcgagaagagcgttattgatccagccagcgatcaaccataaggtcgagataccgggctgaaatagcaatcatcatggtttcccggctgaagggtccttgacgcataaatgcgtgggtccgctcagcttcgacgccaggcgcgtgccacgcgatccagatcagcacggggcattggcgacaaaaacatatcgttagccggggtaaaacgccgcgcgccaccacgttcgcgtcaccgagggctggcatatttggagaagaggtaatcgtagcggcgcgcggtcgaccgcgcccagatctgggctccgccaaggacgatccggcgtgaccgttgatcatgccgtcgtcgaagcggaaacctgagcggatttagagcggagggcccgaggccgaggatgccccgggcgctacgtggaaggaagccttgccgcgcataaccggggagatttcatgacggaagacacactcgtgacattcaatgctggctcgtcctccttgaagatcggcgtcttcgaaatggcgtcgggcgcggcgcgttcagcggggcgggcgaagatcgacctcgagaccggccctccccggctgtctggcaagattggcggcctggccttcgaacgggaacttgttggcgatccaaaagccgacctgggtgatgtcgtcgcgcaggtgatcgatcatctgcatgccgtcttaccgggcaagatcattgccgcagggcatcgcgtcgtccatggcggcatgacgttcgacgctccggttctgcttggtgatcaagtcgtcactgacattgaaggcttgataccgttcgcgccactccaccagcccgctgccttgggggtgatccgcgccgtgagggacagccatcccgcgatcgcgcaaacagcctcgttcgatacggccttccatgcctcgcagagcgatctcgtccgccgcctcgcgatcccgcgagcgatgcacgacgaaggcgttaggcgatacgggtttcacggcctttcctatgcctacatcgctcacgcgatcgcgcggattgatccgcgagccgcggcgggtcgcgtcgtggcatgccatttgggaagcggggccagcatttgcggcatgatcggtggccggagcgtcgatgtcagcatggggttctcggctcttgacggaattccgatggcgacgcggcccggctggattgatcccggcgccttgctccatctcatgcgaaaaggcatgatccagccggagcggctggagcggttcctctaccatgaatgtggcttgctcggtgtctcgggcatcagcggcgacacgcgggttctactcaaggacccaagtcgcgaggctgccgaggccatcgaccttttctgcctgcgtgtggcgggcgagatatcgcggcaggtggccacgctcggcggactcgacgccgtggttttcaccgcagggatcggcgagaaccaacccgacatccgcggccggatcgcggcgcggctgggctggctgggccttgacttggacgacggccgcaatgaagctaacaaccagatcatcagcacggcgaagagccggatcacggttttcgtcatccccaccgacgaggaacaggtcatcgcgagcgaggccctttccgtcgtctcgcgtcataggctgtgaaggagaagatcgtgaacgatgtcgccatgaatgtcatcgatgatgccgaacttgccctgatcgaccgttattggcgggcagccaactatctatcggtcgggcagatctacctcatggacaacccgctcctgcgcgaaccgctgaaggcggaacacatcaaaccgcgacttctcggtcactggggcacgacacccgggctgaacttcatctacgcgcacctcaatcgggtcatcaggaagcgcgacctcgacattctgtacgtttgcggcccgggtcacggcggcccgggcatggttgcgaacacctatctcgagggcacctacagcgaggtctacccagacatccccgaaagcacggaaggtctgcggaagctgttcaagcagttctccttccccggcggcattccaagtcacgtcgcgccggagacacctggctcgatccacgagggcggcgaactcggctacgccctggtgcatgccttcggagcggtattcgacaatccgaacctgatcgctgcctgcgttgtcggtgatggtgaagcggaaaccggtccactcgccgctgcttggcactcgacgaagttcctcaatccgtcccgcgacggcgtcgtgctgccaatccttcatctcaatggctacaagatcgccaaccccacgatcctcgcccggagcagcgacgaagatctcaccagtctatttcgaggttacgggtatgagccaatcttcatcgagggtgaggatcctcatgtcatgcaccggaagatggcggagataatggagtatgtcttcgaaaggatccgcgaactcagggacgaggctcgcgccaacgcatcctcgccaggcgttccccgctggccgatgatcgtcctgagaagtcctaagggatggacgggcccgaaggaggtcgatggtaagaaagtcgagggcttttggcgcgcgcatcaagttccggtcgccaattgccggggcgacgacgggcatcgagggattctcgaggaatggatgcggtcgtacgaccccgacgatctcttcgaccacgaaggacggatgaaggaggagcttcgcgccctggctcccacgggaacgaagaggatgggggcaacgccgttcgccaatgggggcctgcttcgcaaggaattgctggcgcgacccatcaaggatttcgccgtcgagattggcgagcgcggctctcaacaggtccagaccacggagatcttcggacattacctcagggaggtcgtcaagctcaatgccggcaacaagaacttccgcgtctttggtcccgacgagaccgaaagcaatcgcctgggaagcgtcttcgatgagacacagcgggtgtggatgcaggccatcgaggattatgacgtgcatctgtcacgcgatggccgggtgatggaggtgttgtccgaacatctttgccaggggtggctggaaggctatctgctaacgggacgacacggcctcttttcctgttacgaggctttcatccatattattgactccatgttcaaccagcacgccaagtggctgaaggtcacacgcgaactggaatggcgggcgccgatctcctcgctgaactaccttttgacatcgcacgtgtggcggcaggatcacaatggtttctcacatcaggatccgggcttcgttgatctcgtcgccaacaagaaggcggacatcgtccgcatctatctgccgccggacgccaacacgctcctgtgggtcggcgaccactgcctgaagacctatgaccgcatcaacgtgattgtcgcgggcaagcagccggagccacaatggctttccatcgaggaagccgaggcccattgcaaggcaggcgccagcgtctgggactgggcgagctacgaggaaaacacgatcgcgccggatgtggtcatggcctgcgccggtgacgtgccgacgatggagacgttggcggcggtgatgttgctgcacgaagcgatacctgacctcaagatccgcaccatcaatgtcgtggacctactcgcgctgcaagatcccgaacagcacccccatggcatcgataacgcggcgttcgaccgcatcttcaccaaggacaagcccgtcattttcgcctaccacggctatccatatctcatacatcggctgacctatcgccggacgaaccaccagaacttccacgtgcgcggttttatcgaggaaggcaccacgacgacgccgttcgacatgacggtgctgaacgagctggacaggttccatctggcgctcggggcgatagcccgcgtgccggggctggcggagaaggtgccggatgtcgcgaaccgcctacgggagaagctcgcggaacatcgtgcccacgtcgaacggtatggagaggatatgccggagatcaggaattggcgatggaagcgctgacgaggaactcggcgcgatccagcatcaaccggccacaagagcgaaccggcaatgcagaggggaatagggttcgggtgtctcggcgcgccgaggcagcgcgcaccgaaaggcctttcgcggacagccagaagccgcgtttcacccctgtgcccgccatggcgatccagctccctgacgattgtcgggcacgacgttgaccagcttctcgcgacgcgcggcgttgccagagcggatttgagccgcatcgtcataactggagctcacatcgacgggtcgtcacgccgatgttatcttctcgtcggatcagggcgatggccctctcgacgcaaggctatcgcctctaacggagctttcaaagtgatcgcgctgacaacggtagcgcgatcttcttggacgggtcggtcgaaacgctcatccgaagccgctcgcttgtcatcagcgagcgagaacggtgataacaccgcaatagctcatcgccgtcaaaagcagaagcgacgcggatgccgcgagaatgacgcgcccgcccgcgctggcgacggtgcgaatgttcaccgaaagaccgagcgccgccattgcaaggacggtcaacgcgctcgatagcgttagcaagaacgggatgatcgcggctggtatgagccccatcgaacgagcgatcaccacaatgatgaagcctatgatgaaccacggaacgagaccccgttgcgaatgggcgcaatcaccgcggtccttcagaagaattccaaggacgaagatgaccggccccaacatcaggacgcgcagcagcttgatgagcgtcccggtttgcaccgcgactaggcccgcgggcgcggctgccgcaagaacttgcggcacggcgtagaccgtcaagccggccaaggcgccgtattgcgttaccgtcatgcccgcatagagataaactagcggaaggatgagcaccgaggcgacacccagaaccgcggtaaaagccagcgcggcggcaacttcgtccgaatccgcttcgatcaccggagcaaccgcaacgatcgcggaattgccacagatcgagtttccgcaggcgatcaacaggccaagccggctggacaatccgcaaaagcgggcaacgagaaagctggcgcagatcgagatgacaacgatcgccacgacgcagacgaccagcgtcgcaccggcgcttcgtagcgttcccaaactcaaggaagcgcccagaagcacgatcgcgatctcgagcaatgtcttggagctgaaactgatgcccggctgccatgatgttttgccgggtaaagccgtccgcgtgatgatcccgatcacgatcgcaaagaccagtgcttcgagaagcccaaccccgaatacggcatgttccagtcgctcgaacagataggcggccgcagccaccgcgatgcaggcaagcaagccgggaacgatctggcgaccatggttgtaacagttatggagggtcatcgggcacctggaattctaatgattgcttgaaagatttttcagctaatcgcgtcgacttccatcgaatattcttctacatttcattcgacaaaatagaatgatttcccatgacctttgaacagcttgcaattttcgtcgcggtggcggaacgcgaacatctgaccaaggcggcggcctcgatcaatctcacgccatcggctgtcagcaccgcgatcaagaatctcgagcaccactatggcgtcgagctttttcaccgcgtcggccgccgcatcgagctgacggaatcgggacggatcttcctcggcgaagcgaaatcattgctctcgagagcgcgcgcggccgagctcgtgctcagtgaactcggcggaatgcggcgcggagcgttgagtgtgttcgccagccagacgatcgccagctattggctcccttcccgcctcatgcggttccacgcgtcacacccgggcattgacctcactctgacgattggcaacacccgaacggtcgccgacgcggtcatttccggcgaggctgatgtcggcttcgtggaaggcgacatcgacgagccggcgctcgcggcctcggtcgtcgcgcaagacgaactggtggtggtcgttagtgcgtcgcatccctgggcgcgcggcggaacgccaccgaacgacgagcttgtcgccgcaccttgggtgatgcgcgagattggctcggggacccgttccgtattcgaggacgcgcttgtcgagatgggtataaaagtcggggatttgacgatcgcgatggtgctgccatccaacgaggcgatcttggcggcactcgaggacagcctgtgcgccgcctccgtttcccgtctcgccgctcagcaacacatcgaggccggcaaactgatcgaggtcgatttttgccggccggtccgtgaatttcgccttctgaaccacaaggagcggcacaacagcagggccgcctcgactttgatcgagatgtgccgcgtcaaaaagctctagctgccgctcaaagctcagccagcgccgcgaaggtcgcggcgaacgatgcgtcggcgcgataaaagaccggcggctcaccgaccggcgcggcaatactgatttcctgaccgccggcatacgcctcgccgctccatacgtgtatccagtcaacgccgtttggcagatagagcaatcgttcttgctgtccggcttgccagacaggcgcgacaagcagttccttgccataaaggtagctgtcctggatcgcataggtgtcgcggtcgtcttcatgatgcaggaagagtggtctctgcaccggaaggcctgtttcctcggcggctgccgacagtgtgcggagatagggtgccagatgcacgtagaggcgcgtcatgcgcgcgaaatgcgccaacacttgtggatcctggtcaatctggacgttgtcacggggccgatttccctcatgcgtgcgcatgaccgaggtgaagaccgacatctccgcccaacgcatcaacagttcaggggtccgtacgtttccgaacaagctggtgtaccccccgatatcggagtgatggtatgcgttgccgagcaatcctgacgatagtgccgccgagatgacggtcacgagaccgtcatggcgcgaaaagtcaaccgattggtctcccccccatagcaaagggcaatgcgcttggacgccggtgaagcctgcccgcatgaagaacagcgcttcaccagtcattccgcgcgaggcgacggcattggcattgacctcggcccaaagggtcggccacgcattgtgcatcagcttggcgtcgatgccattgtccagattgacatcgatcggcaggtattcgccaaaatccgccatccagccggatagaccgaaatccagcatcttcttgccgatgacctcttccgcaaaccattcggccgcttccggattggtgaaatcgacgacgccgcaatcgaactcgccgaaatcgaccagggctgtcgcgccttctgcggtcttggcaaaataaccggcacgttcagcctccgggaagagcggaccatcaacgcataggtaggggttcacatagcccagaaagcggatgcccgcgtcattcagctcggcgatcttctggcgtagacccggatagcgttcctcgttagcctgccagtcccaaaacagtcttgcgccgaaggaggtctgcctaagcccgacccagtcctcacaccagagaccggagacctgtacgccggcgtcccgcatcgcctgcagcctggcgaaggagttgacaccgtctttcaggccaatgatcgcacccttatagacccactcgggtaggcgcggctggcggccgaagcgctgggaaagctggcggacgagctctacgaaactgggcgccgcgaagagctcgatccgttcggggatcgcccaggcctcgatctcgtggaagctcttgtggcggaagtcgaagaccgaataggcggtcgtctccacatgcagtgcgtagcgtgccgacgagacataggtcggctgcgggtagttggtattgaagtagtcgccgccggcgcgatccttgatgttggacttgaaggtaatctcgctggtcttgtcgcggccgacgcccggctcggacgtccagagcggaaaacgcctgccgcgcatgtcgaaataagacatctgctcgccgccaccccagacatgctcgtcatggtcggcggcgacccgcatccagaagcggttgatcagcggatcgagggcttggatttcgatggcgctgtcggtgagggtcaggacgaggcgtggcggctggccagcgcgttccgacaaggcgatccggcgcccgtcgatctcggcatgcgccaatctgctgcgctcgatcacatagtcctcgatgtcgaaattgccgcgatacatgtccatgcgctcttcgccaatgccaacgaaaatcgcgggtgcgctgctcgtgtggttgagaacgacgcgcccgtcgagggacacggtgaagcccgaagcagtcgcctcgagcacgatgcgttctccggtcccgctcgcgtgcctgagttcagtcggcgccggacgtttgagtgttgaatcggtaaacatatgatgtcgctgcattgctgtggcgtggctcatcccttgatgcctcccgaggtcaggccggacacgacacgctcctggaagatgacgatcaggattgccaccggcacgatgccgacgacgagcgcggacgagatgaccggccagggaaaggcgaactcgccctgatagagctggataccgacagggagggtacggagcgacggattggagttgaatgacaatgccagcaggaactcgtcccaggcgttgacgaaggcgaggatgcccgcggtgaagacgccgggcgcgcaaaggggaacgacgaccttgaaaagggcgccaagccgggtgcagccgtcgatcatcgccgcattttcgagatcgcgcgggatgccctcgaagaaagagatcagcatcagcgtgcagatcggcagggacagcaccgtatagggtaggatcagtgcaacccacgtgttcaagagattgagcgagcgcatgatctcgaaaagcggtacgagcagggtcaccagtgggaaggtggagacggcgacaatcagcgccaggatcagtccacggaaacgcaggttgagccgcgccaacgcgtatgcggcgagaacagatattaagagcgtgagcagcgtcgacagcagcgccaccatgaagctgttgaacaggaacagatgcagcggctggtcggagaaagcctgcatgtagtttgcgagcgtggcttgatgcggcagccaggtgatcggtttcagcgtcagttcgctctccgtcttcagcgacgtgaacaagatccacagtgccgggaacagcccgttgacgagcaggatcgcggcggcaatgaagcgcagaggtttaccggtcaggaacgacgcggggctgggaacgacgacggcgctcatgacctattcctttgtcctgatgatgcggagatagaccgcggtgacgaccatcgacagcgcgaacatgacaacggcgagcgccgatccgtagccgaggtcgaggaacgacacggtgttttggtggatgtacatggcaagcgtcgccgtcgacgtacccggaccaccgcccgtcatcatgaatgggatatcgaaagtctgcagcgcggtaatggtgcggaaaatcagagcgacgacgatcgagggcttgagaagcggcagggtgatctcgaagaactgtcggatacgccctgccccatcgacatcggccgcctcatagagagaacgtggaatggtctgaaggccagcaaggatcatcagcgccatgaaggacgacgtcttccacacgatcgtcaggcagattgcggcgaaagcccagttcggggaattgaaccagatgatactgccgaagccgagacgcgtgagcacatcgttcgctacaccgtattccgagtggaagaaccacgcgaagatcagacccgcgaaggacagcggcagcgcccaggggatgagcagcgacaaccgcaccggccattgcatggcaaagggcagattggcgagaagcgcaagtccgaggccgaccaacagggcgccgggtaccgtgatgatggtgatcagcaccgtgttccacagcgtctgccagaacaccggatcgtcaatcatcgcgcggtaattatcgatgccgacgaactccgccggcaagccggaagttagcgacaggttgaagaagctggtgtaaaccagccgcccaacgggatagacgatgatcagcgacagcaggatggctgcgggcgccagcaagagaacggccaacgcgcggtcgctcaggtcgagccatttgctccaccgcggcaattgctcttcatccgcgtcagtgagcggcatgattgatatactcacggcgagcgctcctgctgtgcgtgttcatgtcatatccctttctgtcggggcgcggtcagcgcgacctgcaacgctgaaacacgatgcaccgcaggtcagcgcatggtgcgcaaaggcggattatcgcaagatccgcttcagccgcgcttcgatctgcgaagcgccttcttccggcgtgctgacaccggccagcacggcattgatggtggtgcggatcgtctcgctgacctcgttgtagcgaggggtgacagggcgggccttcgcggtttcaaccaccggcagagcgctggcgaaccacggcgccgccttggtgacgtcggcatccttgtagagatcggcataggtcggcaacagcgcgccattgaccgccatgaacttcgagacttcagggctggacaggaactcgacaagcttccttgcctcttcctgatgcgtggagtaggcggacacgccgaactcccaaccgcccaggcagcttgcttgctcgccgccggtcactgacggaagcgtggcaacatcgaccttgccgacaacggccgaatccttgccctggaagctggaccagccataggaccagttgatggcgaacacgacgttgccagcctggaattccttgcgagtgtcatcggtcgccacttcggaaatgttcttcttggcgacgccgtcatcgacgaagctcttccacagcgccagcgacttgaccgcggcatcgtgatcgaaagtcagcttgccgttctcgacgagcgtcttgccctggctccagtaaggcaggaggaaagtgcagaccgcaccctcgatcgccttgccctggaatgacaggccctgaagatctggacgcccttcaccctgggtgattttcttggccgctgccgtcaattcatcccacgtctttgggggctggatgccgtacttgtcgagcagatccttgcgatagtagaggaacatcgcatcggcgaatgccgggatggcgaccaccttgccatcgacggtatttgcttccgtgtaggtcggcaggaacttcgacatatccttgtcggagaagtcgctggtccagccggccttggcatattgagccggccggatgacatcgagcatcaggatgtcgagattagtgtccttggccgacatcacggtgttcaggtactgagcctgagcctccgacgtgttgccgccagcctcgatggtgaccttcacccctggcgtcttggcttcgtattggtcgaataccttgcgccatacatcgggatgatgctggctcgacacgaagatcttgagttccgtatcggcgaaagccggaacggccgagcccagaatgctggcgcaaagcgccaagccgataagtggcctgctgatcatgttttcctcccagtgatcataagcgcggacctcaatcctccgccgcgcaaagagcttcaggcgatcgcgcgctgcgtcgcggcgtcgaaaagatgaatccttgaagggttgacgccgatcctgatttcctcgccggcatgcgtgcgaacatcaggcggcatacgtgcggtcaagacgtcgccgcccaactggaaatggaccagtgtgtcggagccgagcggctcgacgacctgaaccttcacggccagttggacatcggatgccgcgaccggcgtgaaatgctcgggccgaatgccgacgatcacttcccagccttcgtccagcgtcccctgacctgaacggaccgcggcacatggcagctggttgccgtcggcgaagacgagacggtcgcccttgatcgcggcttttgcgaaattcatcgccggagaaccaacgaagccaccgacgaagacgctgttcggccggttgtagacttcatcgggtgtgccgacctgctcgatatcgccgccgcgcagaatgacgatgcggtccgccagcgtcatcgcctccacctgatcgtgcgtgacgtagatgatggtcgtgccgatctgctgatgcagacgcttgatctcggtgcgcacctgtccgcgaagtttggcatcgaggttcgacagcggctcgtcgaacagaaacacctgcgggcggcgcacgatcgcgcggcccatggcgacacgctgacgctgaccaccggacaattgccccggccggcgatccagaagatgcgagatgccgaggatttccgccgcctcgtcgatgcgtcggttggaatcggcaatgttcgttccgcgcaccttgaggctgaagcccaggttctcgcgcacggtcttgtgcggataaagcgcgtaatcctggaagaccatggcaatgtcgcgttctcgcggcggcagcgcgttgacgacccgatctccgatacggatttctccgccggaaatggtctcgagcccggccaccatgcgcagtgtcgtcgattttccgcagccggacggaccaacgaaaacgacgaactcgccgtcggcgatctccagatcgatacccttgacgatgcgcagagcgccgtaacttttgtcaagcttcctcagacttaccgacgccatgcgttcctcctccaaccttgaccaaaatcaaaccaaggccacctcttggcagcgatcataccgaccgcgataaggaaatcaatagtgtatcaattttatttatgtcgattaatttacaacctaacctattgaattttagagcatccattgtttatgcggaaattgcatttcgtcagtttttcccaagcccttggcggagcaggataatgtccgaccttagcgaagccggctgacgtaacgtgccagttcatgatcataccacgtatgcgagagctcggccgtcgcaccgtcctgtgcctggctcatacgcacgacatggggtaccgaactacccggtttctgcccaaaggcctcgggcgcccattcgggaacggcactcatcccgatctgatcctcggcgcgcgctatccacagtccgagcctggtcctgtagtagagataaagagattccgacaattcctccgcggtgaccgtttccacataggatccgtcgagccaaatctcctccacggccaccaccttgccggacagacgacgcaaacgacggatgcgatgcccttcgctcgaggcgccgaacgtcggcaaatactcgggttttttcagtcggcatacatccagtacctcggcggtcggaagcccgccgccgccgaccagttcaagtcggaacatggcgtagacgctcttgggatcgctgatcgccctgatgtaattgcccgagccttgaacgcgctccagaaggccgcggttttgcaattccgccagggtcttgcgcaacgttccaacggcgatgccaaggttggcggccatctcgcgctcgggggcaagcttctcgccatcgatcaaccgccccgccgcgatatcacgaaccagaagctcggcgatctggagatacatgggcaggctgccgcgggcgttcttcatttgcaggctttccttgggcgcgagacaaaaatttgatacaccattgatttactaaaaacctgatgatattcaagtgtcattcggcagctgaggaggaatttcatgaccgttgtaccgataacatcaggcgatctcgatgccgccgaagtatcatggttttccgcgctgtgctccgacgattacgcatatctcggcgttcctgacgacactttgcgctcgagctgggcgcattgctcgtcaatcgttcaaaagacggaagcgcttggcttccgcaacatcctgtgcccctcgtcctaccaggttggccaggacacacttagcttcgttgctggttgcgcgccgatcacggagaggatcaactttctcgcggcgatccgctgcggcgaaatgcagccaatcatgctggctagaactgtggccacgctcgaccatatgctgaagggtcggctgacgctaaacgtcatcagctccgacttccctggcgaggtcgccgacagtgcctaccgctatcgccgcagccacgaggtggttgagatcctgcgccaggcctggacgcgcgacacgatcgaccacgacggagagatctaccagttcaagggcgtctccactgaaccggcgaggccatatcagcagaacggcgggccgctgctttatttcggcggctattcgcctgacgcgcttgaactgtgcggcgcccagtgcgatgtttatctgatgtggcccgaggtcaaggagcagcttgccgagcgcatgcgcgccgtccatgcccgggccgaggcccataaccgcacgctcgattacggcctgcgcattcatatgattgtccgtgacaccgaagccgaagcccgcgagtacgctgagcatctggtgtcaaggcttgatgacgagtatggccagctgatccgcaaccgcgcccatgacagcatttcgctcggggtttcccaccaggcgcgggcccgcgaactcgccgacaagttcggctatgtcgaacccaacatctggaccggggtcggccgcgcgcgttctggctgcggcgccgctttggtggggtccaccgatcaggtgctgaccgcactcgaagactatcagaaaatgggcatccgtgccttcatcttctcgggctatccgcatctcgacgaggccgagcatttcggcacgaaggttctgccgcagatgaagacctgctctctgccggaagtgcgaggcagggttcccgccgagaccccagccactccccttggaaatggaaagcgccactgatggaacgcatcgaactgaacgccgacgtttcgctgagccggctcgtctatggaatgtggcgcatcggcgatgacgccgacacttcgccggcgcatgtgcgggcgaaggtcgaggcgtgcctcgcccagggcataaccactctcgatcaggccgatatatacggcggctacaccgcggaagccattcttggtggtgcgtttcgggcgtcacccggcctgcgcgacaagctggagatcgttaccaaatgcggcatcgtggcgcccgctggccggcatgccgcctcgcgcgtcaagcactacgataccagcgccgcccatatcagggcctcggtcgaggcgtccctgcgcgacatggcgacggaccggattgatctcctccttatccatcgcccggacccattcatggacgcggacgaaaccggcgcggccctcgatgcacttgtgaaatcaggcaaggtgaaagcagtcggcgtctccaatttccgcccctgggatttcgcactgctgcaatcggccatgaacacgccactgtcgaccaaccagatcgagctcagcctctccgccactgacgcctttaccaacggcgatctcgccttcctgcgggagcgcaagcggccggtcatggcctggtcgccgctgggtggcggttctctgttgacccggggtggtgcgctcgccaccggacttgccaagatcgcggccgaacagggtgtcgatgtcgccgcggtcgctgtcgcgtggctgctggcgcacccggcttcgatcctaccggtgctggggaccaacaacttgcggcggatcgcggcaatctccgacgcgaataaagtgtcaatcgatcgccagacctggttcgagctctattcacttgccattggacatgaggtgccgtgatgacaatcgtcgaaaccgcgagatccttcgaagagcatgtgttcatacctgatgccgagaccacgcgcagctaccgcaacgcgctcggcgctttcccaacgggcgtgaccgttgtgaccgcgaacaccgatgccggtccaattggcatgacggtaaacagcttcgcatcggtctcactcgacccaccgttggtgctctggtcgccagccaagagttcgtcgcgccacgcactcttcacatccgccggacatttttccattcacgtcctgagcgcggagcaaacagcgcttagcagccgctttacgcggggcggccaaggtttcgcggatctaggatgggagcataacgtggaaggcgctcccatcatccctggaacgcttgcccggttcgagtgcgagcagcagtctgtctatgatgctggcgatcactcactggtcattgggcgggtattgcgggtcgggctgcgggatggtgagccgctttgcttcgcgcgcgggggtttcggccggttcgagcgtcatgcctaagagcttgatcggacaaggcccgaggcaagtttcatttcgccgtggtatctgtcgcccatcacgcgcggtttccagtttcgcacgctgagttacgggcgggcaagcgtgggccgctgtaccaatgcatgccggacacgagccggcggtttttcgcgggcggcggaaaaagccttcagctctatcccatgggagatgagaagcccgccgcctaacatctgaaaattccgccgttatcgattgcggcgcgcaccatggcggggtatggattcgcatcggacccgagggcaagggaactgcatgtcaccattgagtagcggttccagtgaagtgcagccgggctccgtttcgcgcgcgtcactcgcgatcattggcctgatgttcatggcgctgctctccgtcctaggtttatggctcggttcaagctaccaggcgaccgtgaaacgcgctgacgcccaggtaaccgctgcttcgaaaatcgttgccgctaacgcggtctggctcaattcgcttgctcgcgagacactacaccgcatagacgattccctggggtcgaacgtgctctccgcggatgcggaacgggtccacgatctcaacgcggccgtcgcggacctcccgccgcaggtgacggcatacgtggtcggcgccgacggtctcacgctgttttccaacaaccccaggacacaagcgatggacgtgtccgatcgcgactacttcacaaggctgaggaatggcgcggacgaatacacatcggacttgatcgtcagtcgcttgaccgaccgccagattttcgtcgtcagccggcggctcgaacggaatggaaactttgctggtatcgccgctattgccttcaacgcggatgtactcaggccaatctgggatgctgtcgatatcggaccaaattcgacggtgagcttgatcaggcgcgacggcaagctcatcgcgcgccatccagagcccccgggtccggtcgacatgggtgggtacgtgctttttactgactacatgaggaaggcgactgctggtgtctatcgctcctattcgcctgttgacgcccaagaccgactggttggctaccgtatcatagagcgaacaccattcgtcgccatcgcgtcggccgacattggcgtcctcatgcaaccattctgggacgatgcgaagatcgctgcccttttgatatttttcgcggtaatcggcgcgatcgcggccgcgctctggatccaaaaactaatcagaatagatgggttgcacactcgtcagctcgcgcaagcgctggcagcaaaccaaacactgatgcgcgagatacatcaccgggtcaaaaacaatttgcagacggtcatggcactacttcgcctcgaggggttcgagcccgacgtggtgcgaaggctcaatgagcgtatctccgcgatgtcggccgtgcatgaacagatgtatggcttcgatcagtttagtggagtatccgcggtcgagttcatcccgtccttcgtgagcacgctcgtgaacgttcatgggcagtccgtgactgtttcgtttgatgtcgagaacatgacgatcgcgcccgaccgagccacgcccttcgccctgctcgtcaatgagttgatcgcgaacagcatgaaatacgccttcgccggccgagaggcggggtccatccgtgtcggtcttcgatccggggccgagggtttcgccgaactgtccgtcgttgacgacgggatcggctttaatggagacacggattcgccgggcatgggcacacgcttgatcaaggctttcgttcaacagctgggtggtgagtttcgtttcgtgaaagacaatggaacgaaattcacggcggtgttgaagatcgccgattgagcacaccgaagcgtcctccccacgtccgtgagccactttcattttggacacggcgcgtcgcgccaacatccggggttgtcgggtgaaaggcccgtgcgtcgacccgttgccccatacacggatcaaaaccacgggaactttcctcaagctccggatttgtcagacgaaccaagaggaggtccaagcatgttcgtccgagacgttatgacgaggcaggtaatgaccgcggcgcccgatgccagcatcaggcaggttgcgcgggtgatgtcacagatcgattctggcgcggtccccatcgtcaacgacaaggttctcggtatcgtgactgatcgcgacatcgtagtgagggcggtggccgaggggctcgatcttgacggcccggtgtcggagatcatgacctcgggagttgagagctgtcttgaggatgacgacctgcgcgaagcttctcgcggaatgtctgagctgcagatgcgccgtctgttggtcttcgaccgggcgggcaatgtatgtggcatactttcgctcggggatatggcggttcttgatgaggaactagcgggcgttacgttggaagagatttcggacgacgaggagccgagataagccgtcttgtcccaaccatgttcgcgacgtgaaggccagttgttaacctcctgaaaacccagtaagtcgctggtctttccacgaccttcaacctcttcacgcctcggagattcttgaaaagcgaagttgcccgtcgaccccgcctggccgcggtgtgatctcggatgccgagggcgctgaccgaatgatgtgatgtgcacgcgctttgggtttgggtccaagtcgtatcactcggccagcccacgaactatcggccaagcatgcaaatatcgcaatacttgcatgtattttcgtacgttaccgcgctgatgatccagccaccgcgcaagcttgatcagtcactgatcgatttggcgaccaagcgtgcagtcgaaaaaatgatttcagcgaccaccttgcgatcgcctcgcctatttcgcgagccagtgcaaaactcacttggttcccaagcgccgaaccgcgccagggtctttcagcgaagcctcacgagccggcggacatacggagctagcattttccagatcgaacgccatttatcgtgaaatcgagggtttggagagagggacgtcatgcgggacatacaaagtgacgaggccgaccttaacgcctcgatcatcgaaatcgaagctgttgaatttgatccaggatccccgggctgggcagcattgtacgcccggcttgctggtggcagcaccttgaggctggaatttgacgcaaaggcgttcgtcacgctggagaccgccattagcgcggcgcaaaagcagatgaccgaggaccagggagtgcagtgacgcccgcaatgagggtgtttatcgccctccggacgcttctcgcggaccatgctcaagaggagccgcgggcgtggtccatgccggaggctggcgaccggcgcttgcgatcggctcggctaccagcgcgccgatctcgcccagcactggatattcccttgaagaagcgggcgaccatccgtccgctggcgctcgcggggatcgtctttgggtctggccggtcatcgcgctgtccctcttttcgttgttgaggataatggtagcaatcgcgatggacggtcgtccacacatgggacgtgaagcgaatcgcggcaaggacggcattttgggccggacggcctgccgtgcgtgtgatccaagcccttgcctggttacgtgatgacccaatcgctcccgatgcctccgtaaatgggatcgccagatccatggccgaaaatcccaatcgggccgaaatcgagcgagatccgcgcgacaacatcaacgtcgttccggcctggatgtacccttacgtggacgcgattatccggcgacctgcccttggcgacgacacaccaacgagcgtcctggcttacggaggaaagggcataatgctgcgctcgaccgccgacgagcagcgcgccctatattcggcggttgcggctattactcttatagacgtggcttcggccgtggcgacgtcgcgatcacgtcgagggaagcgcgcgatcgagctgatccattgctgatccgccgctttgccgagggtcagaggagagcattggaagcgtcagaggaagaagaactcgtatgcgatcgtcgagccattgcgcggccttttcacccgccggattgccctcgtcgtaggtcgcaacgttctcgacctgagggacgcggcatgtctcagacgggatttccactccctccgcgagaacgtgcccgcgaggatgagcgtgatcccgtagcgtgacgcgtaacatcaagagcgcggttaagtgcctctgctccctgaaccttggcaaccgcgatcgcccgcgacacgagcgcggggcgctattgctgaataaggagcatcgaccagtaagacgcgtggatcagtatcgcgatcgtcaacggcctggaaccacgcgcgaatttcgacgtttcactgccattccaaggacaccaacgccgactgcttgtcggcggcgaatcagacggaaggaacaacatcgtgggcatctttgaccgcatcaagcaggctatcctcggccaagcgcacgctgcccaacagcgcggcggcggtgcttcggtcccgatcgggcggacgaccgccgcgggcgcgacagcgcagtctggttcatcgttgtcggggggcaagccaacgccctccccggtgtccacccaacccacgacaccaccgtccggccagatcgcatccccagctccttcccaggaacaggcctccgctggcgcttcctcgatcagttccccccgggccgtcgacattgtccccatcttggatgccgcggtgacgaagtcaggtcagaagctcgactggaagcgttcgatcgttgacctgatgaaggctgtgggaatggacgccagcctcgacgagcgtaaggagctcgcgcgcgaacttggctacgccggcgatgcgcacgactccgcgagaatgaacaccttcttgcacaaggcgctgatgaagaagctttcggaaaaggtggaacggttccggctgatcttctcgactaatcaccgatcctcatttcatccagcagggcgctaacaggtgtgtgtcgcatccgtccactgaaaggaaaagaccatgatgagcggaccaatgaaagcgcttctaggcgctatcgtcatcgcggggtaccagaaccgcgataagattggggaattcattcgaggcttgcagggcccacggtcggggggtgattacgccagtggacgggaacctggatccaccacgtcgcaacccgccggtgggcagggaggcatcttcacgggccccggcggccttggtgatcttcttggcggactgacgactggcggaattctaagcggtggcctcggcgacctcctgaaaacgttccaacagaacggccatgaggataaggcgaggagctgggtcgaaactggtcccaacgcgaccatggacaacgaccagctttcggaagctcttggtccggaagtcatcaacgaactgtcggccaagacaggattgtcgccgcgagacatcctcgaccgccttagccgcgaccttcccaccgctgtcgataaccttactccccatggcaaggtgccggacgcgggggacgaattcctagcttccgccagcgcggcaacaaacagcccccagacgcaaacctagtcgaagaactcaataggaggagccgatatgccagactcgaaatcgccagccgtccagtcaatgctgaatgagcaagccaagcagcgcgagagcgcccgcgagggtcacctcgacaagggtctcgaggatacattccccgcctcggacccggtatcggcgacgaccacctcgatccccgcgggtcgcacggatccagatgaagcagctcgcgtcgccgatgacccatccttcgcgacgcagggcgattatcccttggtcgacgccgccctcgccgcgacaggcgagaaatcgagcggcttcgaccacgatgttcggcgtgagggacttgatggcctccgtcgcgatgctggccgcgtggcggactccatgtcagaggtcgcggaaggcggtgttcacctggcgaagtcgcaagtccgcgggatatggacagacgtggaggccaggatccgcgatcgccccctcacggcggtcggtatcgtggctgcccttgcttatttgtggggtgcgacccgctagtgcgcataagcggcgcaagggagcctggccggcgcccgtcgccgggatccacccgggttccaaaggctgccgagagttggccgcctttgtccgcgagaggcatttatcgggtggacgcagcgagtgtccgccccacgctttcttgaacgcgggcggcggaccccggaggcgcggcggctggcatgaaagcgcggccgccgcgttaacccgccgcaacaaaaacggtgtgttcgctttcacggctgcccgtcggcactcaagctcttctgtgtccagattgttagtgatgtgtcgggatgacggatttggaagcagcgatgcattcgagcacgtggataagcttctcgaactctcgcagtatgtcgagaagatcggtggtctccatcatggatatttcgtcaaccgagccgcggaccgttaagatgagagtgtcgatccaaatgtgtttgtctggcgggacgccttggactgccgttgcgtaataggtttccaactgcccgagaatccgttcgatcaggcagtggcgatgatgtcgatcaagcaatggcagcgcgtggcaggcatcgttgatgtcggcggcaagtgtcatgctgtcctcctgggcgtttcccagatttatcacaacaaccgaaacggctattgggacttaggtccgagtcttgtcatcagtccggttccgtacggtgtgggccgcgcgccgcaccacgtcgcgcgcttgagttcgcggcaagcggcggctggcggtgcgcgaccatggttcaagttgcctatccgcgccgtgcctcaatcagatggtgaagacgccacgattatcggtccggcctgggttcaggtgcccccactccgccatgagcttatatcgatggacttaggtcccccgcctcgatgtcccctcagcgttgagggcggcatgttcgacgatggtttcctcgcgcgagctacatcgtgcatcaagatgggaaaacagatgcgcttcgcccgacgcccggcccgccccaaatactggtccaaccaaagaggctccgcgctatgaaaccgtaaccgcgtccattcatcgatggcccagcctcacttattggaattgcgcgtgaccgagggcgtttgatttgtcgcattccccggtttcatttcacggttgtcccccgccgcccctttttctcgcgtcaatgagaacacgtccatcggcttacttgccgttaccggtatcaggcgactcgtcgcgggaacccaagcatctgactgaaccggtctggttgggggtttcccgtcagggcaattcgacgagctcagccagagcaccgggatttatgtctagtacgcgccacgcctaccccgaattttcatgggtaaggaaccacatcactttatgagagctcaatgtttgcttgccttgtggctgtcgaaggctcggtggccttggttttcatattgaaccgggccgcgcggagacgcgcggtcttggcatgaccagacaagttcaggtctgatgacatcctatacatcgatgtctcgtgtaccaccaaacatggtccaggattgatcgacgtattcgagcgacactttgagatgaggcatgcttgcggctcgtctagcatcgttgcttttcagatcaccgcgcaccatcaccttgaccgggaaaccaggtcgccatgtccgtcgtctcatgccacctcttcaaatgctattccggaacgctttccgggcggctgagttccagggggagatgtcgagcggaaggtgcggaacgaattgcttgaacggaggttcacatcgcacggacgaaacgctcgccacggtgcgttctagtgggtaacgcggctgagaaggtttcggggaatgcaaaagaccgccggcaaggctcgccagctggaggcggacgttcgacgggcaaaaggttgagcgaggaaaacaaagctcgacagtgcatcgcgcccgcgacgggaccagctggatgaaccggtcgcgcgtttctagcgggcgccatccaaaggaaacggcgaatgtcgcctacttgtataactcttgaaagataggatttccaatgtctcaaggcgataatccgaacaccaatcccgtccgtgcccttctcgcggagcttggcattgttgacccgatttccgttgccgatgtccaggagcggcatgctgagattatcgcggcctatcaagatggcaaattgaccgaggccgccctccgccacagtctagcgcgagcttgcgacgaaaccgtcactggaacactcgataccgagccagatcaacccaatcgaaacctgcggtaacggggtgacgcgcgtgcccaattaggtcgacacaggagctcgaaagacattggctcgcaggtgagagaggtcaggaacatccaaggccttgttgggtgcgatccagcgcatcattggaatgctccgagccgtgagccctatcccgtcatgagaactgaagacggcgactgtcggctcccactggctctgtttcctggcgggagatgccttgcctcgcgacgggcacggaccgcactggactggttgcctctaccaccaacgggacggtcaccggcgtaaaaacgcctaacgcaccggccgggtggcgcgatctttcacttcctccgccttgcctggatttcctccgacttgccgcggcgcgttagacccgcgcgcggccggtgcggctgttcatggttcgcgcggtcggcgcccgctggaaccggaaagagaatactggactaccgccgacgtcccgccaccgcatcgggaagcgtcaacacttgaaacgacggacacaaatcgccaaatcaacagagtggggacagctatatgaagtggccaaatgacgaagcaagtttccgttccaaaaagttcactcgatacgttgggcgccattgcaaggtttcgccgtcaacatcgttccagccggggctggctgctgggtaacagacaagtttcatcggcggcgattgctcgcttggaacagaaatccctggtcaaggaggtcgccttcaaaggcgagccaaccctcatcctcaccgaggtcggtaagcacctcctcgcggagcacccacgggattaagatcggggctttgaacgccccttttgaatggcccggtgctttcctgtcgtgagccttggagcttcagatataccgtgccggagaacggacagtcgatgatcacgtcacaagaaaaagcccacgacgtggaggcgtgggcttttcttctccgctgttgagggttagcggagggaacgagatccccgagttcaaaaggtccgttcgcgatgataacttcgcttagcatcgaaggttccccaccaataaattggcatttgtccgcagcttgctttcgttgcgtcgatcgacaaatggatcgcccacgcctaacacaatccggggcagaccatctgagcggctaggtatcttccatccaagagggtcgccctcgcccacgatgaatgctacggattgctcggcttttgcggttgctccccagcaagcatctcgtcgatgctaacaccttcgccactgtcccctgatctcaatgctccccgagctacctttaggtcatccatcatcttctcagcgaaagcgacagcttccttatcattcaaggcactatcggcggacatgcggacgctaacgagctcgttgccttccccgtgatactcgacggtgatcgtgccctcggtcgttcttgctacgtttatgcctaacaggcgcatctaaaacttccttgatttgtcgacgcgacgaatagatcgctcgcgcacaggaaagctctcgatgataataaggttccattgcacacgccaggcgatcgggacgacacgcgctcaagttcaaaaagcgcatttcaagggatgatctccttgcgagcctgtcctcgacgccggcgaggtttgttgactatgcctcgttcgcgccgaaggagcatgaaaccgccgcaagcgttacagtagccagccaaagcggcggccttgatcgggatatggcggcgcttaagggtggcggtcgaggagctggctaattcatcggcctcgagcttcgtcgtcagattccgtcaaacgggaagcaactcagcgcacccagcttacagccttggggacgtcagtcgggttgacgacctcacagccgacaccgcttacggatgccgttgctgcactaaaccgcgcaagggctgcttgggagccttcgcatgatctacctttggagggtagccgtgaccgcggcgagagcatccttgagttgtgtttggctgtagggctttgccagttttagcagattttcgcctacgcccgcggggagttcggcgtagcctgtagcaagtacgattggtgtaccgggacatatctccgcggctctcgaggcgaactcgattccggtcatgtgtggcattgcttgatcggttagaatgacatccggtacaaacccttccaggagcatcgcgatcgcgtccacgccggactgcgcctcaacgacggtgtggcctaggtcctccaacatgagggaagtgttcatcaagacgagcccgtcgtcatcgaccgccagaatattcagtgatctatcgagccttgtcggctccacggggtccacttgctgaaccgggaccgcctgcacttcaaccgctttggcaatgggcaaccagagttcggcgcgcgtcccctcgccttcttgagaatgcagaacgagcgccccgcccgattgagccataagtccatggaccattggcagccctaacccggttcccttgccaatccccttggtggtgaaaaacggagtgatggctttttcaagtgtcgccgcgtccatcccggacccttcgtccgccacggaaaggcagacatattcgccgggctccaggtcgcgaacctgatcacgttccacgaggcggcggctggcctcgatcttgatcacgccgccttttggcatcgcgtctcgagcgtttacaaccaggtttagcaccgccgcctccaactggtttggatccgataggaccgcgggcaatgagagcggatatgtcgtggcgatctcgatctgtggcccgatcgtccgctctagcagaacagccatttccctgacgagttcaggaacgtccaccgcttccaggtttagatcctgctttcgagagaatgcaagaagtctctgagtgagcgcggcgcctcgcttcgctccctggatagcgatatcaatgagttcttcgttttcctgtccagccgccgcgcgcttcttcgcgatttcaagactgcccagcaccgccattagtagattattgaagtcgtgcgcgatgccgcccgtgagttggccgacggcttccatcttctgggcttgaaacaactcgcgttgggcaagttgcagcgcctcttcggcctcccgcttctcggtgacgtccctggtgaccttggcgaagccgagaagctctccactgtcgtcccggatggcatcgatgatcacactcgcccaaaagcggctgccatcctttcggatccgccatccttcgttttcgaagcggccctcggtcgaggtaatggcgagtgccttcaccggcagccccgcgacacggtcttcatcggtgtagaagcgggaaaaatgctgtccgataatctcctggggttcatagcccttgatccgccgcgcgccagggttccagctcgaaacctcgccatttggggtcaacatgtagatggcatagtcagtgacgccttgcaccaggagccggaactgttcctcgctccgtctgagcacctgttcagccgcccgtctctcggtaagatcgcgcgtaatcttcgcgtagcccaccagctcgccatctttgtccctgatcgcgtcaataatgacgtgggcccagaacctttctccatcctttctcacccgccaaccctcggcttcgaaacgcccttcacgcgccgcagttgcgagcgcccgcttcgggagaccggatgcgcggtcctcgtccgtgtaaaatcgcgagaagtgctcgccaagaatttcgcgctccgtatagcccttgaagcggctggcacccgtgttccaactgatgactcggccatctggatcgagcatgtagattgcgtagtcgacaatcgcttcgaccagggttcggtagcggccgtccaacgtgcctactaggccgtcggtaacttcagcgatcattgtatccccttggaaactagctcatgaggtaacatctaggcctttcaatccttcacatacggcggcaatcggtgtgaagccaagtctctctcggcccaatgctcgtgcagatatagggccccaacgcgccgatcaggtcaatcgtccgtttccgtacaaagccagaccggcacggcgccaggtccacctgggatacggtttatcaagctaggccatgaagtcgccagctgtcaggttcgaaaatgcgcccgaagccgcgcgatggagactttgattttgctcctggaaagcttcgccacgggctcggcgacccccacgccttgagcggtgggaaccttccgtggcgctcctggtgcgagcaatgccttctccaattccggcgtttggaaaaaggtaggaatggcaggcatggaagtcgtgatcagactcgtggcaagggccacaaggccgtcggcgaccgtgatatacgtgatgccaaccaccgccagcatcctgctggaggtcatgtaccctcggctccatcgttgaaagggtatgataggtcgaagcagcgtcgctccagggagaacagccaggtgggacaacgacgccccatccgccatcgatcgccgatgttgccataatgggatcaagcgggcttatgctcacgctcgcgcgccctgtcatcgacgacatcctcgacgcattccgccttctccgccaacgctctgctcatctcgcgaagctgctggtcatccagtttctcgatgccgacgaacttgttttgagcctgcgatgacaggatcagttcatccagcttcgcctgcaaggccttgccatcacggttctgcgaattctggaggacgaagaccatgaggaaggtgatgatcgtcgtgcttgtgttgatcacaagctgccagttttcgctgtagttgaagatcggtcccgtgacggcccaaacaaggactaaagtcacagccaagacgaaggtcgcgggctttcctgacatggccgcgacggtggaagcaaacttggaaaaaccctgggatataatgctgtcgctcatggaaacctctctggtacccggcaaatgacaacgccaacgtcggtcaggggttcctgacatgggacttcagtccgatatcatttactttcgtcggctcggcccggtgaaatgccgaagcgtgctcaaggtcagtgcgcgaccttgcgtttttttgccagcgagattgccaacgtcattgccattgcgtccatatcgaacggcttctgaaggcagtggacagcggaaaatcgcgtcgggaccacctccccgtcggggtcagtgataaatatgaatgggatcccattcgcattgagcttgtcagctagggaatatacgcgatcctcgccaagacaaacatttagaacggcggcatcgatttcaacttgcttgacggcatcaagcccttctcgcagcgagtgaaaaggtccaaccacgtctgacccctggaattcgagcgcggcactcacacttgaagcccgcgtgttgtcttcctcgaccactagaatccgtctgttcaaaaggttcatgaaaaacatggggtgcccctgctatgtaggacatcagttcacctcgaaagccgtcggtcaacattcactcgggaagagtaaacttctgttcgctttcgtacaaacggcggtcgcgccaagaaaccgattttcgagccgccttcggccaaacacggtgttcggggaagttgaggatccattcgagtccgcggcgggggcgttcgcgctcgcatcgggtcaacagcgcgtcgcttcgatacatgattatggatcgcgtgaacgtgaccgctcggtggattccaccagcgtccgggcgccaacatcgatgggctggcatttgccgtgacgatgtcactgggagcgccttcgggttcggacctgcccggtgtttgacgtcttggcgaaccacgcgatgttcgcacttgactggtaaatccgccaaagtccgggcgccaaggctcagcgtctcgcggtcgtaccgctcaaagtctccacagccgcatcaactccagcggagccgacactcccgccgccaagacgtagggatcgcctgctacccccttgcggtttcgggcggtgagcttcacaggaagtccgtgtcccatcccgtcgatcgaatagaacgcgatagggttcttgccccgggagccccacgttcggcgcgtgccccatgatttcttttcctttcgaggtctcagctggtcaatgtcaccagcctgcagccactgctcgagcatggcgtccgcgttcttggggttcaccacggtatcgtccttaccctgccagatactgatcggcgggtatgatttcttgtggtcgaacagtcccgcgacgcggctcccccaacccgacgaaggcggcgttgctccattgctcattgcgcccatggcggagatggcgtcgcgcaccgagccgactggcattgcagccacgaaggcggcaccagcgaacgtttcggggtagtgggcgacgagggccgcggccatcgctccacccgcggacaagccgacgatggaaattcgcgagcggtcgatgcgatgcttctggcaggcatgctctatcatttgcttgatcgacatgagctcgccacggtcgtgtgcgacagcgctcggtcgaaaccagttgaagcagcgctgcggattgttccgggtggtctgttcggggaagagaattacgaaccccctagctctcgcaagccgcgtgaacccactcgcggcatcaaagctctcgggtgtctgtcggcatccatggagcacaacgacgagtggcgatttcggcagcaagcccgcaggcgcgaaggacttcatgaggagccctccagggttgctgtcaaacttcgacgttgtcgcgaatgtcgatatcgcggtccgcgcggctttgcgtgctcgcggccgaaccttcacttccaacggcttgccgatcttccccggggcgcgaagcaacttcgatagcgaccttggcaatcgcaacatcagacgcaagccacattatcgtcgggacccatcgtttgctccttgtgcagcgcaacatttgaaataggtcagtggagcgtctttgcaatcgccgcgggccccgtgggtgcgaaaatcgcgtcaaccacccgtcgctggacaacgttggatggttatgtcttcagattctccaccacgatcgccaccgcccgctgaagtggaactggtgtctggcacaatttctcgacaatctccaaaccgatctttgagcttagaaaagcacgcatttgaggggtcaccggatcagcgaagccttcggctcctcccatgtagttaagaggaagaccttcgaagaaatatgcagatggaacgtttagaaaatgcatcatcgcaaacatggtggaggcgctaacgcggttcgtcccccgctcgtatttctggacctgctgaaaggtcacaccaatagccgcgcccagttggctttgcgacagccgtttggccttcctcgcggcagcgatttgcattccaacatgaacatcgacgggatgagggctcccgtcgtgagccgagcccatacgaaagtcgtgcatagggtgcttttccaatgtttcctccgtcaaaacgaataggtcgattgcaatatgtcgcagatcacctcggaacttcctagctcaaaaggggttttaagtctgtcaggctctccaagcttgccaggctccagtgacttggccctgtccgcggtgaggctagtttcatcggctgctctgatcgaaggagacctgcctcgatcgtgggatggaaggccgcgttttcacatgggctggaaagcaagctcggatgtgcgatcgaccatgaacatggcatctttgatatgtgtttaccccaagggccgatggttctcggcattgagcgtttaactcgccgatcgctatgatggacaaccgatgaatttgggtgggtcgacgttatcgatatcttcatggacgagacgacggaatagaagggccgacccttggcaagactcgaggaaaagatctctcgcttgcttttccaggatgctgatagcaatcgaccatcaccgccgatgcctcggttttcgggggatagtcgcgcgtttatcacccctcgccaggtgccaaagaccacgagagccagcatcaaaatgaagagcgccagcccaagcgcggaccgggctctcttctttctggagcctgtgctcgccggccctgatacggggttcgcactggacctccatcgaatttcggaggctcagctacgactattgcgccgtgaagaaggtgagtaggaccttgcctttctcaccgagtaggcaaacaaaccggtccggcttaccagtctgctgtttgcggctgatgtaagcctctcctaggacgaccgtcttcacaggcacgtcgccaaccttggtgtcggccttgctcacagcgagactttccatgtcgaggacgagatccgtgatttctggtgaacgctcttgtagcgccaacaatccggtcgacttgcatgcatcgaccgccggatccgcgggcgcctggctctgcgcttgcgcgctgcatgaaagcaaagctaatccggcggcgtaaagtgctgatcttgtaattctcatgaacctccccctaaggagagcccgcgacgagcgcgagcccgcgacatcggtcgatgtcatgccttgtcgacgaccttcttcacggcttccttggcatcacccttggcgacctgagccttgcccttggcttcctggagggttcccttggcttgctcttcgtgattgccgacggccttgcccgcggcctggcgggcgttgcccgcgacctcgtttgccatgcctttgatcttgtctgacgtgcttcccatggtcgaatctccttggttgggtttcaaggaaaagcgcggctggatgtttcgttccactgctgggagatggcgcgatgaaaatggtcatttgaccgacggcgctggcggcgatggggagttgagcatttcatgccgttttccactttcgatgattgtcgcgttctttggaactgcaaccggcggaaaatcttacgagagtcagggttagccggctaaaacactctctctgccagaccgatataatggacagcggcgagcttgtatgtgcggagacggagcgcgaaacgccgctgacgcactcgttccgccagcacgtggtcgcaagggccgctcccctggttatcgaggatgcgacgtcgaccctcttgtccgcgacaacctcgccgtcccagagctgaacgtctgggcctacctcggcattccccttgctgactagcgagggcgatgtcctggatctcttcgcgcgattgacagtcagccgcgccattggtcgcctcgcgagcaggatatcctagcggactttggcaagctcgtggaagagcagatcgccctacgcgagcgggtggcggagttcgcgcggttggacaccgccctcgacccaatgatagtcgattgaacgtccgagctgccccgatgtcgtccgagtctgagtctcctgctccagatctgaaaattggcacagttcattactagcgggctggacaagcgttatcattggcctaagtcgcttctgcaacgatccccgggacatacgatgacagtacaagcttccgataaatacctggatatcttcgtcggtgacggagaaatggcgcaaatgatgcgccagcatgattgggagtccagctcgctgggctcgccagattcatggcctgaagcgctaaaggtagcgctgcggttgctgttgacgtcaaagttcgaaatgtggcttggttgggggcctgacatcgcgtttttctataacgatgcttaccggccaacactggggaacaagcaccccaatgcactggctgtgccgacgaaaatcttgtgggcggaaatctgggacgatatcagggagcggctggaaaccgtttatggatctggtcaagccacttgggaccgtgcgctcttgcttctgcttgagcgcaacggctattccgaggagacctatcacacgttctcgtacagccctctgatcggcgacactggtaaggtggaaggcgttttctgcgccgtggccgaggagaccaagcgggtcattggcgagaggcgcatcttgacgatgcgggcgttggcctcggaactcgccgccgtcgatacgcgaattgacgtgatcagagcttcccatcgcgctctaaaggacaatcttcaagacctgccgttcagtgcgctttatcttttcgacgaaagtggcaacgcaagacgggagtgggtatgtggcgcgctggatagccatccattgatgccggcggaaatcgtcggcagcgctggtttttgggacttggagcgcgcgtggacggagcaggacgtcgagctggtcagcttgacgggcattgatggcattccttcgggaccttggcccaaggcaccgaaacaggcggcggtcgttcccctgattggacagggcggcggtaggccgaaaggaatactgatcgcggggctgaatttccatcgcgcggtcgacgacgagtatctcgacttcctcaagctgatcacggggcagatcgcctcgcggctggcgagcactgaagcgtttgagacggaacgtcaacgggcggcggccttggcggaagcggccgaaatgcgtgaacaagccgccgttgccctggagcagcttaaccagcagctctcgtcggaggtcgaacttcgcaccgccgagcgggaccgtatgcgagacctgttccagcaggcgccgagcttcatgtgtatcctgagtggaccggatcacatcttcgagctcgtcaacgactcctacctacaactggtcggaaaccgtcaactgctaggcttgagcgtaagggaagccttgcccgaagtggaggggcaaggatttttggacttgctggatggagtgtacctgtcgggcaagccgtatatcggacggaacctaaaggtgtttctgcggcgcgatggcgacagtacgcccgacgaacggttcatcaatctgatctaccagccgatattcgatgctagcggccacgtggctggcatctttgtcgacggctttgacgtcacacatcagaagcgtgcggaagatcaacttcagagcctcaatcatacgcttgagcaacgtgtcgagcagcgcacacatgaactgcgttccgcggtactccagttggaaaaggaaaccgtagagcgcgaaaccgcgcagatggctctgcggcaggcgcaaaaaatggaggcgctcggcaatctcaccggaggcgtcgcgcacgatttcaacaaccttctgcaggtcgtgagcggcaacttgcaactcctgtccaaagacatcggcggcaacgctcgggctgaacagcgccttgagaacgccttggctggcgttgcccgaggcgcgaagctggcgtcgcagttgctggcgttcgggcgtcgccaaccgctcgagcccaaggtcattgattgccggaagttgatccagaacatggacgacatgcttcgccgcgccttgggagaagagatcgagctcgaaaccgtcgtttccggcgggttgtggaacacgctgatcgaccccagccagctggaaaacgccatccttaatctggcgataaatgcaagggacgcgatgaccggccgcgggcgcctgacgatcgaaacggcaaacgccgtgctcgatgacgattacgctcgcgctcacgaggatgtccgtcctggtcaatatgtgctggtcgccgtcaccgacacgggatccgggataccggccgacatcatcgaacatgtgcttgagccattcttcagcacgaaatccgaaggcaggggcagcgggctcgggctgtcgatggtttacggcttcctgaagcagtccggcggccacctcaagatttacaccgaggtcggccatggcacgacaatgaaactctatatgccgcggacaaaccaggtcgaggacgggctcgcgaaccttaatgcccttccagtgacgggcggcacggagaccgtgcttgtcgttgaagacgacgacggggtgcgggagacgtcggtcgcccttctgacggatctcggatatcgcgttctcaaggcccatgatgcccagtccgcattcgcgatcgtcaacagtggcatcccgatcgatctcctattcaccgatgtcgtgatgcccggtcccatgcgcagcacggaacttgcaaggaagtgcaaggcgctatttcctggcatggcggtgctttatacttctggttacacggaaaactcgatcgtccacggcggcaggctggacgccggcgtcgagctactatccaaaccctacacacgggaggcgcttgcccgcaaaatccggcacgtgctgaacaacgcacgccagcaccagatcgctgtcgagcggctcgggagacaggagcaggcggctgatcccgcccaagaggcaacccgcacccatgccgcacgggttctcgtcgtcgaggacgagcctctgatcctgatgtcgactgtcgatatggtcaacgagctcggccacgacgttcacgaagcaagctcggccgaggatgccttggcggtgttggagaaacacagcatcgatatcctgctcacggatgtcggacttccgggaatgtcagggaccgatcttgcccggcacgttcgggagcgctggccttccgtgcgcatcgtgtttgccagcggcgacgatagcgctaagtcagcgtccggtatcgaggatgcccttcagctgccaaagccatttaccatcgaccgcttgtccaaagtcctgtcgagttctatcgaaagtgtttgatctttgaatgcgaaccggcggatcgaccgacgtaatggggctgcggtttctgacaccgcctcttggtggaaaaagccgctaaagcgggcttttccattggagtggcggtaggggcaaggcttgtcgagacccctcttgaagtgtgtttcgcaacatcggccacgccgggccgtggcccgccgttccattcgcgatgcgaaggagggcagcgactggcggatgcccgcgcaggcgagtgaacgatgcgaaagtagcggttggtgagcggggaaccccgtggtggaccgatggcgctcccgattacaatcgccacctcgcacgcaacactccctatgcagactggcatcccgactgtgaggatcgcgcacttatcgcgaaggaatcctcgaatgtgaaacgctaagtagtgcggccggtgagcgatacagaatgcgggttagctgacgatcggggcgaagagagcgcttgatcaacgagcacacatccttgtttggagcggtgttccagcgaagggccgtcgtttccaattaaaggaaagaacttctagccacgagcggtccgaggcggtgttgcctccacttgtctgaaaatctgtacggcgcactgcccatgttcgagataatcgcgagaatcgagcaagcggaggggtggcccccgcctgctcttggtgattaccgggtggcggtaagcttgagacgggacacgcccgcggccacgttcagaccagtgttcgcctcgccgctcaatggctgcaacgcatagttcttggaatttccgcccacgagcgcattggcgcccaagcccacgcctaccgaggccgcggcagatgcgccgacataagttccagccagcgctccatcgccaactcgcgttggggcagtgttgacaacgatccagctaagatacgactttccggtgatgccgacatcgacgccgagcttgccgatcgtgccggtgtagcgctcgattttgccagtccgctgcttgaagttgcaagtcacggctttgctcgatccaatgatcattcccatcccacccgcgacttcgcatgaaagggtacccaaccgttcccgtggctcggtcgcggcaatgtgctgtggagagtgcttggactgtttatgcatcgacgcggcgttcgcctgcggaacgagcgcgagcgatgctaatgtggtgatcaggagtgcgtttctcatcttggggtcctcttgttcagccctctcgataaacgccatccccggcaattcgttcaaacggctcgtcgctttccggcatgatcgacggcgatcaactacactctgtggatctgtcacgataccttcagtattcattcaacaatccgatgagtacggaaattagaagctcgaagctttcgaatcgcaccggctgcgcaagatcggcagcggagacgtgttgtttctcgacccgcacacgactttcaaaccgcaagtgatgtccccgtgaccggcagcgatgaaaagccgcgactcgccaaattaagctggaggtttactgcaccggtggcatcgaacccagtgatcaaatcgagtgggtagcggagacaccaagcagactgaattagggttctagcagacggtacgctgtgaccttcaaaatgatcgatggtctgaatcttgctatccggatgtaggtccgttcggattttgtgacgagacgaacacgttgaaccagtccgagattggtgcgtccatcttcctgtctcacgatcagacgaaacacaagtccggactatgacgtccttcaagccgaacaagcgtgcatggtcgtagggatgcgattttccggagcttcgaaccctggctgccgacacgttgcgatgcgcgcgccgtagtcaggtttcgccgcttcattaatccaaagacgttccgccagggatagagtttggcgcgcaacttcccatcccatccctccatccacgaggaacgcaacctcactcgcgagccggcgggaagcccttcgcgcgcctactccatcgtatggcccgatatgaccccataccaacccaagacggcaccatccgcgccaagatgggcgcgagcacggctcaagactgggcggtatgttccatcgggccgggcaatcctaaactggatctcccacggctttcccgtcgggatccattccaaccaggttgatcgtacccgcacccggtcctccggatgcatctttcccatccaccgatcaatgcggtcctgcatcgtatcgttcgggagatcctcgaatgttgggctgatgtaataaacaacgccttctaccgtggcagcccaggcgatatccggattgagttcaacggcgcgacgaaagtgctcttcgctttgctggagcgtttgcatgacgaggttctgctcagtcacatctatggcgacgaccgaaaacccaaggttctcgccgccgatgtcacagaccttctgcgcaaagacgcgaaactccttgttgcccatgcgatagtcttgaggtggaagtggatccgtgcctagcgacctgctcaggacggtttcgacgcgcttgaggatctcaccctccatgacatcgtagatcgtcttgccttccagttcgcgtccggtgagcccgtgcattgccgcaaagatgtcattcgcccgcacgtgccggaaatgaaggtcaaggaagcagaggccgacgggagcctgttcatatagagtttccagctgatggagttgctggaacggagacgtgtcaagcaaggaggttggggcaggcatctgtggaagacgctgaaaaacgtcgaatgcctcggacgcgggcacgccttttccaaaaagccagccttgtgccaaaggacagccaagcgctcgcagtatcgccgcctcggtctccgtctcgacgccctcggcgacaaccgttatgtcgagactctggcccaaaccgacgactgacgagacaatcctgcgcttacggttatcatgctccagaccgcgcacgaactgagcgtcgatcttgagcttacggaaagggagggactctagtcgcgcaaggctggaataacctgttccgaaatcgtcaagcgagattgcgactccgatctggttgagccggttgagtgtccggtaggcaaccgcactatcggaaatcaaggagctctccgtgatttccatctggacacggccgagcgggaaccccgttcgcgaagctatggcgcttagccaatccggcaagtcatcgcggagaagctgatcgggggtaacgttgaacgcaagaaaaaaccgaccctgccatctcgccgccgccgcgcacgccgattgcagtaaagcctccaaaagaatgtcaacgagctgatgtttgtcgagaaggggaataaactgcgctgggctgatgtccccgagttcgggatcgctccaccgagcgaggatctcaaatccagcgagagatccagagcgaaggtcaacgattggctggaaggccggccaaatatcctcgcgcatcagcgcgatttcgagccgggaccgtagctccccggggggcatcgtcatgttgaagtaagaaacttccatccccccgtccccatgaattcaaagctcccaaacatcttgcgacagtgacctagtgcaagatcgtagtccactctagtaaaatcgtcgaacccgcatacaagatcgcgaacgtcgatccgatcttttatgtaacatgccagcgctatccgccacgatagcattcgtgaaaatggtttgacatacaagccgacgcatttgcgcacacctggtgcggctttcattatctcgctccgtggcgagctggacaaagtcttttaatcccgtggccgcatcgcttgtctcctcgattttacgccgtgggtgcccccgtgcacggttgacaagaacaattcgactgggacacgtcgtgctgatctcccttagtgtaacgcggtcgttcatgtaggttgccacggcgctaacggcagcgcaaagtctgggcagccagcacgtcaatgggagacgagctcggcgaactgactgtcaggcgcgcaagtatcggagacatgggatgaaaaggtcgatcgacatcaccgcctcgggtgggaaggttccgtcatggacctacaccccggatacgggcaacttcgtgaaaggtgctgtcctcttcttcatggacgccatggggcctcgccccgcaatggatgagatggctcaaaagctggccaacgccggctatttcgtgctactgcccgacctattttatcggttcggggcgtacggcccttttagtggctcctctttcggcgaccctcaatcccgcgaaaaacttgtcaagatgatcaacgaaacgacaacggcgatgacggtggaggatacatccgcgtttatcgccgctctcgagggagaaggtcactcagggccgtatggggtggtggggtattgcatggctgggcgacgcgcgctctcggtagccgccaaatacccagaaagtttcgctgccgtcgccagtttccatggcgcgggtctagccgctgatacaccggacagccctcacctcctggcttcggacatcaaggcgcgaatatatgtcggtaccgcgtcggaagacgccagcttcccgccggagcaatcgacacgtttcgtcgacgctttccgacgctcgggcgcggattttgcgctcgaaagctatgttggcgttcatcatgggtggacagtacctgatcgtgacggcgtctatgaagagtcaggcgccgaccgacactggcggcgcttactacagctgtttgatgaaacaatccggtaggtgggaggaggtttagatgccaaggatcccgccgccccctagcattgtcgatccgaagcctcacgtggccggatagtcatgacacggccccgttggatgatgcggtttcggacatttgaagtgtcgacgcgccgcgcgtttcctcctcagacgtgccggagttgtgccaggcaattcaacgatcgaaacccaggggcggcgacgcatgagtttggcggcacggccgcaccgtcccgccgcgcgaaaataggtcgacaggaaggacggcagttggacctaatcgggatttgatcgtcggaagttcgtcaaacccgcgaggtcttgccgtcccgtctcaatagacggaaatgggccgatgaagacgttaacgggcggtcgcgatctcaacacgcgaggcattcttcgcaaatcccgcacccatcatcgtcgatccaggagcgtgaacgcggcttgaggcagcacaggcagaccactaagtccccttcttgaacatcttccttttcaggtggcaggatctcaatcggaatttcactgacttgaacaaccgcgggctccatctcgggtctccacttcgaggaacttcacctaaaatagttaggcttcggccccccaacaagatcgaggcccccgaccgcaccgatcttggacacctccattctcctcatcagtctcgtttagggagtgggcgggttacgctcccatctcatcgtcccgacctcaattgtcgatccgtggccggtccatcaagtcatcttcgcgcgttagtcgcggccctcaagctgtgcttgcgtgttggagacttcgtgtaaattctcgtgcgcgcccgcgttgcggccttactcggagtttcggtttttggcgtcgcttccactgacgccccctcgcctcgctggcgcgcttcgcacttttcaaatgaatgaacgcccgcgttcgccggctgaaggtccatcccccagcttatgccatcgttcaggatgttcgaccgaccgggttttcaagtcgggagcttccgttgccgccagccgacatttcgcgaggctatgttgcattctggcactcgactcttgaacgaaagcgcgatttcctgcgttcggataggagatactaatgtattatgagtggaacgagttacggtttcgtcgccagtatctcatcaaatttgtttcggcatgggccatcgcgataatcgtcgccttcctgcctgtctggtggctagtccaagaggcaaccttcccttgacgctggagatcgttcgtcgaccttagtaagggcgaggatcgcatgaatttattccgtcagaccatgcaagcggatggtgcgaatccgttgtccgcgggacataatcttcttggatgtggcaaatctccctggagcgtgaccaatcaccgactggtcttgggcatctcctcgtcgaacctggtattttcacggcccggatcctcggacaggatttcttcctcgacgtcctctggcagcggctcgtccgggttcacgttcgcctcgtcgcgactgggaatcgctgggacaacaccccctgagtggtggtgagcgccgtcgcccagcggcgcgctgtcagtcggctctggcgcttggactggctcgaggtccatttccggaggtctgggcttccaggttggcgtgggaatcggttcattttctcgcttgttattcgtatcgcttgtcatttttttacctcgatctttccaggtaggaacctgtcttagcccacaaggttccgacgtggctcatgtccggatatatcgcgacgcttggaaccaatgtgtgccggccgctttgaaatgtcgcggtcatctcgacgggaccgggtccgacgctcccgtgcgccgctggttgaaacgaggtgctggggacagagcccgctcgaaaagcctcgaacgggcacgcaatcataccgcgcagtcgagcgcctatgaacccacgttacgatcggaacgacgtttcgcgaccaatggaacttcctcgatgttggcaagcaagtgtcgccttatgaggaaccggcggacgccttcccggatcgcggggagcggcacaatgcctcgcgcggccatgcgacaggccttgtcgagtaattcatatcttgtatccctggcctcttctggaaactcctccaaaaaatcgaagacgtcctcaagactggccagttcttggatgtagtggcgtttcctcagaaaaagtggtgcgtcaaacaatgtgtttgccatcgtcttctcctttctcagacgcgttcggcggcgcacgatttggggacggaagcttaaatttcaacccccccactttttagcgcaatcggttgggattcaaaagcaaaaggcgccgccgcgcggcaatcatttcgtcgcgcgcgcttaccgcgcgccgtcgcgcgaagaccatcgggggccgcattagtgcaagcgtgcggggaaaggccgaagccaatccttgtggtgagcggaagtaagacttcggtccgatagcggaacgagctcgagccaaatgcattttccctttcaggtacgaaaaggaattatgatgagcgaagatctttgggacaagccggtcgaacttatggtcgatagtgccgatcacttccgttgtgtcgcatgtagccgcgacgcggtggcatttctgatgacgtcttggccgaccaaaggtggcaaatccttctcggcggccaggcgggcgtgtctacaggcgcttgacggacggatcgccaccgccacggcgaagcttgcctttgttcaagcggctgaggaggcggggattctcaggcattgatgttcgtcagttcccttgcccgttttggcgggtcccaagtttcaagcgtttttgtggaacgttgtgatgaaagccgaaggacgaggaactcgtcataacacgacagatcttcggcgcgggctaaacgctcaggccgctccgcgcgaccattgccgcgatcgcaggctctcgggcgtcggcgatgcgaaaagcgtacgttagcgtacgaaaagcttttttttcaaccgacgcgctatatcccgtgagtatgttgatatttcgcaatcgcttgctgagcgtcctgtcgtccgaggtcaggcagtcgttgcagcctttcttggagcgacgatcgttccaacggggagagaaagtcgagaggcctcctcacgcggttcaaagcgccctttttgttgaagagggcgtgatttccgtcatcttccccttgtcgcccacggtgaatgtcgaggtgggcatgatcgggcgagaaggaatgaccggcacaagtcttttcactggggtctcgccagcgcttttcatcgctgaggcgcgctccgccggctgggcgttcgaacttcaaccggatgcgctgatggcgcttgtgcggcgagacgaagagttcgcgacaaggcttgaacggtatcgcgcatggcgaaatgttcagtccgcgatgatcgccgccagcggccgcgcgggaaacatagagcagaatctcgcccgcgagctgcttatgctgcatgatcggattgacggcgataagatcgtcgcgacgcacgaggaacttggcgcctacatcaacgtcaggcgcgcgagcgtcacggaatggcttcatgtcttcgaaggcgagcactggatcaaatcaaggcggggatatgttgaaataaccgatcgccctggcctcgaaaacgcggcgggagacttctacggccccgccgaaaacgcgtggttcgatatgctagcgaagctgccacccgacgcgatggccgcgcaataggggacgttaaaggaaccccgcgtggatgtcgatgtttggggttgtcgccttaacggccacgcagctccaatttggcgatagggcgaagggcttttcgtttctggcgatccttcgccactccctcgtgattgcggcggaacatgccgcctcatggcgagttattcccccgccgagcaggtcttccatgcttcctcggcgggtggagggccaaagtcccccaacgcttgtcggctctccacatcccctttcgatggaactcgcggccgccggccggaccacgcaacgacgagcggtcgccggttaggtggcgggctgtccgcccattgaagagacgacaggatccagcatgaccgtttacggcccaagccttcgcctcgcgctactgcttcaacacctgacgaccgaccagttcaagccacttccggtgggtgttggtcgaaagacggtcaacttggcggaagaagcaggattggttgaggtcagcgatcggtcagcggcacccaggtgtcgcctcacggatgctggtcttgcgcatagaagagcgaacccctaccgcttcgacggatagagcgcgccaatagctggaagacaatgcgcgaggtcgcggcttgcgcggttggcgaaacagtctttcggtctcatcgtaagccgtcttaagatgatcgcgatcaacgcggctcgccttggatgatctctcgacggacaagccttggcccgtgaggcggcgagaagcgtcatcatgttgcgcattggccgcactcgctagggaaataccgtggcaaggtaaaagggttgctttctcggggccttgccggtgctacgtgtgcatgcacgtgtcgtgattcgccgacatcgagcttagggaatgggtttgaatatgaaagcatttgcgggtcgcgtcttgctgttcgccgtggcggctgtcaacatttcgctttcgccattattggcccacgcggatgaaaagatcttcgacgaattgcgctttggtgcctcggcgtcgatccaggacggccacagccacgaagatggcgtcttccccgaagtcacggtcttcttcgacccgtttgatcaagatacggcgaagaactggaagcagacgctcgctcgtccgcgcctgaacctcggcacctcgatcggcacgtcaggcgaagcgacgcagatcttcggcggtctcgcctggacggtcaatttcaacgagaaggtcttcgccgaagccggtttcggtggcgtctggcacaatggcgatctcgataacagcgccgatggtcccgatctcggctgtcgtttcctcttccacgaatatgtcggcgccggttatcgcttcgacgcgcactggaatgtcatggcgcaagtcgcccattcctcgcacgccaatctctgcgacggaccgaacaacggcatgacgcgcgctggcgtacagatcggttacaaattctaaacgccgatggtgctcggccccactcgcccgtgcgagcggttcatgccgcgcgccgtttggacgtgtgcgattgtcgttgtcgtgagagccaatacgctcatggacgatttgcgattatcaccgccaccgaacgcgcggactgaggagcatccgacggcggttggacccgcgggttgctcgctcggcccgcatcagctcctcgcggagaagagcgcgtcgccgttgcagggtctggtgcctactcctttcggctggggtgtaaatcttgggcgcttgtgatttacctgatcgagaactgaacggttcctgtcatgccaaaggcccgccaacaccccggtgggcttttttcctgttgatattaatctcccgctaaccacgcccggcgtgcgtgctcgaccgcctacgtggccggtgctgaatgttgcttgcgccgcacacccctcaatgcttgcgacgcgagagatccggtgagtggaccacgaggacaatgaccggatctcaatcccctctcgcggtttcctccgtcgcgaatgatagtcgccgggcgccgctcgtgtgctcgtgttccgttgagcgcctcgtttgtggatgaccacgctccggcacgctgaaaggcccgaacgatatcggataattgactcgtcatattgtgcatggattctgctattttgtctcatcgggggctctggcggtgtcacgctgcggggaagcggtgcgcttatgcggagttggcctccgaatatctgctccgatcgcccaggtagcgcgcatcgcggcgcgtacataccggagcattgcttggacgcatccttgtagtcatcatacgatggacacgcagggcgcccacacacttcattgatatcatgggatttttcccgaggaagggaaccttatg

SEQ ID NO: 15 - DNA, 93321 bp, Rhizobium matallidurans
  source 1..93321: mol_type = genomic DNA
tcctgcatgcgcgaattcgagcgccgcacggaaatttcgggtggcgaaggtgccgccggccagagtcgcctcgccgcgcgcgacgtcttcgggcgcgagatgggcgagatcgacgaagacgtggcgggcgcggtcggtgccggcggcgtcttccagcgacgcggatgcgagatcaagcacgacgccggcttcgctggcacccttgtcgagaatgcggcggtcgccgatgacgatgatgtgcgccttggccttgatgtcctcaagggcaagaaggcttgccgtcagttcgggactgatgcctgcgggatcgcccatggcgagggcgatgacggggcgcgtctggccgatgctagaattcatgcttttcctccatcctcacgaccgtcatacgccatccaaattcccacatcaagtcttttgaatgctgcatacaaaattctgtgggtcaaaattgaaccacgccttgcgggcagaaggcttgtgcgctgggagttggattggcgaagacaccggcttgcgcggggacggatagtccgtcacgcaatatgcgttcaagcggctatgttcgcaacgagaacgggcctcgcgcgcgaaaatcaaagcggttgtaatgaggtggatggacgtgcttgagttcgcgcaagtcgtgcgcggcaaacatcgcgcgatacgatccgccgttcaatataggagagaggttctcgattgcgcggcgatcgtcggcagtgcccatgccgcgcggcatgtcgggaagcggcggccagatcagccgccaccaaatacccattccgccgaagcctgttacaagctctagtattggtactcttcgaacaccggctcgaccgagccgttccagcggccgttatagagcgccagcagatcctcggccagcgtcgccttcttggccatcacctcgtcgagcggcgacaggaagatcgtctcgtcctggccgtcgccgttgagcttgccgcgcgccttgagcccggccttggaaatggccagcacctcgcgcgccgtgtcgaacagcgcgtgtccgcggaacgcgctcttcagtccctcggccggcaccgcgttgcgcaatgcgttgacctcgtcgaagctccagtccttggtgagctggtcggccgcttcgagcgcggatgcttcgtagagtagcccgacccagaaggccggaagcgcgcagatccgccgccacggtccgccatcggcaccgcgcatttcgaggaagcgcttcaatctgacgtcggggaagagcgtcgagagatggttggtccagtcgcccatcgtcggctcccaggcggcgatctcgcccttcagcgcgccgttcatgaactgccggaaggtgatgtgggtgcagtccttgtagcggccgtcgcggacgatgaagtacatcggcacgtccagcgcccattccacatagtcgtggaaaccgaaatcgtcgcggaaggtgaagtcgagcaggcccgaacggttgttgtcggtgtcgcgccagatatccccgcgccaggactgcagcccgttgagcttgccttcggtaaagggggaggaggcaaacagcgcggttgccagcgactgcagcttcatcgatacgcgcatcttcttgcgcatgtcggcttccgacgagaagtcgaggttcacctggatggtgcaggtccggtacatcatgtcgaggccctgcgtgccgaccttcggcatgtagcggctcatgatgccgtaacgcgatttcggcatgaccggcgtttcggccagcgtccacttcgggctgccgccgatccccaggaagcggatgcccatcggctcggcgatctggcgcagcgtcgccagatgcgcgttggattccttgcaggtctgatggatgttttcgagtggcgcgcccgagagttcgaactgcccgcccggctcgatcgagatcgcgcccatgcccgattgttcggcgagaccgatgatgttctcaccgtcgagaatcggctcccagccgtccgtctgaccgagacccttcaagagagccgaaatgctgttctcacccgaatacgggacagggctgttgtccgcgcggaagaaggcgaacttctcatgttcggtgccgatgcggaacttgtcttccggcttgtttcccgccgcaagatagtcggtcagctcctgaaccgaagagagcggggtttggtcggtggtatcgcgagccattcaagtaacctgtattcgggaaacacccggacgtatccggacagtaggaaagggtgattaggaccgctggcccgcatgttgcaagtgaaattgtttcatcgacccatcaaaaaataccaacatccgtggcctgttgccgacgcgcctaccgggtccagtcgccaagcgccgcctggatcactgccatcgccgcgacggcggcggtatcggcgcgcaatattctcggtccgagcgggatggcggtcacgaaatcgaggcccttgagccgcgcgcgctcctcctctgaaaagccgccctcgggcccgaccagcagcgccagtttccgctccttcaccgcgttcaggatcggcagggggttttgcccggcatcgccctcgtcgcaatagatgatccgccgctcgctcggccagccgtcgagcatctcggaaagccgcaccggctcggccacctcgggaatgccgagaatgccgcattgctcggccgcctcgatgacgttggcccggagcttgtcgagattggtgatcttgccctgcacatgctgcgtcatcacggggcgcagcacgccggcgcccatctcaaccgccttctgcaccagataatccagccgcccgaccttcagcggcgcgaagagatagtgcaggtcggaaggctccggctgcggccgggtctgcgcctcgggcacgatcatgatgcgcttgcgggtcggcagcgaaagccgcgccttccattcgccgtcgcgaccgttgaaaacaaggatctccgcgccgtcgcccatccgcagcacgttggcgaggtaattgtactggtccgccgtcgcctccgccgccacgccttgcgagaggggagcggcgacgaacagccgttgcattctgaaattggcgcgcatcgaaagtcctgtctaaacaaacagcgcgaccatagcccaatagagcatggccgcaagcacggcggatgccggaacggtgatgacccaggcggcgatgatcgtcatcagatgcgaacgtcgcaccagccggcgccggcgaacctcgtgagtattggggtcgtcgggctcttccagcatccagacctcggccttgcggcgcatgtattcgatccggcgcctggagttgcgggtgtaccattcgcggaagaaaccgacgccgaacacggcacccaccgcgatatgcgtggtgctgaccggcaggccgagccaggaggcgacgatgaccgtgaacgccgtcgccatggccacgcaataggcgcgcatcgggttgagcttggtgatctgctcgccgacgagccggatcaggcgcggcccgaacagcaggaggccgatggagatgccgagggccccgatcagcataacccagagcggcgggccggcgccctggccgagtggctggccgagggcaacgcgcacgatggccgagagcggaccgacggcgtttgacacgtcgttggcgccgtgggcaaaggacagaagcgccgccgcgccgatgagcggcatctggaacagcacccgcagcgaactgttgcggttctccagtccctgcgcccgtatatgcaccagcggccgcgacaccagccagccggccaggcccgtggcgatgccgagcaggatgatcgtgagcgcggaaaacgttccggcggactgaagttgaaggatcatgtaggcggtgaagctgccgaccatcatcgcgatcaggacgggcacccatcgcttggccgcggtgatcttgtccacctggtagatgatcagcgtcttcaccaggtagagcatgccggcggcgatcaccccggcgatcagcggcgaggtcatccagctggacgtgatctcaagcatgacgtgccagttgaccggcgccggcccgagcgccccgatgccggcgccgatcaccgcgccgacgatcgagtgggtggtcgaaaccggcgcgttcagccatgtcgcgaggttgatccagagcgccgccgccatcagcgccgccatcatgatccaggagagcatgtcgggcgggatctgcgacgcgtcaacgatgctcgatgagatcgtcttcaccaccgcgccgcccgatatcgtggcgccgaggatctcgaagatcgcggcgatgacgagcgcctggcccattgtcatggcccgcgcgccgaccgccgcgccgacattgttcgtcacgtcgttcgcgccgatgttcatggccatgtaggccgcgagcgccgcacccgcgattaccagcccggcgccggggcggtcgaagacgtagatcgcggcgaacagcatggcgaggccgagaaagacgaagccgatccccggcgccaccagcttgcgcgagacgtatttcgaggcgtcctcgacctgcgtgagcttgtcgagatccttgtcgagcgttcgtttggtgaggacggtggggcggtcggccatgctgctccttgtgattgaggcctgcttttgcgccgctaattctagcagcgcaagatggcgggaatcattcagccggaatctgcttcagcgccatcggctcgcgctgcgcggccatgcggcgcttgaagagcagaaagagatcgcgcagctcgggttcgttgacgcgctttgcggcctcgtcgcaggacacccactcgaagcgccgctcgcccttttccttgaaactcttggcgatcgtcgagacttcgagcacgtagacctgaaccttgcaggtcaccttcagcccgttcttcagcacctttggatagtgatagcagccgatcgtctggctctcgaccgtcccgcgcacgccggcttcttcgtaagcctcctgggcggcgacctcataggaggtcttgccctccatcggccatcccttggggatcacccagcggcccgtatcacggctggtcagaagcagcacctcgagcgcgccggtcttgcccttcagccgatagcagagcgcagcatattgctggcgcggtgggcgccggaacatcagctgaacatcggaggcgaggcgggtaagaaggctcaacggtcgggtcacctttatcggttatgtgcacatgtgcgaatattagtgtctcatggaaagcttgcgcgatccatgtgcgtggtttgctttcggttcaggctttatatctatcaatagagcctttcgttttggtttcggtttcaagaaaccgccattgaatgctctatttccgtcacgtcgagtgccacttaatatgatattgactttcgtcataatcaacgaagacgtaacgacgcatgccgataggcccaaacattggcaattctgcgtcggttctccacagaaaacattgcccggctaacgtccttataggaggattcggttgccgaaggcctgttccggcagcgtgtatggcgcaatgagtcggcatggtctcgtcaccgctcccagtagggcaccgggccataaagctcggcgagataatcgatgaacagccgcaccttggccggcaggaactggcggctcggatagacggctgacagcgccacgttgcgcgatccctcatgggccggcagcacctgtatgagctgcccggatttgagctccgcgccgatatcccaggtcgagcgcagcgcgataccgaggccggcgatgacggcctcgcggatcacctcgctggagttggtgatgagcatcccctccggccggatcgacagcgcgccatccggcccttcgagccgccagacgtcgttattgtgtgccggcaggcagcggtggcgcttgagatcgtcgatgctctcgggcgtgccattggccttgagatagtcgggcgacgcgcaaagcacccggcgcaccggcgccagtcggcgggcgacgaggctggaatcggtgagctccgcgatgcggatggccagatcgaacccgccgccgacgatatcgctgaattcgtcggagagcacgaggttgatggcaagatcggggtgggcgtccatgaagtttttcaggtgcggcgcgatgtgcatgcgcccgaaggaggtcggcgccgagaccttcagcgtcccgtgcatctgcgccgagcgtccggaaatatagaactccgcctcctcgagcccggctaggatgccgagcacccgatcgtagaaaccctggccggcttcggtgagcgagatctgccgcgtcgtgcgctggaggagccgcgttcccagccggtcctctagccgcttgatacgcttggacaccaccgccggcgagaagccgagcgcccgcccggcaagcgacatgctgcccgtcgccgccaccttggcgaagatttcgagatcccccagattggtcatgtcgccccgataatttcttattttgtcataagtgcttagcatttgcgccagattggggaaagtgttaagcccgaagccttggcagtatggaggatacggccggtttcgccctggatggcgaagggaggaaaggcatgtccgacgccatttcgtttctcgccccgcgcgccgatgtcatggcgcgccgccggcagatcgttgccgatctggccgatctcctgccgccggaatgcctggtttccgagccgcgcgagctgatgccgttcgagaccgacgccttcgtctcctaccgccgcatgccgctggccgtcgcgctgccacgcagcacggccgaagtcgcggcggtgatgaaatattgccatcgctacggcatccccgtcgtcccgcgcggcgccggaacctcgctctcgggcggtgccatcccgcaggaggatgcggtcgtcgtctgcgtctcgaagatgaaccgcatcatcgagatcgaccttttcaatcgcgccgcggtggtcgaggcgggcgtgaccaatctcaacatttccgaagccgtctccgccgatggcttcttctacgcgcccgatccgagctcgcagctcgcctgcaccatcggcggcaatatcggcatgaactccggcggcgcccactgtctgaaatacggcgtcaccaccaacaatctgctcggcgtgaaaatggtgctggtcgatggcacgatcatcgatctcggcggcaaggggctggatgccggcggctacgatcttctcggcctcgtatgcggtcacgagggccagctcggcatcgtgacggaagcgacggtgcggctgatcgccaagccggaaggtgcgcgcccggtgctcttcggcttcccgacctcggaggaggcgggttcctgcgtcgccgatatcatcgcatccggcatcatccccgtcgccatcgagttcatggacaagccggccatcgagatctgcgaagccttcgccaaggccggctatccgctcgatgtcggtgcgcttctgatcgtcgaggtcgagggatcggaagccgagatggacgtcatgctgaaggatatcgtcgacatcgctcgccgccatggcgtcagcaccgtgcgcgaatgccagtcggccacggaagcagcgctcatctggaagggccgaaaatccgccttcggagccaccggccgcattgccgattatatctgcatggatggtaccgtgccgctcagccagctctcctacgtgctgaacaagacctccgagatcatcgagcgccacggcctgcgcgtcgccaatgtctttcacgccggtgacggcaacatgcacccgctcatccttttcaacgccaatgatcccgaggacgccgcccgcgccgaggcggccggcatggagatcctcaagctctgcgtcgatgccggcggctgtctcaccggcgaacacggcgtcggcatcgagaagcgcgatctgatgcgtcatcaatattccgatgccgatctctttcagcagatggccgtccgcgccgccttcgatcccggctggctgctcaatccctccaaggtcttcccgctcgaagggcgccagccccaatgatcgatcccggcataattgacctgtgtccgaccacggaggaggaagccgccgagatcatccgcgcccatgcgcaggcgggcacgccgctgagcatcgcaggcggcaacacccgctccggcttcggcaatgctgtgacagtcgaacaccgcctgcgctcgaccgcactctcagggatcgtcgcctacaatcccggcgagatggtgctcaccgcccgtgccggcacgccgcttgccgagatcgaggcggcgttggccaagagcggccagaccatggccttcgagccgatggatcaccgcccgctgatgggcacatccggcgagccgaccattggcggcatcttcgcggccaatgtttccggcccgcgccgcctgatatcgggcgccgcccgcgacagcctgctcggcgtccgcttcgtcaatgggcgcggcgaggcgatcaaggccggcgggcgggtgatgaagaacgtcactggtctcgatctcgtcaagctgatggccggttcgcacggcacgctcggcctcatcaccgaggtcaccttccgtgtgccgcccaagcccaagtcggaagagacgatcgtgatctcgggcctcaacgacgccgaggccgccaatgccatggccgcggcaatggccatgccggtcgaggtctcgggcgccgcccacctgcccatgaccgtcgcctggaccttcctcggcaaccggctgcccgagggcgaggcgaccgtgctgcgcatcgagggcctgccggcctccgttaccacgagagccgaaaagctcgctgccgccatggccgccttcggcccggtcgcgcgcctaggtcgcgatgacagcgccatcctctggcgcgagatccgcgacgtgaaaccctacgccgatggcggcccgcgccccgtctggcgcgtctccgtggcgccttcggtcggccaccagcttgtcgcagccctccggttggagaccggcgtcgacgccttctacgactggcagggcggtctcgtctggatgcgcatggaagccgacgccgaagccggtctgctgcgccgtttcatgcacatactcggcggcggccacgccacactgatgcgcgcgcctgatgcgatgcgcgccgcgacctcggcattcgagccgcaggtcgatgccgtggcgcggctctcggcgcgggtgaaggagaagttcgatcctgtgggcattttcagtccggggaaaatgggaggatggtgatggtgtggtctccagctatgtgcgggaaaaacccctccccaacccctccccacaagggggaggggcttgatgggcgcgacgtcctggccatagatcgcgacctctcaacgcccgctagcgagagaatgaagcaaggcaaatcccccaggttagcccctcccccttgtggggaggggttggggaggggtgttttatctgaggggtcttcatcgccccgcgacgcgcacgataacagggggccgttagcctgacatgcaaaccaactttacccccgcccagctttccgacccccatgtcgcggcctccgagcagattttgcgcaaatgcgtccattgcggcttctgcaccgccacctgtcccacctacgtcacgcttggcaacgagctcgacagcccgcgcggccgcatctatctcatcaaggacatgctggaaaatgaccggccggccgatgccgaggtggtcacccatatcgaccgctgtctctcatgcctcgcctgcgtgacgacctgtccctcgggcgtcgattacatgcacctcgtcgatcacgcccgcgcccatatcgaaaagacctacaagcgccccctcatgaaccggctgacgcgcgccatcctcgccgccgttctgccttatcctggccgtttccgcctggcgcttcggcttgcccgcgtcggcaggccgttcgaaggcctgtttcgtcgccatcaggcgctgaaacccttcgccgccatgctggcgcttgccccgcgcagtctgcccgcaccctcgcatctggcgacgccggcaacacacagggcgaagcagggcgagaagcgaggacgcgtcgcgatcctcaccggctgcgcacaacaggtgctcgaccccgccatcaacgcagcgaccatccggcttctcactcgtctcggcgtcgaggtggtggtgcccaggggagaagtctgctgcggctcgctggtccatcacatgggccgcgaggaacaggcgctggcaagcgcccgcgccaatgtcgacgtctggacccgcgagatcgaagagggcgggctcgacgccatcatcatcaccgcgtccggctgcggcacgacgatcaaggattacggccacatactgcggctcgatcctctgtatgccgaaaaagccgcccgcatctcagcgcttgcacgagacgtcaccgaatacctggcgacgctcgaccttccctcgcacatgccgagggggctgacggtcgcctatcattccgcctgttcgatgcagcacggccagaagatcacgctggcgccgaagcagctcctgaaggcggcgggcttcacggtgcgcgatccggccgaaggccacctctgctgcggctcggccggcacctacaacatcatgcagccggatatttccgatgcgctcaaggcccgcaaggtgaagaatatcgaagcgacgaagcccgatatcatcgcgaccggaaatatcggctgcatcacccagatcgcgtcaggcaccgccgttcccatcctgcacaccatcgaactgctcgactgggcctatggcggtgacatgccggaaaagctgttggccaaaacgcgtggccggcaaagttcacggtaagcaaatttagcagccagaaaaatttaagggtttcgggctagcctcgggcggccggatcgtccggcggcatctggagctcaagcatgcatcgtttcatcctggcgttcgccgctcttctcggcgccaccgaggtcgcacaggccaacagccgtttcttctgttccgccgacgacaagaatgtccgcttcacgatcgaaagcgggttcaaggacgagccgggtcatgagctcaatcatttcaggggcgcattcatcctcaagaacgaaaccgcgccgcagccgcttggccgcgtcacgctcgattccgatagcctgagcaatcgctggtcgcacaatggcgaactgcgtctggaagtgctctacgatggcggaaaggcggcgggcggacagagcgtcaatctcaccatctccgccgagcagccgaatggcgcaacggcgtttcagggcgtctacgacatggcggtctatggcggcgaaaagccgatcgcgtttaacggcaaggtaagctgcggcgcgaaatagcatttcctcgaccacgagggaaacaggcggccggctggccacctgtcctgatcatcgcgagcactgcacgcgtgttcagccgccgaacagcgttctgagcacgtcgacgccgcggtcgtcgaaggcgacgttgccctgcttgttgccgggaccgacgacgatcaccttggtgccgacgggaacccgctcgtaaagctgctcgacatccttgttgaccatgcggatgcagcccgacgacaggttgaggccgatcgtccagggctggttggtgccgtgaatgcggaaaatcgtgtcgcggccgccctggtagagatacatcgcgcgcgcgccgagcggattgtcgggaccacccggctgcacggcgggcagcttgtttccggcgcgggcctcgcgggcgcgcatttccgccggcggcgtccaggtcggccattccgccttgcgcccgaccttcaccacgcccgaccagccgaagccttcgcggccgacgccgatgccgtagcgcgtggcccggttgcggccttcgacgagatagagatatttgttgacggtatcgacgatcacggtgccgggcgcttcgtcggtgatgaggcgaaccacgcgcttcttgtattgcggcttgatctgctggctttgcttgacgccacgcacggcatcggttgccgtcatcacgggctcggcgctggcaacggccaccatgcccgacaacgcgacggccacggccgccgcgagcagagatattgtcttcatatcgattcccctccaaggcacgatcgccgccaaggctaatggaatcgaccgggatttcaagcttggaacccctgaagatgccggggcggcgggaaggaggctccccgccgtccacggtcacttacatcacgacgacccgggcgccgactttgacgcgctcgtagagatcgacgatgtcttcattgcgcaggcgaatgcagcccgaggagacggcgaccccgatcgtccatggggcattggtgccatggatacgatagagcgtggagccgagatacatggcgcgtgcgccgagcggattttccggtccgccgtccatgcgcgccggcaggtagcgtcccttcgccgcctcgcgcgagatcatgtcggatggcggcgtccagttcggccactcggccttgcggctgaccttctgcacgcccgcccactcaaagcccggcttgccgacgccgacgccgtagcgtcgcgccttgccatccgtcatgaccagatagaggaagcggttgttggtatcgatgacgatgttgccgggcgcctccttcgtctggtagtcgacgatctgcggcaggaactgcggctgtagctggctgcggatcaccggaataccggaggtggcggccgacgccggctgcgcggcgggcgcacggcgcacggcgcgcggggcaaacagcccgcgcggctgctgcacgacgacgggacgctggtaggcgaccggacgctggtagacgacggggcgaacattgccgccgttgagctgcatgatccacggtgcggcgagatcggggctcagcaccacaggcggacgggaaacgtaacggtcgtcgccaagggcggccgtggaaaggacgccgagcagagctgcggcgagcaaaacggatttcatcatcggacgaactctctacaatggccgaaaatggacgggcggcatccgccacctgccgatcatgctgccaccgtgcccgccagcgaatggtaaattcgcattcattaaaagccgaaccggaccataaacttttcatcagggttatcgttcggtttggaaacagggtttgcaaatggtaaagccggattcgcggggcactgaaacgaatgggacgtgatgagcgacacaggcataacgatcggtgaggacggcaggagccggtgtcattggcacggcaacctgccggattatctgcgctatcacgaccaggaatggggcaggccggtcaccgacgatatccgcctgttcgagaagatctgcctcgaaggcttccagtccggcctctcctggctgaccatcctgcgcaagcgcgagaatttccgcgccgccttcgccggtttcgatttcgagaaggtggcgctgttcaccgacgaggacatcgagcgctgcgtggccgatgccggcatcatccgccaccgcggcaagatcgtctccacgatcaacaatgcccggcgcgcgatagagttgcgcgacgaattcggctcgctggcgcactatttctggagctacgagcccggtcacaacgaacgccccaaggtggtcgaccgcgccaccatcatggccaatccgacgacgccgacctcggtcgcgatctccaagaatttgaagaagcgcggctggacctttgtcggcccgaccacaatttacgcattcatgcaggcaatgggtctcgtcaacgatcatctggagggctgctactgccgcttagaagtagaggcgatgcgcgaggcattgatacgtccatgaagaaactgatggcaacgacgatcgccgtggcggtgatcgctcccgccgcgatggcgcagacaccggacctgcagcgtggcgaaaggctggaaaagctgcagtttccggcggtgacgatggagctcaagggctggacgaaattcggcaacggcaaggtctacaccttgccgatcaaggccggccagcgcgtgaagatcgatttcacgacgaagagccagttcgccttcctggcgatcttcgatctggcggcacccgacgacgaggcgatcttcggaaccgacgagaacggacagacctttgagacgacggccaagcaggacgccacctggctgatccgcccctattattcgaaggcctcgccaaggcgtggccttggcgcgccctacagcattctggtggaaccgcaggcggcctcgaccgcgcctgcccccacggcaccagcaacgcccgcgccagcccccgccaaagacagcgagccggcgccgcttttcccgttgcgcaaataagccgggctctagccgaggctgtcgatcacgccgcgcaattcgccgagacgttcgatcttgcgaaagcgcggcgcctccgtcggctcctcgacatgttcgagcacccaggtcagctcatgcggcacgaacacgccgtagctgccggccgcgatcgccggcacgatgtccgatttcagcgagttgcccaccatcatcgcccgttccggcccgccgccgatcttggagaagatccggcgataggtgacggccgtcttgtcggagacgatctcgacggcatggaagaaatccccgagcccggattgcgccagcttgcgctcctggtcgaaaaggtcgcccttggtgatgagcaccagcaggtaatggtcggaaagggcggccagcgtctcgcgcacttcaggcagcgtctcgaccgggtgtgacaggagatcccggccggtatcgaggatctgcgcgatgacggaagccggcacgttgccctcggtgatctcgatcgcggtctcgatcatcgacagcgtgaagcctttgatgccgaagccgtaatgctggagattgcgcttttccgcggcaagcaaccgctccgagaccaccttgccctcggcgtaatcagagagcaggtcggtgaaatgcgtttccgtcagccggtagaattgctcgttctgccaaagcgtatcgtcggcatcgaagccgatcgtggtcagcgtgcgggtcgtcatgggcgccccctcttgttcatgcagaaacaattaggagcctcgcgcccttgccgcaagggatggcgtcactgatagacgatggcgccgatgaagcgcgggcgcgaaaacgccgtctccgcgaatgtcattgtgccgaagccgaggatgttcgtcatcgcggtatagctcgccgcaccctcgacatagatcaccgaatctccgtcggtcagctcaggcagcgacgaggcgttgaggacctgtgccttcagcaggccggccgtgccgctctccttcgtccagtccagcctgtaggccccggcggtcttcttgatgctggagatccgaagcgcgatcggcgcggtgctgttctgctgcagatgcgtgaagacgctgtagagattggacacgaaagcattgtcgatcgaggtctgccgcgaaataacgtcggcgacgatgccattggcctgcacgatgttctggtaggtccggtacaagtcgaaaaccgtgatgctggccagaaagaaaaacagcaggatcggcgcgagaagggcgaattcgattgccgacgcaccggagcgctcgtggatcaggcgggaaaaggcgtgcttgaacatcaggtcggctcgttgacgaaggcaaagctggaggtcagctggatggcgcccgtgttgtccttgggaaaactcaggccgaagccgagccccggcaccagcggatcgaccacatagcaggcgcgggtgaagatgatctgcgacggctggccggaattgtagctggtgacgggatcgatggcgacggaccggtcgacgcagggcgtgcccgtcgtcggaaaatcggcggccttggtcaccggcgtaaactcgattcggatcgacttgacgcaatcgctgaggatcagggcttccttgcagaccgacgccttgaaatcggcgtagctcatcttggcgccgttgatctgtagcgcgcgtgaactgcggctaacggcgcggtcgagcatgatcgactgcgtcatgatgaagcccgcctcgaagatcgagaagatcacggcgaagacgatcggcgccaggatggcgaattcgatcgccgccgccccgttgcggtcgccgagaaagcggcgccgcccaatggaaaagcccgttctcatcactgcgtcagtctcagtttgcggatcgatgtcgagatcgacttgaacgcgtcgccgatgccggcgccggaggcctggtagaaatgcgccgaactcgtcgcgcagttcttcatgctgttgatggcggtctggtcgctgccgagctcgaagccgatggtgaagatggtgatgcccttggacttcgcggtcgtgcagatcttgctgagataggacgccgtgtcgccggacatcgtgttgttgctcgggctgagatccggcgagcgcgtgtagtccttcgggcggaattgcgcggtgatcacgccgtcggtcatcaggaccagcaccttcatggtatcggcgtcgctgaagctggagggacggtttgagaacttcgaggacatctggccgctggcgatcgccgcctggacgatgctcgacgaggcgggattgagcagcatgtagccccactgcatcgcattctgcgtgccggtgccgtcatagagctgcagcgcgttcagccgggccttgagaacggtcgcgtcgttggagaaataggtgatcgcgtcctcctcgccggggcaccaccaccactttttttccttgtccgtcgtgttgtagttccagttcgtgaagatcggcaggttcgaacgggccttgaagctcgggatcgcatcgctgccgtagcccgcattgtcgagctcgaagcatgatcccttgtaggtcgggtccttggtcggctgcgcctggccggtcaggcgcgtgccgccgagcttgtcgaacaccgcggcccccacgttgacgtggcccgcatagggcacgacgctgatcgtcgtgtaatccttggtatcgtcggtcaggatctggtcgatgaactgctgcgaggcgaccttcaggttcttgatcttgctgccgaccatcgaaccggacatgtcgagcatcagcgacagctcgatattctgcttggcctcttcggcgctcgacgccgtcctgatcgtcaacgtcttgacgccggccagatgcatgaaggcggtgttgatcgtgtaggaggcgttggccgagatcttgcgcgaattcatcgcggtcgcctcggagaagttgatgaccacgtccgcgccgtaggcgagattgttcatgtagcttttcaggacgtcggcggtcttttgcttctgcgacagcgacgccgcggctagcacgccgcgatcaagcccatcctgcatctcgacgcgcaccgcttcatagcgcgccaggtcgaccccggcgccgcccgccagggtcaacggcacgaaaagcagcgcgacgatcatcgccacattgccgcgcttgttgcgcagcagtgaactcacaagctgaaccaaggatgtcatgattgcccccgcatctgcgaggattgtttaggtggatatcaattagaattttatgaatccatagggaaagtgctgtaaatacaatcactaagagcgataattgcgtagtgcaatcatggttgtgcgccaatgagttgcgggcgtcctaaattgttgcaaccggtgcgtatcgcatgagccgttgaaaccgagcgcgcgaaacttatgtctgatgggttcatgcctgccgcggccgcggccatgccagccccgtgccgcccaaaaatcctagaaccgggataattcgtccgccggcgctgccgcggtcctcacaaggaaacgtttcaacatgcgttacaaccagctcggaaataccggcctgttcgtctctgaaatctgcctgggcaccatgaccttcggcgccgccgacgacaaaagcccctggggcgccatcgccgatgtggaccagaaggcggccgatgcgatcgtcggtcggtcgctggctgcaggcgtcaatttcatcgataccgccgacgtctactctttcggcgattccgagaagctgctcggccagtcgctgaagaacctcggcgtggcccgcaaggatgtcgtcatcgccacaaaggtctatggcgcgatgggcgacaagccgaacgatcgcggcgcctctcgcggccacatcatggattcggtcgaaaaaagcctcgagcgcctgcagaccgatcacatcgatctctaccagatccacggcacagacagcgtcaccccgatcgacgagacgctgagggccatggacgatctcgtctcgcgcgggctcgtgcgctatgtcggcgtttccaactggcaggcctggcgtatcgccaaggcgctcggcatatcggaacatcgcggctttgcccgcttcgagaccgtgcaggcctattattccatcgccggccgtgacctcgagcgcgatatcgtgccgatgatgaacgaggagaaggtcgggctgatggtctggtcgccgctggccggcgggctgctttcgggtaagtacggccccggcgcgcctgggaacggcgaaggccgccgcgctgccttcgactttccgcccgtcgataaggaccgcgcctgggcctgcgttgccgtcatgcgcgagatcgccgaaaagcagggcgtcagcgtcgccaccgtggcgctcgcctacgtgcttgccaagcccttcgtgacatcggtcatcatcggcgccaagcgcatcgagcagctcgaccagaacctcgcagccgtcgcgctgaagctcgacgccgacgacctgaagaggctggacgaggtgagcgaactggctcccgaatatcccggctggatgctgacccgccaaggcgtcggccgccgcccgcagcctttcgagccgaagggctgagcgcggattgaagcgccggacgccggggagaccgggcgtccggcttgtcatcgatgaggcggccttacttagcgttcgccttcagccatgcctgcatctcggtgatctcggcctcctgcgccttgatgacgccctcggcaagcttgcgcatgtcggcatccttgccgtattgcagttccaccttggccatgtcgatcgctccctggtgatgggcgatcatgccgcgcacgaagtcgacatcggcgttgccgctgtattcgatcatcatgcccttgtgcatcttgttgttggcctctgaaaaggcgcggctggacgggccgtcgtcacccatcggcatgctcatatccatggtcttgtcttccgcgcctgcgggaagagcggtgagcgaaaggccggcgacgagcccggtcgcgagaacgagtagtttaaaagacatgggatatccttcctctgtctggcaatgaaatccaatgcggccgatagcgccgcgtttctcagggtcttgattgtcagatcggacggggagggggagccagtggcgccggccttgcgtcgggaagagaaagcgcgatcgccggcgagggataggagaacgcctgcttgccatcgtcgtgaacgatcacgtcgacgggcacgaccaggcaggcggaacacagcggcatgtgcgtcatgccgccgccctcacaggggctcttagccgacgccgggaccttcatgctgtcccccatctccatatcggccatagcttgatgcgacatgcccgtgctcatatcggcagcggcaggccggttcatcgacgcgcacatggggcatccggcccacgcgaacatcgttccgtaggccagccaggcaagcatcatcgtcgcgatagacagcaggcgcatcggcaaaacataagcaagtgcgccaccaatgccaagacgtcgcgttgcgctaatcgagcttggcggccttgcgcagcgcatcgttgatccgcccctgccagcccttgccggtcgccttgaaggcgtcgatcacgtcgggatcgagcctgagcgatatctgccgcttcgggctctccaccgccggccggccgcgtgaacgcctgatgctctcggcaagctcgggaaagacctctgcaaaggggcgcgccttcttgaagtcctcttcggtccactcgggattgtcggggtcgtcggcgataccacgttggatcgcggcctcctcctcgtcagtgaggtcgaggatctttcgactggaattgttcatagagcctcctttcctggcggcttgcccggcgcatcgagatgaccgatatgccctcgctcccgagaacagcgaaaacgacggcgatcacatcctcgatcaggatgcccacggccttcagcctctggctcctggcgtcgaggatcaacgccgccgcgaagaaatcctcatccaggtcgcgaaagtccagcccatgcttcgcagcattgcggacacgtttcggctcatcccaaacgatcttcatcgatacgatatcgcaaaataaaagtgatacaataaatctttgattgcatcacgatatcttgcaattcagcagaccgcaatcacctgatgcacgacctggtaatccggactttcctcgccgatcggcaccaccggccaggcccatgccgcccgcgcctccggcactgcgaccccgtgcatcagatcgctctcctcacgggtctgcccattgcggtcgatcacggcataggagatgtcggtgacgaggcagctcttgaacggcatgcgcgacagcccggagatatgcgccgcgatcagctgctccaccgtatcgtcaggcatccgctcgcgccccgcctcgaaccgccgctgaacgccgcgcccgacctgcgagagcagattggccgaaacgacgaggtcgagatagggcacgttgcgcaggaagcccagtggctccggctgttcgccggccgcaagcgcgtcatagcccgagagatcgcgctcgatcagccggacattgcgataggccttgcggcgcatcttcatcctgaccgtcgcgacatgcacgagatcgatcagaacgacagtatcgaagttggccgccagctcccggatcggcacgtcgcgcagcaggccggaccccagaaccacggccgtccgccgctgcttgcaacccgccatggcgacaaggatcgcccgccgcgtattctcctcgtgctccgcccactgccggctgcaacgattggcgcgggaccacagattgacggagtagcggatatatctgcggtgcggcttgctggtgaagggaagggtggcggcatagaggagggcttctgcgatcatggtcagtcgaagttatttcaacccccagttcggatcgtcctttgccaggagttcgtattcggcttctgctgcttccatctcggcgatatcctcaagatactgctcgatcacctcataggcatacttctccaccgacatctcggcttcggccgcatgttcgctcaacacccggtatgattcgtcagacaattcgacggtgatacgcttgcccatggttaaatcctttgctgatgccaggataatagcagtccggcattgccttcgccagccaccacccttgccgcatccggccctttccgctaggaaaccgccactgccacaccgagcggaagacgttggaaatgaacgacaagcagaagaaaccacaaaagctcaaagccagacttccccgcggcttcgtcgatcgttcggcggccgatattcgcgccgtcaacgagatgaccgcgaagatccgcgaagtctatgagcattatggtttcgatcctgtcgaaacgccgctcttcgaatacaccgatgcgctcggcaagttcctgccggatgccgaccggccgaacgaaggcgtcttctcgctgcaggacgacgacgagcagtggatgtcgctgcgctacgacctgacggcgccgctcgcacgccatgtcgcggaaaacttcaacgagatccagctgccctaccgcacctatcgcgccggctatgtcttccgcaacgaaaagcccggccccggtcgtttccgccagttcatgcagttcgacgcggatacggtcggcgcgccaggcgtccaggccgatgccgagatgtgcatgatgatggctgatacgctcgaagcgcttgggataaagcgcggcgactacgtgatccgggtgaacaaccgcaaggttctcgacggcgttctggaagcgatcggcctcggcggcgacgacaaggcagcccagcgtttgaacgtgctgcgcgccatcgacaagctcgacaagttcggtcccgaaggggtgaaactcttgcttggcccaggccgaaaggatgagtccggcgatttcaccaagggcgctggtttggacgatgaacaggccaatttcgttctggcgatgacgcacgccacgatagccattcaaggtaaggctggcgacggtgaggcgtatggatctgcagcggctttgacgccgcatccgcaatttccattcaatgaatattttaataaaaccggaaatatgtccttcggcgagggtgttgccgaactctcttttataagagcactggtcgtcagtgcaggatatgacgagagccgcattaaaattgatccttcttgtgtccgcggtcttgaatactataccggtcccgtcttcgaagccgaactcaccttcgacgtcaccaacgaaaaaggcgaaaaggtcgtcttcggctccgtcggcggcggtggtcgttatgatggtctggtctcccgcttcatgggtcagccggttccggcaaccggcttctccatcggcgtctcgcgcctgatgacggcgctgaagaacctcggcaagctcggccagagcgaagtcgtcgaacccgtcctcgtcaccgtcatggatggcgatgtcgaggccatgggccgctaccagcgcatcacccaggagcttcgccaggccggcatccgcgccgaaatgtaccagggcaactggaagaaattcggcaaccagctgaaatacgccgaccgccgcggctgccccgtcgccatcatccagggtggtgacgagcgcgccgacggcgtcgtgcagatcaaggacctgatcgagggcaagcgcctctccggcgagatcgaggacaacgcctcgtggcgtgaagcccgtgtcgcgcaggagaccgtgtccgaagccgatctcgtggccaaggtgaaggaaatcctggcggcgcaggcggaagatcgcaagcgagcctctgatgtttgacaaacccctccccaacccctccccacaggggggaggggcttttggccgcaccggcctgcccaatccatcgttggcaggcgctgctacgtttcagtttttgctcgactgccaccccgacttagtccctcccccttgtggggaggggttggggaggggcctttatttgggagcaatcccatgcccctgatcaacctcccagccttctccgaagacctgctcgccgaattcgccgcccgccgcacagagcgcgtggatacgccagtcatccagccggccgaaccgtttctcgatatcgccggcgaggaccttcgccgccgcatcttcatgaccgagagcgaaaccggcgccagcctgtgtctccgtccggaattcaccatccccgtctgcctgcgccatatcgaaagcgccatgggcacgccgaagcgctatgcctatctgggcgaggtcttccgccagcgccgcgagggcggcaatgagttttatcaggcgggcatcgaggatctcggcgatatcaacatcccgagcgccgacgcccgcgccatcggcgatgcggccggcgtgttgtcgcggctgctgccaggcaagaaactggccgtcacgctcggcgatcaggctgtcttcgaagccgtcgtccaggcgctcggccttccgctcggctggcagaagcggctgatccatgccttcggcgacaccacccatctcgaagcgctgcttgcgagcctggtcagcccgcaattcgtcaccggcctcagcgacgatatcgcgcgcctcctgggcgccgacgacgaggaggcgctggtcgcccatatcgacgccaccatgcaggcgacgggctattccaccaatgccagccgttcgccgcaggatatcgcccgcaggctgaaagagaagctgatcctctcggaaacccggctcgatgacgcggccttccttgtcctcaaggagttcctgtcgctcaacgtgccgctcatcaacgcctcggcggcgctttccggcttcgccgatgccgccggcctcaagctcggcaatgccctgtcgcgcttcgatggtcgcgtcgcggcactcgccaatgccggcgtcgatctcgcgctgatcgattatcgcgccgccttcggccgcccgctggattattacaccggcctcgtcttcgagatcggcgtcgagggttccgatgccgtgctcgccggtggcggccgcttcgacaagctgatgacgctgctcggcgcgaaagaacgcatcccggccgtcggcttctcgctgtggctggatcgcatcgaaatggaaagggccgcctgatgaccattaccatcgcgctgccctccaagggccggatgaaggacgacgcctcggccatcttcgagaaggccggcatgaagatcacggccgtcggcaacgaccgttcctatcgcggccgcgtcgaaggctgggacgatgtcgaggtcgccttcctctcggcttcagagatttccaaggagatcggcaacggcaccgtcgatttcggcgtcaccggcgaagacctgatccgtgaaggcctggcggaagccgacaagcgcgtcgagttctgcgcccgcctcggcttcggccatgccgatgtcatcgtcgcggtgccggagatctggctcgatgtcgacagcatggccgatctcggcgacgttgccaccgatttccgcgcccgccacggccgccgcctgacgatcgccaccaaatactggcggctgacgcagcagttcttctcgcgccagcatggcatccagctctatcgtatcgtcgagagcctgggcgccaccgagggagcgccggcatccggctcggccgatatcatcgttgatatcacctcgacgggctcgacgctgcgcgccaaccacctgaagatcctgtcggatggcgtcatcctgcgctccgaggcctgcctcgtacgtgcccgcaaggaaagccacgccgacgagccttccgttgcccgcctcatcgaagccgtccgcgccgcgctctgacatctatcgtcgtgattgctcacgaaaaagcccgccgccagatgcactgacggcgggcttttcatgcttgggaggcttaagtggcgccgattatgcggcagccggcagggcgccgcggcgcgcgtcgatcgagtagaggcccgggccgaaggtggcgagcaggatgtaggcgccggcaagcgtgacgttcttcatcagcatgatgccgttgagagcgttgatccagccgagagcggcatccggccagccgggaacggcaacggtgccggagtggaacacagcgccggtgaagacgcagaacgcggccagtgcccagccgacgatcttcgtctggaagccgacgagaacggcaagaccggtgacgagttcgaacaggccggcgaggtaggcaagcgcggtggcggcgggcaggccggcgccggtgatcatgccggcggtgccggtcgggtcggtcagcttgccgaagccggaatagatgaagatgaaggagaggaggatgcgggcgacgagaatgacgacgttctggctattggacatggaactgtctccggttgaatgagttgagaccgctgtgccccggcacgttcgtcgatctcgtatgcactgtttttcctcttttttagtatctatggaaagatagacggaagctgacacttcgttcagcaatagtgaacgatgatggcggcttgccagtgcaccgcgcgctcttctatggtcggcatctagccccaaatggagacttcagatggcagatctttccgcattcccgatcaccaagcgctggccggcaagcaaccccgatatcatccaactctattcgctgccgacgccgaacggcgtgaaagtgtcgattgcgctggaggaactggcactcccctacgagccgcacctgatctccttcggcaccaacgatcagaagtctccggaattcctgtcgctcaatccgaacggccgcattccggcgatcatcgatccaaatggccccggcggccggccgatcggcctgttcgaatccggtgcgatcctcgtctacctcgccgagaagaccggcaagctcatgccaccggatgcggccggccgctacgagacgatccagtgggtgttctttcagatgggcggcatcgggccgatgttcggccagttcggccacttccataagttcgccgccgagaaggtcgccaacaattcctatccggtggaacgataccgtgacgagtccaggcggctgctcggtgtgctggaagagcgtctgcaggaccgccagtggatcatgggtgacgcctatacgatcgccgacatcaccacattcccgtgggtgcgcggcgccgacgtcttctatggcggccgcgaactcctggaatacgacaagttcccggcggtgatggactggctgaagcgttgcatcgcccgcccggccagcgagaaagggctgaacatcccggcgcgcccggcctgagccttcggcggcaacacggccccaaaacgtcaaaagccggagcgatgccccggctttttgtcatggcggcgaatattactggcggcggaccgcggccttgccggcgtcggcctcgatgcgcgggaagatgaacatgccgatcatgctgccattgccttcctcttcgtagccgttcgattcccccatgcagaacatcggctggcggtagccgttcggcaggatgatcgtggtcgaaaaacagaaggacgaggacagagccgcggcctgttcgaaaatctggacgatacgaccacgatccttcggatcatagcagcgcatcaggctgagcaagccgcattccgccacggtcaggccatgaagccgggcgcttcgttcctgaaggtggatcacgccgctggaaaagtctccgacccagctttcggaaatggaaagctgagcaagcatgtcgggattgttgtcgttgagttccagcgatccacgcatgagcggtgcggatgcggcggcttttgttatcttaaacacattgttccccagtttgggcgcagcgttctcccacgctgcacacccggcaaacatcacagattcagtcgacgccgggcatcatgctcggtgcgtggaaaatagcgttccgagcggtcgctccgttgattgagcccactctgcccagcctttccaaaatatgcaacttctaatttaattcaggataaataactcggtgcatgcgtcaatgcaattctgagcgacgttggcggtgcggcggcaggagcgtctgaacgaagcgccgaacgcagcgcgaatttataagtttttttgcaggaacggcaacggcttttcacgcgctctcgcaagtgtgcgccatgcggaaaataagcaaaaataacggaaaggttgatgaaagcctgctaaataatgcgcgattgatggacttgcggcgttttcaggccgctggcggcaaccattggatcgaaaactcttttgtttcgggcgtttgaagcaccggcaaaaatcgtccaccgagcaagcttcacgaaagcctcgccgtcgtctctggtcggcaattggcctgattatacgtttcaccagtcggttgaaaaaatcgacgcgcgaatgtgagtgcgaatcacataacgaaaagggcgacccgagggccgcccttccgtaacctgaaccggttggctcagatgtgatgaccttatggtctgatcacatcatgtccatgccgccacttcagcgcgcttgacgcgctgaagcactttaagtgtatgggcggctttcacggacccgctgcaatcagaccttatggtctgatcacatcatgtccatgccgcccatgccgcccatgccgccaggcatgccggccggagcgtccttcttcggcagttcggcgatcatggcttccgtcgtgatcagcagcgaggcaaccgaagctgcgttctgcagagccgtacgaacgaccttgaccgggtcgacgatgcccatggcgatcatgtcgccatattcggacgtctgagcgttgtagccgaagttgtcttcgttcttctcgaggatcttgccgaccacgatcgaagcttcgtcaccagcgttgtcagcgatctggcggaccagagactgcagagccttgcgaacgatgttgacgccagcttcctgatcgtcgttctcgccctttgcggtgatcttggaagacgaacggagcagggccacgccgccgcccggtacgatgccttcctgaacagcagcgcgcgtcgcgttcagagcgtcgtcgatgcggtccttgcgttccttgacttcgatttccgtggaaccgccaacgcggatgacggcaacgccgccggcgagcttggcaagacgttcctgcagcttttcgcggtcataatcggaagaggtttcttcgatctgagccttgatctgcgcaacgcggccttcgatgtcggacttggagccggcgccgtcgacgatcgtcgtgttttccttggagatcgaaaccttcttcgaacggccgagcatgtcgagcgttacggattcgagcttgatgccgaggtcttcggaaatgacggtgccgcccgtgaggatggcgatgtcttccagcatggccttgcggcgatcgccgaagccaggagccttgacggcagcgatcttcaggccaccgcgcagcttgttgacgacgagggtcgcaagagcttcgccttcgacgtcttcagcgatgatgaggagcggcttgccggtctgaacgacggcttcgagaaccgggagcatcgcctgcaggttcgagagcttcttctcgtggaggagaatgtaagcgtcgtcgaggtcggcgaccatcttttccgggttggtgacgaagtacggcgacaggtagccgcggtcgaactgcatgccttcgacgacttcgagttcggtttcggcggtcttggcttcttcgacggtgatgacaccttcgttgccgaccttctgcatggcttcggcgatatcagcgccgacctgcttgtcgccgtttgcggagatcgtgccgacctgggcgacttcagccgaggtggagatcttctttgcctttgcctgcagatccttgacgacttccgcgacagcgaggtcgataccgcgcttcaggtccatcgggttcatgccggcggcaactgccttggcgccttcgcgaacgatagcgcgggcgagaaccgtagccgtcgtggtgccgtcgccggcgatgtcgttggtcttcgaagcaacttcgcggaccatctgggcacccatgttttcgaacttgtcttcgagttcgatttccttggcgaccgatacaccgtccttggtgatgcgcggagcgccgaaggacttgtcgataacgacgttacgacccttcgggccgagggttacctgcactgcgtcagcgaggatgtcgacgccgcgcagcatcttttcgcgcgcagagcggccgaactttacttctttagctgccattttgagaactcctgaaaaggggtgtcagcgaattacgatgaagggaaccggctgatcagccgatgatgcccatgatgtcggcttccttcatgatcagaaggtcttcgccgttgatcttgacttcggtgccggaccacttgccgaacagaacgcggtcgccagccttgacgtcgagagcgacgaccttgccggactcgtcacgagcgccggtgccgacggcgacgatttcgccttcctgcggcttttccttggcggtgtcaggaatgatgatgccgcccttggtcttttcttcggactcaacgcggcgaacaacgacgcgatcgtgaagggggcggaagttggtgcttgccattgtctaatccctcgatcaaatgacactcgcaggccgatatggcccacacggatgggtgttagcactctcctctggtgagtgctagcgacctgcatttaggagcgcccatctggggagtcaagggaagcggtcgtaattttccgacgccccgtctctatagccgtttgatggcaaagttgtgaacctgtcgcccacgccttccggtcgggaaaacgcgccgatggttaatgcccgaaaggggagggcgatgtccgtttctcaaccccggcatcgtgatccgtcattgtcataaacccgtgtccggaatttgcgacatgcgatcgggcagcgccggctcgctcgcgccgtcgggccggggccagtccaggattgtccggccccgatgcgggtgatatcgagcgacaggggcagccggcgcaggtcggcaaacgagggcggattgatgagcgtggacggagcggtgatggcggatgacagcgtggcatcggtgccgcttggcgaggctgtccgtgtctgggccaggatcggctgtctgagcttcggcggtcccgccggccagatcgccctgatgcaccgcaccatcgtcgacgaaaagcgctggatctccgaggaccgcttcctgcacgcactgaactactgcatgctgctgccgggacccgaggcgcagcagctcgccacctatatcggctggctgatgcatggcgtgcgcggcggcatcctcgccggcctgctcttcatcctgccgggcttcgtcgtgatgctcgggctttcggctctttacgccgtcttccaggaaaccgcctggcttcccgccctgttcttcgggctcaaggcggccgttctcgccgtcgtcgtcgaggccttgctgcgccttgcccgccgcgccctgaagacccgcgtgcactattacatcgcgattgcatcgttcctggcgctgttcatgctgaacgcgccgttccccatcgtcgtcatcctcgccggcctcacaggcttcgcgctgcaccgctacgccagccgcaaagtgccggctgaagccgtccaggcccgggcatcgcaacgccgcttgcccgttttcacgacccacacggtcgcccggccactccttgttctcgtcttctggatcctcgtctggcaggcgccgctgcttttcgtccgcaatctggaggctccggccgatctgatcgccgagacgctcagcggcgaaaccaatgtcttcggcgcgctcttcatcttcttctccaagatggcggtcatcaccttcggcggcgcctatgcggttctctcctatgtcgcgcaggtcgccgtcggccagtatgcctggctgcagccgggtgagatgctggatggtctggccctggccgaaaccacgcccggtccgctggtgctcgtcctctgtttcgtcggcttcctcgccggctaccgcaacccgctcttcatggcgccgctgctgggcggcgcgcttggcgccgcgctggttgcctgggccaccttcgtgccaagcttcgtctggatcttcgccggcgcgccctacatcgagaagctgcgcaacaatgccgccctgaccgcggccctgtcagccataaccgccgccgtcgtcggcgtcatcctcaacctctcgctctggttcggcctgcacgtgctcttcgccgaagtcggccggatatcgcttctgtcacgcggcgcgggccttcccgtcgtcagcttcgcctggccgcaatgggcaacgctcgatatagcggcgctggcgatcttcgtgatcgcgtccatccttttgttttacgtcaagatgggcatggtcaaggtgttggggctatcggccgccgccggcctcgccatcaagggggcggctcttctgctctgaaggtgcgtcggagcgcatcgggtcgcaagaatttcatactccggcatcgcaaaatttcttgccatccaggcggggctttgccatgtcagccttcatcgaatgaaaaccgggacttggaaatggcgcagcgcatcgagaatttcgcagagatcaccagccactatgacgcggtgttctgcgatgtgtggggcgtgctgcacaacggcgtttcaccctttccgaaggccgccgccgccctgcaggccgcgcgcgaggccggcctgacggtcgtcctgatcaccaattcaccgcgcatcgcgccgctggtcgtcgatcagctccgccacatcggcatccaggacgaggcctatgatcgcatcgtcacctccggcgatgtgacccgaggcctgatcgccgagggcccgaagaaggtcttcctgctcggcccggatcgcgacatcgccatcatcgagggcatcggcgtcacccgcgtttccgccgaggaggccgattgcgtcgtctgcaccggcttcttcgacgacgagaccgagacccccgaggattacaccgacatgttgaaggccttccaggcccgcgacatcccgatgatctgcgccaaccccgacctgatcgtcgagcgtggccacaagatgattccctgcgccggcgccatggccgcctactacgatcagctcggcggcaagacccgcattgccggcaagccgcacaagccgatctatgacgccgtgctttctgttgcccgcgagatccgcggcgacctcaagatggaccgcatcctggcgatcggcgacggcatgccgaccgacgtgcgcggcgccctcgattacggcctcgatctcctttatatcagcggcggcatccacgcggccgaatacacgctgaacggcgagaccgacgaggcgatcctcaccgcctatctcgaacgcgagaaggcaacgccgaaatggtggatgccgcgtctggcgtgagcctcttgcgcaacgcgccgcgagcccaaagcctgcttgtctaagccagaagcatcagtaaagtctgcccgatgaccgtctttcaccgcaacgaaacccgagagcccttgcccgatcacttgcacggcggcgtggtcgccatcggcaatttcgacggtgtgcatcgcggtcatcagtcggtgctggaacgtgcgctcgagatcgcgcaggcgcgcggtgttccggccctcgtgctgaccttcgagccgcatccgcgcacggtcttcaatccgcaggcgccggtgttccgcctgacgcccgcgccgctgcgcgcccgcatcctggaggccatgggcttcggcgcggtcatcgaataccccttcgaccgcgccttttcgcagtgctcggccgacgatttcatccattcgatcctgaaggattggctccgtgcctccgaggtcgtcaccggcttcgatttccatttcggccgcggccgcgaaggggggccggccttcctcatggaggccggcaacaaatacggtttcggcgtcaccctgatcgacgccttccgcgacgagaattccgacgtcgtgtcctcgagccgcattcgagcgctcctgaaggagggcgaggtcagcgaggtcgccggcctgctcggctatcactacacggtcgaatccgaggtgatcggcggcgaaaagctcggccgccagctgggcttcccgacggccaacatgcgccttccggccgaggtcgagctgaagcccggcatctatgccgtgcgcttccgcttcgaggacggcacgatgcacgacgcggtggcgagctatggccgccgcccgacggtcaccgacaacggcgcgccgctgctcgagacctatgtgttcgatttctccggcgacctctatggccagatctgttccgtctccttcttctcctacctgcgccccgaactgaagttcgatggtctggaaccgctggtcgagcagatgaaccgcgacaaggaagaggcgagggcggtcctttcgggcctccagccgatcagcgcgctcgaccgcaagctctgcggcctcgcctagctcgcttccacaccgaaaccgtgatcgtggaaaagcggtgcctgccgccgccatcgacgaactgtgtctttttcgcggcgccaacgcttgccgcgccgcgcggctggcatatgtcatctatctgataagacgcggataagctgcgccggatcccgcgaaaggcactctcctcatggacaaaagatttggaacggcggcctgctggctgctcatcattccctatatcgggctgctctgggtccccttctacaatttccgcgatcccgttctcttcggcttccccttcttctactggtatcagcttctctgggtgccgatcaccgccttcctgacctggatcgcctaccggagcatgcgcaatgacgactgatctcaacgtcacggcgctcagcgtcttcctcttcttcttcgtcctcgtcaccgtcatgggcttcgtcgcctcgcgttggcgcaagcccgaaacgctcgcccatatcgacgagtggggcctcggcggccgctccttcggcacctggatcacatggttcctggtcggcggcgatttctacaccgcctacaccgtcatcgccgttccggcgctggtctataccgtcggcgcctacggcttcttcgcgctgccctacacgatcgtcgtctatcccttcgtcttcatggtcatgccggtgctctggaagcgggcgcgggacttcggctatgtcacggccggtgacgtcgtccacggccagtacggctcgcgcgggctggagctcgcggtcgccgccaccggcgtcatcgccaccatgccctatatcgccctgcagctcgtcggcatgacggcggcgctgaaggcgctcggcctgaatggcgaggtgccgctcgcaatcgccttcatcgtgctcgcgctatacacctattcggcgggtctcagggcgccggcgctgatcgccttcgtcaaggacatcatgatctatatcgtggtgatcgccgccgtggcgctgatcccgtcgaagctcggcggctatgccaatgtcttcgcctccgccgacgccgccttccaggccaagggctccggcagcctgttgcttggcgggaaccagtatgtcgcctatgcgacgctggcgctcggctcggcactcgccgccttcatgtatccgcacacgctgacaggcatcttcgcctccaacagcggaaacaccatccgcaagaacgcggtgctgctgcccgcctatacgctgctgctcggcctcctggccctgctcggctacatgggccacgccgccggcctcaagctcgacagcgccaacgacgtcgtgccggcactgttccagacgctcttccccagctggttcgccggctttgccttcgccgccatcgccatcggcgcgctggtgccggcggcggtgatgagtatcggcgccgccaatctcttcacccgcaatttctggaaggcctacgtcaatcccgaggtcgacccggcgggcgaggccaaggtcgcgaagatgacctcgctcgtggtcaaggtcggcgccctgctggtcatcgtcttccttcccacccagttcgccctcgacctccagcttctgggcggcatctggatcctgcagacgctcccggccctggtcttcggcctctacaccaactggttccgcgctccgggcctgctcgccggctggttcgtcggcttcttcggcggcacgttgctggtctggatcaacgggttgaagcccctgcagccggtgacgatgggagagacgtcgttcaccgtctacatcgggctgctggcgctggcggtgaacatcatcgtcgcggtggtggtgaatgcggtggcgccgggcaaggccgtggcgcgggcttgagcgtgttgtgaggggagggtcgcgggtgatgccgcggccctcctcaaaactttcccttgtaaccggcgtctttcaggatcgcgttggccgtatgacggctctggagattgcgcggcacaagaagcattttcctggtgtccggcgactgccatttctcgtgcgatcccttggcgttcttcaggtagacgtagccgagggcggaaatgatctcacaaacgatcttgtaatagccctcggccattcaggccgccgcgacatgcggggtcgggcgttgccagagtatcgccggaacgagatctttcagcggcgtgtcggcgaggtcggatgaggacatgtgattggcgatgatcaggtcgatggcgctgtcgaagatgatgtcctcgaacgcgtctatatcggccgtttcgatatggagcccttcgatatcgctctcggaatagaagaccttggcctcctcgtcccagattgccttgatgaaaaaggtgcgtttcaccatcgaaagagcctctgtgttgctatggtctcaatatatagcatcggcggtgccgcacaacggtagcagagggcggagctgcaccaattctcctcttccttttcccgccaaaagcgcctatgaaccggcgcgatgaacacattccggctggcgatcacgatacgaattatcggcccggccttccgcgcgcgctaagcggccggaaggtccgggttttcggcgctcgacctcagagcgcttccgccaccacgatatttccaagtccgttgcgcccgtttgcgaggcgtaaagcacgatcgctagaagagacgattgccagacatgaccgatacagccgaaaagatcgattactccaagaccctctatctccccgaaaccgatttcccgatgcgcgccggcctgccgcagaaggagccggaaacggttgcccgctggcaggagatgggtctctacaagaagctgcgcgcctccgccgccggccgcgagaaattcgtcctccacgacggccctccctatgccaacggcaacatccacatcggccacgcactgaacaagatcctgaaggacgtcatcaaccgctcgttccagatgcgcggcttcgatgccaactatgttcccggctgggattgccacggccttccgatcgagtggaagatcgaggaagagaactaccgcgccaagggcaaggcgaagcccgacctcaagcaggccgacgcgatgatcgagttccgcaaggaatgccgcgcctatgccgaaaagtggatcaagatccagggcgacgagttcaagcgcctcggcatcgagggtgatttcgacaatccgtatctgacgatgaacttccacgccgaaagccgcatcgccggcgagctcttgaagatcgccatgagcggccagctctatcgcggctcgaagccgatcatgtggtcagtggtcgagcgcacggcgctggcggaagccgaggtcgagtaccacgacgtcgagagtgatatgatctgggtgaagttcccggtcgtgggaggcgccggcgagctggccgatgcccatgtcgtcatctggacgacaacgccgtggacgatccccggcaaccgcgccatcgcctactcgccgaaggtcgcctacggtctttatgagatcacggctgctgaaaacgacttcggcccgcagtctggcgagaagctgatcttcgccgacgcgctggccgaagagtccgcaaagaaggccaagctcaccttcaagcgcctgcgcggcctctctgccgacgagatggcatcgatcacgaccgcccacccgctcaagggcctcggcggcggctatgaattcgacgtaccgctgcttgccggcgaccacgtcaccgacgatgccggtaccggcttcgtccacaccgccccgtcgcatggccgcgaggacttcgaggcctggatgtcctccgccaaggagctggaagccaagggtatcgacacccgcatcccgttcccggtcgacgacagcggcacctatacagctgacgcccccggcttcgagggcgcccgcgtcatggacgacaacggcaagaagggcgatgccaacgagcgcgtcatcaagacgctgatcgagcgcaacgcgctgttcgcccgtggccgcctgaagcattcctatccgcattcctggcgctccaaaaagccgatcatcttccgcaatacgccgcagtggttcgtctacatggacaaggacctcaaggacggcacgacgctgcgcactcgtgctctgaacgccatcgacgatacccgttttgtacccgctgccggccagaaccgcctgcgtgccatgatcgagcagcgtccggactgggtgctttcgcgtcagcgcgcatggggcgttccgatctgcgtcttcgctgatgagggcggcaacgtcctgcaggacgaagaggtcaacaatcgcatcctcgaagccttcgacgtcgagggtgccgatgcctggttcgccgaaggcgccaaggatcgcttcctcggcaacggtcacgaccacgccaagtggacccaggtcatggacatcctcgatgtctggttcgacagtggctcgacccacacctttacgctggaagaccgtcccgatctcaagtggccggccgatctctatctcgagggctccgaccagcatcgcggctggttccactcgtcgctgctggaatcggccgccacccgtggccgcgcgccttacaacgccgttctcacccatggcttcaccatggacgagaagggcgagaagatgtcgaagtcgaagggcaacgtcacctcgccgcaggagatcatgaaggatgccggcgccgacatcctgcgcctctgggtcatgacatccgactacgccgacgacctgcgcgtcggcaagacgatcatccagaccaatgtcgacgcctatagaaagctgcgtaacaccatccgctggatgctcggcacattggcgcatgacaagggcgagaccttcgaagtctccgagatgccggagctggagcagctgatgctccatcgtctggccgagctcgaccagctggtgcgtgaaaactacgacgccttcgacttcaagaagatcgcccgcgcgctgatcgatttcgccaatgtcgagctctcggccttctacttcgacgttcgcaaggatgcgctttactgcgacgcgccttccagcctgcgtcgccgcgcctcgctgcatgtcatccgcaatatcttcgattgcatggtgacctggctcgccccgatgctgcccttcacgacggaagaggcatggctgtcgcgcaacccggatgccgtctccgtccacctcgagcagttctcggaaatcccggcgaactggaagaacgaggcgctcgccgaaaagtggaagaagatccgcgccgtgcgcacggtcgtgaccggcgcgcttgagatcgagcgcaaggacaagcgcatcggctcctcgctggaggcggccccggtcgtccacatcgccgatgccgagcttttgaaggcgcttgatggccaggacttcgaggagatctgcatcacctcgggcatcgccatcgaggccaacgaaggcccggccgatgccttccgtctcaccgaggtggccggcgtcagcgtcgagccgaagcttgcggaaggcgccaaatgcgcccgctcgtggcggatcacgacggatgtcggttccgatccgcaataccccgatgtttcggcccgcgatgcggcggcactgcgcgaacttgctgcataagctgaagaaagttgccggatgaattgcgcaatcgcggttcatccggtaaaagctgcctgaaaatggccggatttttccgtcagggggaggatgtccggttgaagcgttgactgcaccggcatggctggaagggttttcatgttatcgaagcgttggttccgtttgggcgcatgcctgactgttgcgatggcaggcactgcgatgatgtcgggctgcacgagtggcccccgatacggcacggacaagacggcattccagcagctgaccgatgaccttggccaatccacctcgctgaccggcgccgagcccaagaacaagggcgtgaaatacaatccgcgtccgggcctcgtggttccgaagaccggcggccaggaaaacctggttgcgccgcagcagtcgatcgccagcaaggacaatccggaatgggtcgaatcgcctgaggaaacccgcgcccgtctcgtcaaggaagccgacgagaacagcgacaagtccaactaccagtcgccgctcgccaacaaccagatcgaaggcggccgccgcaccacggatgcgcagaccaaggcctaccgcgaagcccgcgctatccagaagggcgcctatatcgaccagcgccgcttcatctccgatcccccgaccgaataccgccaggtcgacgatcccgccaagctcgacgacgtcggcgagcccgagctgaagaagatgaagaagaagaaaaaggaagccgccgtcgccggctccggcaagcagtggtggaacctgctgcagtagggtttcgggcgcggtgagctttttacaaacgttcgatgtgagcgcgtagggcaaagacccctcccaaccctccccacaagggggagggcttaacttgtggcgatgttgacgccaagactgtgagcgggccacgagtcctctcccccacctgtggggggagatgcccggcagggcagagaggggtgttccacggcgagacctctctatcatcgcaccacatccccacagacacaccaaaaaccccacgccgcccgaaggcccgtgtctccaccatgcaatcttcactcggacggggcgctggaaatcacctcgattgagtaagtagaatatggcgcttcccagcgccccgttcggcggtttatgagcgcaactccggtccctctgcctttccgcccaacttcgcggcggaaccatgtgtgcctcacaggcacgtccgggctcaactcgggcccgtcttgcgacaggacccgccgtcaccggagggagaccattttctgcgaaccccggatgagagagcttgcgtcctcctcaaacacccagcgccgatcccgcctcgccggcacgcctgccggtgtatccgatgacgggacgccgatagtgtaggggcgggtttcgagcgcggggatgaacgaccggtcgagattctctcaagctattgataggcaatcaatatttcgactttaggttctgcgaagttggcgcattgcagcgccttgtcgggccggaagcgcccctaatcccgcttcccctgaaagaagccccgcaagatctccgccgcctgcacctcgctcatcccggagtacacctccggcgcatgatggcacgtcggctgcgcgtagaaccgcacaccgctgtccaccccgccacccttcgggtcctccgccccataatagagccggcggatgcgggcaaacgagatggccgccgcgcacatcgtgcagggttccagcgtcacgtagagatcggcgcccgtcaatcgctcctggccgagcgcctcgcaggccatgcggatggtggcgacttcggcatgcgcggtgatgtcattgagcgcgcgggtgcggttgccggatgaggcaatcacggtgccgtcgaggacgacgaccgcgccgatcggcacctcgccgcgcgcgcccgcggcacgcgcctcctcaagcgccagctccataaattgatttgtcttcacgatccgacaatttccacttaaccgcaggggcgcgaactgatagaaggccccaaaaggcaggcaaacaacaaatgacattcaaagacaagccaaaacggccgggtggcaagccatccccgcgcgataccggcgcgaaatcgggcgaaaagcccgcaagaaagttcgcaaaatcggctgacaaggcggatgccgtgtccgacgtgacgagcgacagcaaggcggaacgcatctccaaggtgatggcgcgcgccggcgttgcctcgcgtcgcgatatcgagcgcatgatcctcgatggccgcgtcacgctgaacggcaagccgctggatacgcccgtcgtcaacgtcacgctcaccgacaagatcgaagtcgacggcatgccgatccgcggcatcgagcgcacgcgcctgtggctctaccacaagcccgccggtctggtgaccaccaatgccgatccggaaggccgcccgaccgtattcgacaatctgccggacgatctgccgcgcgtcatgtcgattggccgcctcgacatcaacaccgaaggtctgctgctcttgaccaacgacgggggactggcgcgtgcgctggaactgccgacgaccggctggctgcgccgctaccgcgtgcgcgcccatggcgagatcgaccaggaagcgctcgacaagctgaaggacggcatcgccgtcgacggcgtgctctacggcgccattgaagcgacgctcgacaaggtgcagggctccaacgtctggctcaccatgggcctgcgcgaaggcaagaaccgcgaaatcaagaacgtgctcggcgcgctcggtctagacgtcaaccgcctgatccgcatctcctacggcccgttccagctcggtgacatcccagagcgggcggtgatcgaagtgcgtggacgcacgttgcgcgaccagctcggcccgcgcctgatcgaggatgccaaggccaatttcgacgcgccgatctacaacgcgcccgccgtgaccgaggaagaggaagccgacgcccggcccgagcgccgcgagcgctcgtggaagccggaagacaagcgcgaacgcgcgctgagccgcctcgacaccaagcgcgacgataaacgcgacgaccgccgtggcggcgatcgtgatcgcgatggtggccgtggcccaagccgtgggggcgaccgcaaggatgagggcccgaagcgcccggcgctcggcagccgccgcaacgccaatgtctggatggcgcccggcgcccgtccgctcggcgaaaaggcagccgccaaggccgaaaagaacgcccagacggcgctgcgccgtggcgagaagcccggccgttccaagccgcagccgacaagctacgacgaaggcccgcgcgtgcagatcaaccgcgcccgcgacgaagagggcgaatggatccgctccagcgacgtgagccgcgacgacgaccgcaagcgcggcgaccgtggcgatcgcggcttcggtgaccgtccccgtggcgaccgctcgtttggtgatcgcggtgaccgctccggcggcgaccgcacggctcgcggcgaccggccttatggtgatcgcccaccccgtggcgatcgtccccagggcgagcgcccaagaggcgatcgtccctttggtgacaagccgcgtggcgaacgcaagccgcgcgaggacggcgaccgtccgcgctccttcggcgaccgcccaccccgtgctgacaggccacgtggcgatcggcctttcggtgatcgtcctccccgtggtgaccgtccgacaggcgaccggccgttcggcgaccgccgtccgcgcgaagagggcgacgagcgtccccgcgccaagcgtttctccggcgaggctcgttccgagcgtccggccggcgagcgttcgtatggcgatcggccccgtggagatcgtccccagggcgagcgcccgagaggtgatcgtcccttcggcgacaaaccgcgtggtgacgggccgcgcggcaagagcttcggggcgaagcctggcggctccaagccgggtgcgaagagtttttcgggcaagccttcgggcgatcgtcccggtggcggtggcaagccctcgggcaggccgtcgcgtggtggaccaaaaggcaagggaataggacgcggtgcggatcgtcggcggtgagtttcgcggacggtcgctcgccgtgcccaaatccaacgacatccggccgactgccgaccggacgcgtgagagcctgttcaatattctgagccatgcctatccggaatgcgtcgatggcacccggatactcgatctcttcgccggcacaggcgcggttgggcttgaagccgtctcgcgcggctgtcgccatgcgctcttcgttgaaaacagcgtcgagggccggggcctgctctgggaaaacatcgatgcgctcggcctgcacggcaagacgcgcatcctgaggcgcgacgcgaccgatctcggcagcgtcggcaatctcgagccattccagttcctcttcgccgacccgccctatggcaagggtctcggcgaaaaggcaatggcggctgccgcgaggggtggttggctgtttccgggcgcgattgccgtgctcgaggagcgcgccgacgttgccgtttcggtcgatccttcctatctgttcctggaaagccgcatcttcggcgataccagggtgcatttctaccgctaccagcctgaataggtagcggcgacagggggcgaagggtgacacagcaggccgaaaagaccagttccgcgttccctgctctcgaagatgttgcctccggcgcgtcgccgcgtattgccatcgccttcggcggcggcggtgcacgcggcctcgcccatatccacgtcatcgaaacgcttgacgagctcggcattcgccctgtggcgatatcgggctcctcgatcggcgccatcatgggcgccggcatggcggccggcatgaccggcgaggccatccgcgaacacgcgctgatgaccgtcggcaacaagaccgccgtcgtcagccgcctctggggcctgcgcccgcagaccgtgcgcgacgcggtggcgaacggcgtgcgcatcggccagttcaacctcgagcgtatcctgaaagcatttctcccggccgatctccccgatcgcttcgaggacctgccgatcccgatgacggtgaccgccaccgactattacggccagcaggaagtgctggtgagcgaggggcagctgtttccggccctcgcagcctcttccgccatccccgccgtcttcatgccggtccgcttgcatggccgggtgatgatcgacggcggcatcagcaatcccgtcccctatgaatgtctgatggaccgcgccgatatcgtcatcggcatcgacgtcgtcggcgcgcctgaaggtgacggcacgcatattccgaaccgcatggaaagcatcttcggctccggccagctgatgatgcagacggcgatcaccctcaaactccgcatccagccgccccacattttcctgcgccccgccgtcggccgcaccggcgtcatggattttttgaaggcccgcgaagtgctggccatgtctcagggtgtcaaggacgagctgaaatatgctctggatggcgcgatcgagacgcatgcgcgcggttaagtcggggctagggtcttgccctaaacatccgccaccgcatcccccgtgcccgccagcggatcctgtgagaaatccatcgtccgcttcggcttcaccagcggttccggcttgaccggctgcgagtagagcatgtcgcggccagcctgtagtccctcggtcacctgcagctccagtcgctgctcgtcgcggcggcggatgtcttcgccgatctcgtaggcggcggcctcgctgatgccgagcgcttccagtgtccggcggccgaacagcaagcccgattccagcgtttcgcgcagttcgtagtcgacattgaggttgcgcagcgcgatcgagtgaacgcggtcgtaggagcgcacgaaaagcttggcctcgggatagtcggcctgcaccagctcgacgatcttgtcggtcacttcccgtttctgcgtgcagacgacgacgatcttggcgtggtcgatgccggacgcccgcagcacgtccttgcgcgtgccgtcgccgaaatagatgcggaaaccgaaggaggaggcctggcggatgcggtcggcggaagtgtcgatgacggtcaccgcgcgtccgccggcaagcaggatctgcgacgcgatctggccgaaacgcgagaagccgatcatcagcacgtcggcgccggcgccctcgaaatcctcctccagcgtctccttcgtctcgccgctctggaaccttttggcaagcttggtgccgatcggcgtcagcgccatggaaagcgtcacgatggcgatcaggagggatgccgtgctcgatggcatcagcgacgaagcaccggccgccgaaaacagcacgaagccgaattcaccgccctgcggcaacaggaaggcgatgcggatcgcgtcattgtggtccgagccggtcagccggcagagcgcgtagatgatcagcgccttcgccgccatgacgacaggcacggtgacgaggatgaccagtgcgttgtcccagagcacgtcgagctgcaaagacaggccgacggcgatgaagaagatggcgagaagcacgccgcggaagggctcgatatccgcttcaagctcgtgtcgataggaggattccgccagcatcacgcccgccaggaacgcgcccatcgccatcgatagcccggccatctgcatcagtgtcgccgaccccatgacgacgaaaagtgccgccgcgatcatcgcctcgcgcgcgccggtgctggcgatgatctggaacagcggcgtcagaaggtagcggcccatgacgatcatcgcgccgacagcgccgatggcgatcccgaagtcgacgatcggcgtgccgtggcccttgccggtgtcgaggatgttgatcagcgccagaagcggcacgatggcgagatcctggaacagcagcatggaaaaggagcgctgcccgtagcgtgtgctgacgtcgccgtcgtcctccagtatctgcatggcaaacgcggtggaggacagcgccagcccgaagccggcgatgatgctgccgcgccagtccagcagtccggagatgtaggccagggcggtgagcgccagaccggtaaggatgacctgtgcggcgccgagcccgaatatgtcgcgccgcatctgccagagccggctcggcttcagctccagcccgatgatgaacagcaggaacacgacgccgagttcggcaacgttcaggatctgctctccgtcagtcagcccgttgaagatcggcccgatcaccacgccggcggcgagatagccgagcaccgttccaagccccagccgcttgaagatcggggccgaaacgaccgcgccgccgagcagcaggatcgtttcggtgaagagggcgttgggctcggacatccgctaagcttctttcaatggtcgtgattgcgcaagcagcgcgaaaaagaatcggcgccgtcggccttgatgctttccgtagcgcacaataaatggaacgcgaaggaaaggccaaaccatgtcctctgaaattgattcctcgacgcttctctcccgcgccagccagctgatcgacctcgccaggaaggcgggtgccgatgccgccgatgcggtggtcgtccgctcccgatcgcaatccgtcagcgtgcggctcggcaaggtggaggaaacagaatcctccgaaagcgatgatttctcgctgcgcgtcttcgtcggcaagcgcgtcgccatcgtctcggccaatcccggcttcgacatgtcggtgctcgccgagcgcgcggtcgccatggccaaggtctcgccggaagatcccttcgcgtgcctcgcggacgagagccggctcgccagatcctatcccgacctgcaactgctcgacagcaccgaggtttccgccgaccagttgcgcgaggcggcgcttgcgacggaagcggccggccttgcggtcaatggcgtcaccaattcctcgggcgccggcgcatcgtcgggtcgcggcggcatggttctcgtcacctcgcacggctttgaaggcagctacatgggctcgcgcttcggccgctccgtcagcgtcatcgccggcgagggcaccggcatggagcgcgactacgatttcgacagccgcatctatttctcagaactggacgatcccgccgaaatcggccgccgcgccggtgaacgggccgtcaagcgcctgaagccgcgccaggtcgataccggcaagaacgtcaccgtgatcttcgatccgcgtatcgcgcgcggcttcgtcggccacatcgccggcgccatcaacggtgcttcggttgcgcgcaagaccagcttcctgcgcgacaggatgggcgaacaggtgctgaaatccggcctgtcgatcaccgacgatccgatgatagtgcgcggccccgcctcgcgccccttcgatggcgaaggcgtctccggcgagcgcatggtgatgatcgaggacggcgtcctgaagcactggttcctttcgacatcaaccgcccgcgagatcggcatggagaccaacggccgtggcgtgcgcggcggcaatgcggtgacgcccgcctcgaccaacctggcgctcgagcccggcgatatctcgcccgaggacctgatccgtggcgtcggcaacggtttttacatcaccgagctgatcgggcagggggtcaacatgatcaccggcgaatacagccgtggcgccaccgggttctggatcgaaaacggtgaattgaccttcgcggtttcggaagtgaccattgcatcgaacctcaaggagatgttcatgcgggtaacgccggccaacgacatcgaccgcaagtacggggtagccgccccgaccatcgcgatcgagggaatgacgctggccggacggtgatcgtgggctaaagcgcgtcgcgatctttcagattcgcttgttgcgctttaggtctttcttttaccgcatgtcttcgtcgcaaaaccgcttcacacttttgcgcgacatgctctagccgctgacggattggaacttgggatgagcgacgtggacaatgcccgctggcagagcgatctggacctgatcgccgacgctgcaaggcgagcaggtgccgtggcgctcagccatttcaaccagtcgcccgaggtctggtggaagaacgagggccgctcgccggtcagcgccgccgatttcgccgccaacgaaatcctcgaaaccctgttgcgcgccgcccggccggattacggctggttgtcggaagagaccgaggacagcgccgaacggctgtcgcgcgacacgctcttcatcatcgatccgatcgacggcacccgcggcttcctcgccggacagaagctctggtgcgtcagcatcgccgtcgtccacaaggggcggccggttgccggcgtgctcaacgcgccggcactcgacgaactctatgaggcggtcgccggtggcgtcgccctgaaaaacggcatgccgatccgcgtatcggagccgaagccgccggttcgtttcgccatcgccgaggatgtgctgaacggcttcccccagccgctgcgcggcaggatcgagcggatcaggcacgtgccctcgctcgcctaccgcgtcgccatggtggccgatggggcgatcgacggcaccttcgtgaagcgcaattcccacgactgggatctggccgccgccgacctcattctggaacgggcgggtggccgtctcgtcaacctcgatggaacggcgctgacctataaccgcgcggatgttcgccacggcgagctttgcgccggctccgagccgctgttgaatgaatttctatcccctatcgcggcgcgctgagcagttgacgtttccgtcaaaatccctcagatgaaacggcggaggagcagatgaaggaagtgaccgaaatgaccaagtccggtgaaaagaagcaattgttgcacctcgtgttcggcggcgagctggaaagtctcgatgacgtgcagttcagcgatctctcgggcctggatatcgtcggcatcttccccgattacgcatccgctctgacggcctggaagtccaaggcccagtcgaccgtcgataatgcccacatgcgctatttcattgtccatatgcaccgcttgcttgatcccgaagacaagtccggcaaataattttcggccctggtggccctcgtttttatccagccgcctgtcttatcgaggtgcaggggcggttgttgacgcattctgaacaaactgatcggtcatttcggccgcaatgatatttgggaatgggttgatgtcgatcatcgtcgatcggagacgtgtcatatgagcggccgcatggcgcgtttcgcgctgggcgcttatcaggcggccgggacgttgatcacgcccttcgtcggcggttatctgacctatcgcgccgccaagggcaaggaagacagggctcgccggctcgagcgctccggctatgccagcgccgatcgccccgccggtccgctggtctggtttcatgccgcgagcgtcggcgagatgaacgccgtcattccccttatccgcgagatccgccgccgcgacgtccacgtcatcctgacgacgggcaccgtcacctcggccaagctcgccgccgagcgcgtcggcacggaagtcatccaccaatatgtgccgctcgacctgaagcccgccgtcagccgtttcctcgattactggcagcccgattgcgcgctgatcgccgaatccgagatctggccggccaccgtgctggagctgggccgccgccgcatcccgcagatcctcgtcaacgcccgcatgtccgatcgctccttcgcccgctggacccgccgtcaggcgttggccgaggcgctgttcgagaacctcgcgctcgtcatcgcgcagtcggatgtcgatgccgagcgtttccgcgacctgggcgcgcgccaggtgctgatgtccggcaatctcaaggtcgataccgacgcgccgtcttatgatcccgccaccttcgcgcgctatcagcagcaggtcggcgaccgcaagacatgggcggcgatctccaccttcgatggcgaggagaaggcggccggcatcgtccaccgcacgctgagggaacgcaacggccagctgacgatcatcgtgccgcgccatcccgagcgcgccgatgccatcgaggccgaactggtcaagcaggggctgaaggtcgcccgccgcacgcgtgaggatatgctcacccccgatgtcgacgtcttcctcggtgatacgatcggcgagatggggctttatctgcgcatgaccgaggtcgccttcgtcggccgctcgctgttcggcgagggcgggcagaacccgctcgagccggccatgctcggctgcgcggtgctgtcgggcagcaatgtccagaatttccgcgaggcctatcagcggcttgcccgccgtggcagcgcccgcatggtgcgcgataccgagatgctggccaagggcgtgcattatttgctgaccaacgacccggcgcgccgcaatatgatcgaggccggcgccgcggccgtgcaagaaatgcgcggtgcgctgacggcgacgatgaagggtctcgagccctacatcaatccgctgacggtaaaggcaaggctgctgccgaaggctgcggcgcaacgctagagacggacaaggacatgcaggtgatcaagggtatcctgttcgacaaggatggcacgctcctcgattatgacgagagctggctgcccgtgaaccgcgagctggcgctgatcgccgccaagggcgacgctgcgcttgccgaccgcctgctgcttgcctgcggcatggatcccttgaccggccatatcgttcccgacagcctgctcgccgccggcaataccaggcagatatcggaaggcctcgtcgccgccgggtcgacggttcccgtcgacgagctgacggtaaggctcgacgaactcttttcccatgccgccgatttctccgtgccggtcaccgatctcgcttctttcttcgcccggctgcatgcgcgcggcttcaagctcggcgtcgcctccagcgataacgagcgctcgatccgccagacggcgaggcgcttcggctttgccgattacatcgattacgtcgccggctacgacagcggccacggcaccaagccggagcccggcatggtgctcggcttctgcgcggcaaccggtcttcacccgtcggaagtcgccgtcgtcggcgacaacaaccacgatctgcacatgggccgcaacgccaatgtcgggctgacggtcgcggttttgaccggcaccggatcgcgtgaatcgctcgccgccgccagcgatcattgcctcaacgatatcaccgaactcgaagggctgctgcccggcctgcagttcgcctgatcgaccaaaggcttgctttttcttgaaaattgccttttcttttcgctcgggtggagatgacatcggcgggcgccatgccggcggtgcgaaaagcaggacggcgaagatggtatccgaagcgccaccattctggtggacgaaagccgattggcgcgcctggacgctctatccgatctcctttctttacggccgtatctcgggctaccgcatggtcaacgccaggcgtgcttcggtgcccgtccctgtgatctgcgtcggcaatttcacagtcggcggcgccggcaagacgccgaccgccattgcgatcgcccgtgccgccaaggccaagggcctgacgcccggcttcctcagtcgcggttatggcggctcgctcgatgtgaccaccgtggtcgatgccggccaccaccgcgccgtggccgtcggcgacgaaccgctgcttctcgcccgcgaggcgctcaccgtcatttcccgccgccgtgtcgagggcgccaagcgtctcgtcaaggaaggcgccgacctgatcatcatggatgacggcttccagagcgcccgcctcgccatcgattacgcgctgctggtcatcgacgctacgcgcggcctcggcaacggccatatcgttccgggcggcccggtgcgcgcgccgatcaagctgcagctgcgctacgcgacagcgcttctgaaggtgggcgcgggtgcagccgccgatcagatcgtgcgcatcgcggcgcgcgccgccaagccctatttcaccgcttccgtcaccgtctccgatggcgccgacctgaagggccgccgggtgctcgccttcgctggcatcgccgatccctcgaaatttttccgtacggtcgatgagatcggtgccgaaaccgtcgcccgccgctccttcggcgatcacgagcatctgaccgacgacgagatcgacgacatcctcgaaaccgccgcccgcgacgacctccagatcgtcaccacctccaaggacttcgtgcggctggcgggtcaccacggcaaggccgagacgctggcctcgaagtgccgggtgatcgaggtggaaatgaccttcgaggaccatctggcgccggggctgatcatcgaccgcgcggtcgatgcctgccgtgaacgacggctgaaggagatggcggcggcggggtaagcgcgttaacgagcgttctgccgtgaagcacccccctctgtcctgccggacatctcccccacaaggggggagatcgactcgtggcttgctccccaatccaaacaatgaaggtagagcgagcggccgcgcccagccaatctccccacctgtgggggagatgcccggcagggcagaggggggtaaccctcgctccacgctcgccttgagcaaccctcacttcgcgccagcctatcgcacccccacatgagcaaacatgtcggatgccgcagcccccaatcgtctctacgataggttcaacatggaggagacgtcatgccccgctatctggtagccattcaccaccctgatgattacgaccccgccgtctcggaagatgaggcgatgcatcgtgcgatcgatgcgctcaacgacgagatgatcgccgccggcatccggctcttcgtcggcggcctgcatcgggcgggcaccgccaagtcgttgcgcgccgatgccgatggaaatgtctcggtgagcgacggtccctatctcaaaaccagcgagcatgtcggcggtttatgggtgctggaggctgatggcatggacgaggcgctggcctggggtcgcaaggctgccatcgcttgtcgggctcctgtcgaggtgcggacttttcactagcgctgtcgatgcgatgggcgttgtgccgtgtgtcgcccccctttgtcctgccggacatctcccccacaggtggggagattggctgggcttgcccgctcgctcctacttcaacgtttggcgaagacctaaccgcgagtcgatctccccccttgtgggggagatgcccggcagggcagagggggtaatcctggctccaccctctcgaccaaggctctactccaccactccgaacaccggcccatacccgccatgccaggaaaaatcactgcgccccaattcgccgctatagaaccccgcgccgccgccgccatcgagaaacagcgcgtccgggcattgcagccgatcgcggaaaagccgcgcgaaattgtgaaagttgacgggatcgtcgctgaccgcgaaacggacggtcccattgccgcagacaccgacgccgctgcgccgcgtgcggtcgctggagccggcgatgaagatcgggttgatcctgtttgcgatcaccagcatcggcccggactgcgtggccagcctgacgtcggggcgttgcttcatgaaagtcgcggtcggcaggatgcccgcgcccttgtcgccgatatagaagacgccgttgggcttcttgtagaagttcggcaccggcccgctcgccgtcggcgccttgacgcttgccaccggccgcagctctcggccgttctcgacatagaggccaatcggcgagaaatcctcgagatacatcccggcattgacggcgaagacgagcgtcttgcccttggcggtgacggcgtcagcgataccggggaaggagcggtagggcgcgccgtcgtcgcctttccagaagagacgcaggtcaaccttggcgggatcgacggtgcagatcacgtaattggtgttctcgaccgtttcccgcgcgcagggtccggcaagcacgggccgggcggagccgacgacagcgccaagcaggatggccatcccgatgagggcggcggacaacagggcggatgaacggaaaggcaccggttctcgtccttttgcggtgtgagactgcgagccgccgaaagggccggctttaaagcttgcgcgcttccagccgccgcctgtcgcgctcgacggtctggaagcccatcggcgtcaggcggaattgccgtttctggtattcgccgcggatttcgacgaagccctgcgcttcggcttcgtacaaggtcttcaggcccatctccttgggcggagtctgccaatcccggccgacggcgctgtgcagcaatgcgatgatcttgatcattgttttctccatggccgaggcgctgccttcgcgctgcgccgtctcgccgaagggcctgcgactaccgcttctggttcggcagcacgccggcgcgcttgtcggcctcgaaggaggacacggcgtcggcatagggttcctggcgggcgacgctccagtagcgcagttcgtcgagcgggatctgcttgcccgtcatggcgcacacgacatgggaacccggcgacaggatctgaaaatccgcatcgagataacgtatcttcgcttcgcggtttccgtttccttcaaacaagttcatgcgctccaatcctcaaagccggccgtaacaggattgccataccccgcaacagccgccattgccagcgatttcagctccggccgaacagccgctcgatgtcggaaagcttgagctcgatataggtcggccggccgtgattgcactgtccggagcccggcgtcatctccatctgccgcagcagcgcgttcatctcctccggccgcagccgccgtcccgagcgcaccgatccgtggcacgccatggtcgccgccacatattcgagctttgccgatagtcccgatgccgtgtcccactcggcgatctcgtcggcgagctgcttgatcagccccgaggcgtcgacctcgccgagcatcgccggcgtctcgcgcacggcgatggcgcccggcccgaaacgctcgatgccaagcccgagctcgccgaactcggaggaaaactgcatcagccggtcgcaatcctcttccggcaggtcgatgatctcggggatcagcagcacctgcgaggccaatctcttggagtgcagcgccttgcgcatcgcctcgaacaccagccgctcatgcgcggcgtgctggtcgacgatgacaagcccggtttcggtctgcgccacgatgtagttctcgtggatctgcgcgcgcgccgcgccgagcgggaagcgcgacggcacctcggcctcggcgacgggcgctggcgccatccatggcgaagtctgcgtggtctcggcccgggccgtcggcatcgtcagcccgtcgaacgatgtctgtggccgctcgccaaaaccgttgccggccggacgcggcggggagtgggagtagccggcggcggcggagaaaggccgcgacggcgaggtctcggcgctccattgctgctgcggttgcggccggtagccgttcggctggaagccggcgcggaaggcgcgcagcatgccgtcggcgcccgtggtcgccgcccggctgccgtcgcgcgccagcgcctcgcggatcgcgccgacgatcagcccgcgcaccagttgcggatcgcgaaagcgtacgtccgacttggccggatgcacattgacgtcgaccagcgccggatcgagcccgatcgacagcaccgccaccgcgtagcgtcccgatgggatcgtctcggcataggcgccgcggatcgccgacagcaccagcttgtcctgcaccggccggccgttgacgaaggcatattgatgcgccgcgttgccgcggttgaaggtcggcacgccggcaaagccggtcagcgtcacatcctcgcgctcggcattgatttcgattgcgttgtcgcggaagtccttgccgaggatctgcgccatgcgcgccagatggtcgtcgccggtcgccggaaactccagcgtcgtgcggtcggtgcccgagagcacgaagcgcacctgcgggaaggcgatcgccatgcgcttgacgatctcggtgatcgcgccggcctcggccttctccgttttcaggaatttcagccgcgccggcgtcgcgaagaagaggtcgcgcacctcgacgatggtgccgggattgagcgctgatggcctcagatgctgcagcttgccgcccgccaccgaaatttccgccccgccatcgctgtcgcggcggcggctcgaaatcgtcagccgcgccaccgagccgatcgagggcagcgcctcgccgcgaaagccgagcgtatggatatcgtcgagcgtatcggtgatcttcgaggtgcagtgccggcgcacggcaagctccagatcgcgctcgtccatgcccgagccgttgtcggtcacccgaagcaggctcttgccgccgcccgaggtggcgatctcgatacgcgtggcgcctgcgtcgagcgcgttctcgatcagttccttggcggcgctggcggggcgttcgatgacctcgccggcggcgatttggttgatgagcgtttcggaaagcagcttgatcgacatgccgccattttcgcggattctcgaggccgagggaagggcgaaagcgacgcgataaggccttgtacctgcgcaaatatttggctgcttaatgttaagcacgccttaagacaaaactggcattttgccgacaatacccgccgcaaaatgcaatccattcggacagatgtaggacgcgtagtatgagtgccggtcgcgatcaagcggacacagccccgcgggagggcgcggttgaaaccgcggctggcctccagacggcgttgttcgacgcggtctgcgaaagcctgtcgtcggccttcatcgtctacgacaagaccgatcacatcgtcttctgcagccggcaggttctcgatttcttcccgatctgcgccgatctcctgcagcccggcacgcgactgcgggattttttgagcgccgtctacgaaaccggaatccgcagccgttcggccggcaagcagggcgcgctcagccgcgaggactggttgtcgcagaagattgcctcgcactggcgcgaacgctacgaggcggtcgagcgctacggcaacgattgctgggtcggcttccagaagcgccggctccctagcggttacggcgtctgcgtaatctccgacatctcggaggccaagaagcgcgaggagcagtggcggctcgatctcgagcgcgtgcagctcaccgaggatattctcgacaacctgccgttcccgctcttcgtcaaggatcgaaacctgacctacgtcgccgtcaacgtcgccttctgcgagaagtaccagacgacggcggacgaggtgctcggccgcaagagcgccgaactgttctcgcccgaggtggccgcccgcttcgaggaaagcgacctccacgttctcgaaaccggggagatgtcggtggtccgccagcgccagatcgcccgcgacggctcggaacgcgaaatcatctcgcgcaagcaccgcatcggcaagccgggacgctatttcctgatctcgaccatgcaggacctgccgcgcgagggcggtgatctcgaggaattcgagaaggcgtcgagcgtcacgacatcggcccagagcagctttcgccgcgcctacgttccgatgatcggcgacagcgagcgccgcgaaccggccgccatggaagccatcgtgcccgagaatttctccggtcgccgcatccttgtcgtcaccggcgatatcgccgccgagaccgcggcgctgaggacgctggccaagtacggcttcgaggcatgctcggtgcgcaacgaggacgaagaggagcagtttctggagatcgccacgtcggccggcctgtcgctcgatctcgtcatcatcgacaatcagatgggcatgcgctgcctcgagctcgccgagcagtacggcatcccgtcgctggtcatggacggcttccagatctccaccgagctcaccttccagatcgcccgtcatttcaaccgcaacaatcgcggtagcatggcggaacggatcgacggcgattgggagatcacgacatccgacgatgagatcgagctcgacgtgctggtcgccgaggacaacgatatcaaccagatcgttttctcgcagatcctcgaggggctgggctatcactatcgcatcgcctccagcggcgacgaagccgtgcgcatgtggacggagtaccggccgaagatcgtgctgatggatatttcgctgcccggcttcaacggcttcgaggcggcccggctgatccgccaggtggaaggcgatggcccgcgcacccccatcatcggcgtgctcacccaggccttcgagcgcgaccgcgccgaatgcgccaaggccggcatggacgacgtgatcatgaagcccgtcagccccgacattctcgaaacggtgttccagaaattcatgcaaccggaggccaggcgggcctcgctttaggcgcgggttgcgtcaactccccaattcttgggaggcaaggcgcgatcatccagggttgtcgaatatcgaatttttaagacttgcccgccattctgccgggtattggggaagctctggatcagaatgatgatgttggcggatatgccattggcttcggtaagccagaacgagcttcagacgatggcctacaccgaccccctgaccgggctcggaaaccgctatcgaatgcgcgaccgtatcgcccagatctcggccgaacgcgccgccgatccggcgcctttcaccatcggtatcgccaatctcgactcgttcaagccgatcaacgacctcttcggctcggccgccggcgacgaaattctctgtcaggtcgcgcatcgcctgaaagcctgcattcccgatggcgccgtcgtcacgcgtcatgacggcgacgaattcgccttcgtcctgccgctggtcttcgaacgggctagcgccgagaagttcggccagatgatccgcgaggtgctgtcggcgccctacgatctcggcgaccgcaacgtccgtctctcggcatccttcggcttcgccatatatcccttcgcgggcgaggagttcgatgagctgctcaagagcgccgaaacagcgctctatcggtccaaacgtcgcggccgcagccagatcaccgtttactcccgcgagatcgcgcaagagatgaagcgcgccacgcagctcgagcaggcgctgagaaacgccatcatttccgatgccatcgacgtgcattttcagccgatcgtctcgctcgccaacaaccaggttctcggtttcgaggcgctggcccgctggaacgatccggatctcggcttcgtctcgccgggtgtcttcgtgccgctcgccgaagagcgcggcttcatcgacgctctttccgaaacgctgctgcgcaaggccgccgaagcggcgctctcatggccgcgcgagatgttcctgtccttcaacctgtcttccgcgcagttgatggatccgggcaccagcgccaacgtgctctccatcctcggccgcgtcggcttcgatccgcaccggctcgaactcgagatcaccgagacggcggtaatgggctcggccgataccgcaaaccgcatcatcgccgatctgcgccaggcgggcgttcgcatctcgctcgacgatttcggcaccggccagtccagcctcggccgcctgcgcgatttcatgttcgacaagatcaagatcgaccgcgccttcgtctcgcgcatcaattccgaccgtgcctccgagcacatcatcaaggcgatcctgaccatgtgcgagggcctcgatctcgaggtcgtcgccgaaggcatcgaggattattccgaagccgccaagctacggatgctcggctgcggcatggggcagggctactatttcggcaaacccgccgacagcatcgccacgctgaggttcctgcacgagaacgaatacgacaccggcgaacgggcgatggcctgagcagcggtcgttacttgatcagcgcgaagaggcctgccgtggcggcaatcgccgcgagcacgacaccgaggatgatgcagaccacattgatgatccagccctgatcgggtttggaatcgagcttgctgtcgatacgcgccagctgtccgagcactgtgttcagcgtcgagcgcatatcatcggcaatggcttcaagcttggcgacgcgattttccatgtggtccattgtgccacctccgctgcctgacttcaatgatccttcatgatcgcgaaagtatgggctccgcgccaatatcaacaccttcagcagctgctcattgcgagcaatgcgttgtctttacgtcatttctctttggttgattgcattgtgtcaatacacccaatggaggagtgggtggtgggccgcgcaccgtggacacaaaagccgatggcgccctttcggacgccatcggttacgcatgcactgcgactaacgatgcagtgtttactttgctgtcgtggagctggtcgtggtgttgtccatcgtaccagcagcgggtgccttttcagccgactgcatctgcagcgtcttgaattccggcgccgccttcagcgtttcggccgtttccgaggtcgtcagcttgacgctgccgtcctgggtgttctgggccacggtgaccttttccatcggcacggcgacgttcttctcgccgatgccaaggaagccgccgacaccgatcacggctgcgacaaggccgccatccttcttcatgatcaggtcgttgacgttaccgatgctttcgttctggccgttgtagacggcctggccgatgtaggtgttggcgctcacctgatcggaggcctgctccgtcagataggtgccgccgccggccgctgcggtgtcggtgctggccgcgggagcgggtgcctgtgcggcatcacctgccggcttcatggcatccggcttcggcgctgccgggtcggccggtgccgacatggacggtgcgctcggcgaggccggctgggcagcgccctgcgagaaagcgaccggtgcgaaggccgtggcaaacagggcgccagcggcaacggtggtgagaagtttgcgtgtcatatcgtacctactttcagtgtccttgggtgatctctagccgtgctttcctcttctagcgagaggcgtgtcagcccggctggttcgctaagtaaatgaatgggttggctattggttcccagaaaaatacacgcaaaaactgacgaaatttccggaaccttcgcgacctcgggatcgggctggcgggcgatcgccgggacccggcaacgaaaaagggcgcccccaaggacgcccttcgaaacacatcgaggccgatgcttcagagaatataggccgcgtcgaaaacgccgcggacggtgacgccgagctcgagcagcgcgccggcatcgggctggttggcgcgggccgcgtcgtcgaggccttcccaggccgtcgtcaccgccagccggtccgcacccgggccgatgaaggcggggcaggagggctgcgcggcaggcaccttgtagcgggcgatgcgcaggccatccgggctgtagcgatcgaccgtgccggccccccagcgcgcgttccagatatagccgtcggcatcgaccaccgagccgtcgatcccgccgtcttcctccatgctgtcgacgagcacgatcggctcgccggtcggcaggccggtctcgcgatcgaccatcacccgcatcaggcggctgagatgcgtatcggtgaaatagccgacggagccatcgggcgagaagcagatcgagttcggaatggtgatgccgccgaacagcttcgtcaccttgccgcgcgccacgtgatagatcgcgccggcctgcggctcggcgcgcttgctcatcgtgctgatccacaggctgcccgagggatgcatgcgcccgtcattggagcggttctccggccggtcgttttcgagtgccgcgtaaaatgtcaggccgccgctttcgatatcacgcacgaacaggccctgctcggtcgcgagcagctgccgcttggcgtcgatccgcgccagcacgctcgccatcacaggcagcgcgtgcaccttcttctcgtcgttcgagaggttcagctcgtgcaattccttgccgagaatgttgaaccaccagatcgtattggtatcgggatcgtaggtcggcccttcgcccagcaccgaattggtgctcgacaaagtccgccccgcgaactcatgaatgtcggtcatacgctcaagctcccactgctgcgtcgtatgcgtaaatggttgccttggcgcgctcggcaacctcggcgacagtcattcccggcttgtagatgctcgtgccgagcccgaaggccaggattccggccttggtgtactcggcgaaattcttgtcggacacgccgccgacggccgcgatggtcagctccggcggcaggatggcgcggatcgccgtgatgccggaagggccgagcacgctggccgggaagaacttcaggccggtggcgccggcgcgcgccgcggcgagcgcttccgtgggggtgaagacgccgggcatcgtcaccatgccgtagtcgcgggcgcggatgatgacgtcgggctcgacattcggcgtcaccagcagcttgccgccggcattgtgcagattgtcgacggcctcggtgctcagaacggtgccggcgccgatcagcacgtcggcgggcgccatcttggcggcgatctcgatcgacttgaacggctcgggcgagttcagcgggatctcgatcgcggtcagaccattctcgatcagcgcgccgacgacgccttcggtttcctcgggcttgatcccacgcaggatggcgatcagcgggcgcttcatggcggggaaggggatgcggttcatcgctctgttctttcttgactggaattaattgggccagatggcgtttgcggcggccgaaaggccggcaagcaccgccgtatcggcatcgatggtcgtggcgttgagcgagagcgccttgaaggcggtctcgtagagcttctgcaggcggccggaggcgacgagcgcgatcggcgtgtcgttggcggcgtcggccagcgcgcccgagatctccaggccgatcagcgtgcccgaaatccgcgcctgcgccgccgatgcggtcatgccgtgcagcagctggccggagcgcgccgtgaacaacaggttggtcgccatctgtggctggcggaatgcggtcgagaccgatgccttgaaggcggagttgtcggccggcgattgctcggcgccggcgaccgcatgcgacaggatcgtgtgcttggtgatcgcgtcgaacagctcgcccgtcatgaaggtggagaagccgatgacctcgccatcctgcacatgcacccatttggaatgcgtgccgggcatgcacacggcctgcgcgcccgtgctgtcggccccgagcgcgccgagaagctgggtctcttcgcctcggatcacgtcgggcgatgcccggtcgcgctgggcgagacccggcaggatgcggatgtcgcggctctggccgggcaccggcacggcgccggtgaggatcgccgatagcgacgtgggcacgtcgacataaccggcctcgacccagccctgcttggcgccggccatgccgcagacgatgacggggatgtcggcgggcgcctcgaccgtggcgaggtgcctggccagaacctcggcgaagccggtcttggccgccgtcgtcatgccttcgtcgctgcggctttcgttgagcacgctgccatcgctgccgatcagccacagccggaagctgctcgtgccccagtcgaccgcgatatatcggggtgtcgtcatcagaaaatgcctccatcgacaataagggactgcgccgtcactgccgaggcgccgtcggatgctagaaacaggcagggaccgacgatggcgtcggcctgcaatacgtgtttgatgcactgccgctcgatcatgccggcgatgccctcttcggtgagccacagtttcatctgccgctcggtgacgatcatgcccggcaggatgcaattgacgcggatattgtccgggccgagcttgccggcgaggctcttcgtcagcccgatgatcgccgccttcgccgtcgtgtaggccgggaagtcgggcatgttgagcatgaaggcgatggacgacatgttgatgatcgccccgccgccggcctcgcgcatcgatggcgccaccgcctgcgccgcgaagaacacgtgccgcagattggtcgcctgattgttgtcccagtattcgggcgtgacctggtcgaaatcatgccggtcgtcgcgcgccgcgttgttgaccagcacgccgatcggtccgcaatcggcgacgatcgcctcgaccgttttgcgcagcgcttcgatatcgcgcaggtcggcatggtggaagcgcaccggatgcaggctgtcgcgcgacaggcgataggccagcgcatggctctcttcctcggcgatgtcgatgaaggagaccttggcgccctggcgggcgaacccctcgacgatggcggcgccgataccggagccgccgcccgtcaccaccacgcttcggtccctgaattcgggatattgcgctccaggttccgccaccactatcctcccgatagttccattattcagaactcaatttgactatatggaattatcggattagccttgggtctctgtcaaggcgtgagggccagcatgggcgcgactgatggccacatcatggataagaatgcgatggataaaaacgccaccgacaaggacgccggcgcggacaagcgcgaaaccggtacgctcggcaagctgatgctgctgctcgatatcgtcacccatgccgacggtccgatgcgcttcaccgatattctggcagtcgccggccagccgcgcggcacgctgcatcgccagcttggccatctcgccgaggaagggctgctggaagtgctggccgatggccgttatgcacccggcctgcgccttctcgacctcgcctcgcgcagctgggcgcgcaacgagttccggctgatcgccgagccgcatctgaacgccctgcagcagctgaccggcgagaccgtgcatctcggcgtcctgcgcggcgcttccgtcatctatctcgacaaggtcgagggcagccagcccgtcaggatgtattcgcagatcggcaatgcctcgccggtctattgcaccggcgtcggcaaggcggcgctctcggcgctgccggacgatcggctggacgcggtcatcgcgagcgtgtcgttccagcgttttacggagaacacgctgacggcggaaacgctgcgccgcgagatcaccgacatccgccgcgcgtgcaatgccttcgaccgcgaggagcacgaagtcggcatccgctgtgtcgcggcccccgtctattccgaggatctgtccttcgtcggcggcgtatccgtgaccggcccggcctatcggctgacattcgagcggctggaggagtgggctttgcctgttcgcaaggccgccgaaagcatcatgagcggcatgcgcatcggcctcggcccgcgccgataacgcctcgcagatttgataatcgtcaaatccggacgtgctgcgtcagctttcgtacagaaatatgcctattttcagcgtgtaggcatattgtggttttgtgaagaatcatcacaattgccagttgtcaatccccagtcctggggtgtagtgccgtaggccatattgacggcgatgccgccgtaggcatgcgattgagcaggccacttacgacgttcctgattttttgagctgatgacaccatgaaccctttgccagaacagacttccgtgaacgtatacgtaaatgaagtgtctgggttgaacacccagttcgatatctttcgcttcatgaaaaggctgacggaagcctaccgcgttcgcgccttcatggtgctcaaccttccctcggccaccgcgcgcgatctgcagagcaacacggtcatcaccaactggcccgcagagcttctgtcggcttacgaccaggaagcgttgctgaccaacagtccggtcatgggcaagctgcgctcgtcgaccgtgccgttcttcaacgacctgtcgaaggagaagatggatcgctcggacggcaagtcgaacatcgttctggcgctgttcgaacgcttcagaatgatgcgctgcgcctatttcccgacgcatgacccgtccggcgcccgtggcgccgtgtccttctccggcgatcgcgatcccttcgcgcccgaggaaatgctggaactgcattatatctccacgcatgtcttcgacaggctggccgagatccgcgcgctcgacaaccgggtggtcgatgccctgaccgaccgcgagatcgactgcctcaactggaccgccgccggcaagaccagcgtcgagatcgccgatatcctcggcctgtccgaacacacggtcaatcactacctcaaccgcgccaccaagaagctcgacacggtcaatcgcacccaggccgttgccaaggcgttgcgcgtcggcttgatcaagtagctgcccaaatagcgtgcgcttgtgtcacgcaagcctaaaatcgcgccacggcgtcggccatcgcggcgtctttcgccgcccgttgggccggattcacagtcattgcgaactggcacgcttcctgcttcctgatcgtcagcggtccagaggggacttggcaacgacgccgtataaaaggcgcgaccttcactccgccgctcgatcccggtcgccaagcgcgctggatatcgagcggcggtttgttgtttttgggatacgcctgccgctctataagcgtgagccgatgcatttttccctcaattctgactggtctttcgagatggacgccctagaaacccattatctactggggtgaccgttgcgccatcagggcgaaagcccggcggacttgatggttcaacggtctcctttgcagccccatcctccatcactgcaattatcgctcccgcgccagcttgccgcgcgccgaagtcgccgttctccgattttgtttggagaaggccccgtgctcctctatctacagagccaaagcagggtgtgaggacgatatgactgaagtcaccaaggaacaggtgctggaaacgctggcaacggtgcgcggacccgatctcgaacataatattgtcgagctcggcatggtctccgatgtgttcatctccgatggcaaggtctacttctccattaccgtccccgccgaacgcgccaaggagctggagccgctgcggctcgccgccgagcgcgtcatcaaggaaatgccgggcgtcaagggcgccctggtcgcgctgacggcggacaagaaaggcgcgccatcgggcgctgccgcctcgcgcacgccgccgcaggccgagcagggccatcagggtcacgcgcacgcccagccgcaacagcgcgccggcaagatcggcgttcccggcatcggtgccatcgtcgcagtggcgtcgggcaagggcggcgtcggcaagtccaccacatccgtcaatctcgcgctcggcctgcaggcgaacggcctgcgtgtcggcatcctcgatgccgatatctacggcccgtcgatgccgcgtctcctgcggatctccggccgcccgacgcagaccgatggccgtatcatcaatcccatggagaattatggcctcaaggtcatgtcgatgggcttcctcgtcgacgaggaaaccgcgatgatctggcgcggcccgatggtgcagtcggcgctgatgcagatgctgcgcgaagtcgcctggggcgagctcgacgttctcgtcgtcgatatgccgccaggcaccggtgacgcgcagctgaccatggcccagcaggtgccgctcgccggcgcggtcatcgtctcgacgccgcaggatctggcgcttatcgatgcccgcaaggggctgaacatgttcaagaaggtggaagtgcccgttctcggcatcgtcgagaacatgagctacttcatcgcccccgataccggcgcgcgctacgatatcttcggtcatggtggcgcccgcgccgaggccgagcgtattggcgtgcccttcctcggcgaagtgccgctgacgatcaacatccgcgaggcgtccgacgccggcacgccgttggtcgccagcgagcctgatggtatcgtcgccggcatctatcgcgatatcgccgccaaggtctgggcgcagctcgagcaaaagccgcagcgcgcggcgcctgcgatcgtattcgagtgatttgtgccgtttcgtgccgcgtcgctagactcccaattgcgggcaaaatgtgatcaaacaacgccgttcacgtaagatgtcttgattcttgcgtgggtttccgtcatatggcgcgccgtcgccatgaggacggcgcgtacggatgctcgatgatagccagccttgcagcggcgaatgcctgctgcgtgttcggagttctcttgtcgatcgaaggattggtgactgcgatgcggttgagcatagtgcatacccgagcttcggccggctgtgacgggatattgatgaacattcttcagccgctttcgttggtctcgaagacttgcagcgcgggcgccgattttgccggcgcttcgcggaaggttttctgatgcgaacggcgatggccctcacagcccctgatcacgggagacgcgcccggtgatcacggcctactgctccaattgtcagtcgatcgaactcgttgacctcaccaaggtggaggccctgcgcgacgatatcgtctggatcgacatggtcgaaccgacgcgcgaggaagaaatctatgtcgagaaggcactcggcatcgaggtgccgacgcgcgatgacctcaaggacatcgagccctccgcccgcctctatacggaagacgatgcggtgttcatgaccgcctcgctcgtctggaaggcggaaaccgatgcgcccgttctgacggatgtggcattcattctcgccggcaagcggctgatcaccatccgctacgcgcagcccaagtccttcgcgctgttcatcgcggccctccatcgcgtgcccgcgcactggcgcaccggcgcctcgctgcttgcgaagctgttcgaaaccatcatcgaccgcaccgccgagatcctcgagctctcggtcgcccgcatcgacgtcctgtcgacccacgtcttcggcgatcgcgccaagaagatccgcaagccggcgaattatctcgaggagaaactgcgcgacatcgccgcccaccagcgcctcgtcagcaaggtgcgcgacagcctggcatcgatgtcgcgcctgatgaccttcttctacaatgttccggccgtgcagcaggatcacggcaccaaggaactctgccgcacggtctcgcgcgacatccagtcgctgagcgagcattcgtcctatatcgccggcaacatcacctttcttctcgatgcctcgctgggtctgatcaacatcgagcagaactcgatcatcaagatcttctcgatcgcatcggtggtcttcttgccgccgacgcttgtcgcctccatctatggtatgaattttgaatccatgccggaactgcgctgggccgagggttatccctactcgctcggacttatgctgatttccgccatcatccccttcttcttcttccgttggaaaggctggctctgaagagcctgttttcgtttcatgtccgcagacagccattcacacgaccagaacatgagcccgcgcaagctcttctatctcgcgctcggctccgtcggcgtcgtctacggtgacatcggcaccagcccgctttacgccttccgcgaagcgctgaagcccgtcgccgccgacggtctcacccgttccgaggtcatcagcgtcgtctcgctcatgatctgggcgctgaccattatcgtcaccatcaaatacgtgctgcttctgctgcgcgccgataacgaaggcgagggcggcacgctctcgctgctggcgcttctgttgaagaccgccaacggccataccgccatgctgatgatgctcggcctcgtcggcgcggcactcttcctcggcgatgcgatgatcacgccggcgctgtcggtgctttccgctgtcgaaggtctgaagctcgtcgcgccgtcgctgaccagctatatcgtgccgatctcggtggccatcctcgccgtgctcttcgccttccagtcgcgcggcaccggaacgatggcgcgctatttcgggccgatcaccgcgctctggttcatcgtgatcgccattgtcggcatatcgcacatctcggacgatttcggcatcctggccgcgttcaacccctattacgccgtgaacttcctgatgaacgagggcttcttcggcgtcatcgtgctcggcgccgtgttcctgacgctgacgggcgccgaagcgctctatgccgacctcggccacttcggccgccgccccatccagtgggcgtggttcgtgctggtcttcccggcgctgacgctgaactatctcggccaaggcgcgctggtgctcggcaatccgcaggccatgagcgatcccttctacctgatgttcccgaaatgggcgttgctgccggccgtcatcctggccaccgccgccaccatcatcgccagccaggccgtgatcaccggggcattttcgctgatccgccaggccatcaacctcggctacctgccgcgcatggaaatcctcttcacctcggaaaccaacacgggccagatcttcgtaccctcggtcaacctcgtgctgttcctcggcgtgatcttcctggtcatcaccttcggcagctcggattcgctgtcgacggcctatggcatctccgtcaccggcgccatggtcgtcacctcgatcatgaccttcgagttcgtccgcgcccgctggaactggtcggtgctgacggcgaccgccgtgctggccccgcttttcatgctggagctgatcttcctcggcgccaacctcatcaagatctacgacggcggctatatcccggtcctgatcgccaccaccttcgtcgtcatcatgtggacatggcgtcgcggctcggcgctgttgatggaaaagacccgccacacggatattccgctggcctcgttcatttcctcgatcgaacgcaagagcgatcactcgccggcccatgttcccggcaccgcgatcttcctgaccagcgatccggaatcggcacccgcggcacttctccacaatctgaagcacaaccacgtcctgcacgacaagaacgtgatcctgacgatccgcacggtcaacaagccgcgcgtgccgaacgccgaccgctacaaggtcgagcagatctccgagcgcttctcgcgcgtcgagctcttgttcggcttcatggaatcgcagaacgtctcgcaggcgctggcgacgctgcgcaagaccggactgaagttcgacatcatgtcgacctccttctatctcggccgccgcaagctggtgccggatgcgaagtcgggaatgccctattggcaggaccgcctctacatcgcgctcgccaacgccgccgccaatccgtcggactacttccgcctgccggccaaccgcgtcgtcgaactcggctcgcacgtcatcatctgacgcgcacagcattcgttaagagcccggccgtcgcgccgggcttttgcgtttcaggctctataagcatttgctgtatgaattcggagcggcgtattaaccaagcatcaaggttaatgagacatttttatcggcatgttcatgcgtcccatgccggagtctggtgttgcgtcgaaataatcgtgttccgggtcagtcaagcgcccaagccgcgtcgcgccgcttcggcaggctgagcccgctgcttcaacgttggagttcccccgcgctgttcggcgtctgcgcgtggctgatgtttcccaccatggcctcgcacgccgatcttgcctcctttctcgccgggctcgaccagggccgcgaaaactggcgcatggtgctgaccaattctcccgccggctccattcaccaggccgagctcgccttttccgatccgaccgtgaccggcgcgatcgcatccggcgccggaatggtgctgcccgatggccgcaaggtcgccttcacatcgaaggaaaaggcccgcgaggacacgcccgacgaggaccgcgtcaaccgcgcctccaagaagggcagggtggtcgccgtcgagcaggtgcagccgcccaaggatttctccgccggctccattctccagcgcacgcgccttctgtttcagccgagcctcgacctcaaggaaaggtcggccttcgtgaagccgaagatccgcggcaaggaaatccagatcgccaccaacttctaccgcaagcagcagccgaagccggccgccgacatttcaccgatgctggccgatctggtgacgagcaacaaggcggacgtgctcgccacggcctatgcgccggccgcacccgattatgcccgccagtcgcctttcgattccatcctgacggacaaggccgatgacggccgcttcgtgccgaagatcgggcccaaggatcacgcctgggccgccagcgtcctgccggcgagcgtcttctccccggccgagcagcagtgtctcgcctccggcgtctacttcgaggcgcgcggcgaaaccgtgaagggccaggcggccgtcgcccaggtcattctcaaccgagtccgcaatcccgcctatcccaagaccatctgcggcgtggtctaccagaacgaggactggcgcaatcgctgccagttttccttcgcctgcgacaacatcaaggaccgcgtgaactcgccggccaactggagaatcgcccgcgacgtggcgatggcggtgaccgccggccgcatctggctgccgcaggtcggctccgcgacccactaccatgccgtctatgtccgcccggcatgggccaagaccatggaaaaggtcggacgtatcggcatgcacgtcttctaccgcacctatggtggcggctggagctgacaaaaccgtgtaaaaggcgcgttttcgcgccggattgccccctcggcgcgcggattctttcccccgattccgcagcaagccgcccagatcgatctaaccgcatgtttttgatcgcttattttaaggctggacatcgacctcctacgccttgactatgctttttgctaaaactatgttgcgcgcgacttcaaagcgggccggaaggttcttcagccttggggtcgttgtccggtaaaccggggtagcggcgtagcggacggcggcaggcggaggagagcatgatggcggatgaccgcgaggagagtctggaaaagcgccgtgcgcagctgggagcggaactcgcgaccaagcgcatcgaggcggggaaggacgaggccgacgaggcccgcgccgaagtaagccgccggggttatgcccaggcgatgaagctttcgagcgagttcatttccgcggtcgtggtcggcgccgttctgggttatctcttcgaccgctttgtcggcactgcgccttggggattgatcgtgcttcttcttctcggatttggtgccggcgtgctgaatgtgatgcgcgctgcgggcaaggtcgcgagaccgagcttcgaggggcgtgaaagcgaccggaaatagggcggaacgttcaggcgttcgatccaatgcaataatcccgtctcgcgcgggtgtaagatatagagagaacaagcggtgtctaacgatccgactcaacagttcctggtccagaagattgtgccgatcgacttcggcgggattgatttctcgtttacgaacgcgtcgctgttcatggtggcgtccgccgctgtttccgccggcttcctctatttcgcgacctccaaccgtgccatcgtgcccggccgctcgcagtcgatcgccgagatgtcctacgagttcatcgccggaatgctgaaggagggcgcgggatccaaggggatgaagttcttcccgctggtcttctcgctcttcatgttcgtgctgacggccaacctgctcggcatgttcccctacttcttcaccattaccagccagatcgtcgtcacctttgctcttgctttgctcgtcatcggcacggttctggtctacggcttctacaagcacggcttccgcttcctgaatgtcttcgtgcctcagggcgttcccggcatcctgctgccgctcgtcgtggccatcgaaatcatctcgttcctgtcgcgtccgatttcgctctccgttcgtctgttcgccaacatgctggccggtcacatcacccttaaagtgttcgcgggcttcgtcgcctcgcttggagccatgggtgcggtcggtatcggcggcgctatccttcccctcatcatgaccgtcgccctgacgggtctcgagttcctcgtcgccttcctccaggcttacgtctttgcggtgctgacttgcatgtacctcaacgacgcgatccacccgggtggccactaaaggataccgacattgacgccccagggcgtcagtcaattcgccgcaacaaccatttcaaaggagtacaacatggacgcggaagcagcaaaatacatcggcgcaggcctcgcttgccttggtatggcaggtacggctctcggcctcggcaacatcttcggcagctacctgtcgggcgctctgcgcaacccgtctgccgctgacagccagttcggccgtctggtattcggcttcgccgttacggaagctctgggcatcttctcgctgctcgtcgctctccttctgctgttcgctgtttaatttcggcgcactgagggatcacggcctgctgacagcgagccgtgatcctttgtatttgcagacacctggaggtgagcatgttttttgtgaccccggcttacgctgaagaagccccggcgggaaccgcagaaactggtgcggcgaccggtacagccgcgactgctgccccggccgcaggcgaggtcaataccgagaccggcgtgccaggcgaagaaaagagcggtatatttccgccattcgatacctcgacttacgcttcgcagcttctgtggctggcgatcactttcgttgccttcttcgtgattatgcagaaggtcatcgcaccgcgcatcggcggcatcctcgagcagcgccacacgcgcatcgctcaggacctcgacgaagcagcgcgccttaaggcgcaggcggatgccgatgtcgcggcttacgaagccgaactcgccgaagcccgcgccaagtcgaacgccatcggtacggcagcgcgcgacgccgccaagctcaaggccgaagccgaccgccgcgcggtcgaagccgctctggctgaaaaattgaaggctgccgaaggccgcatcgccgaaatcaaggcacaggccttcgccgatgtcggcacgatcgccgaggaaacggccaaggccgttgtcgaacagctcgtcggtggcaccgccaccaaggctgaagtcgcctccgccgtcaccgccgccaagaagggagcttgatcatggcattggacgcaacattctttgctctggtcagccttgtcctgttcgtggcgctgattgtctacctcaaggttcccggcatgatggcgacgtcgctcgacgaccgcgccgatcagatccgcaacgagctgtcggaagccaagcgcctgcgtgaagaggcccagcatctgctggccgaatatcagcgcaagcgcaaggaagccgaagcggaagctgcccagatcctggcggccgccgagcgcgaagcggaaatgttcaccgccgaagccaagaagaagaccgaggaattcgtcgccaaccgcacagcggtttcggaagcgaagatcaagcaggccgaagccgatgcgatgaaggcggttcgttccgccgccgtcgacctcgccatcgccgccgctgaaacggttctcgtcaagaaggccgatgccaaggttcagtccgaactcttcggaaatgccctcggccaggtgaagacccgcctcaactgagatcggttttctcgcattcgaagccccggttcgccggggctttttgcgtttggggatatcttgcatcggcgccggaaggccggccgacgtcttgcttactcgccgtcgggcagttcggtccggcgcagcggcttgaaactcatgcgatgcagcgggcaggggccatggctgtcgatgccggcgcggtggcgtgcggtgccgtagccggcatgggccgcgaagccataagcgggaaagatcaggtcggcgcgggtcatcattcggtcgcgcgtgaccttggcgacgatcgatgcggcggcgatcgacaccgagcgggcgtcgcccttgacgacggcctggccgggacatgcgagcccggggggcacgtccagcccatcggtcagcacgtaacttgccgggatcgataggctgaggatcgcgcggcgcatggcgtcgaggctcgccttgcgaatatccgtctcgtcgatgcggcgcgagctggaagaggcgatcgcgacggtcgcggtggcgaggatctgctcgaacagctcttcccgcctctgcgccgaaagctgcttggaatcgttcagtccctcggggatgcgcttcggatcgaggatgacggcggcggcaacgacgggtcccgccagcggtcctcggcctgcctcgtcggcgccggcgacgggccagtggccggccttgcgcgccttgagctccagccggaagtccggcaccagggggacatcttcgaaaagcatgggagaatcgggtggcgtgcgacgtgtcatgcggctgaacttcgcacgccaacccgatttcctgcaagtccccggatcagggcggcggaccggggacttgagaacggacggccagggtcagtcgtccgtaagggaatgtcagagcatgtcgcgcaaaagtgtgcagcggttttgcgacaacgacatgctgcaaaactagagcagcgacagctgcacgccgctgccgttcggcggcaggaacaggtcgtcgcgcagcggcatgccgcggcgggtcatgccgagccgcttcgtcgccatctcgaagcgacgggctatctgccaggcatagggaccggcgcctttcatgcgcttgctgaaatcggcatcgtagtccttgccaccgcgcatcgagcgcaccagcgacatcacgtgcctataacgatccggatagtgctgcagcagccagtcacgaaacagcggcgatacttccagcggcagccgcaggatcacatagcccgcttccgtggcgcccgcggcattcgccgcctcgagaacgcgctcgatctcgtggtcgttcagcgccggaatgaccggcgccatcatcaccgatgtccggatgccggcctcgctcagcgccttcagcgcgtcgagccgtttggaaggggtcgacgcgcgcggctccatcgtccgcgccagcttgcggtccagcgtcgtcatcgacagcgaggcgcgcaccaggttcttctcagccatccgctgcaggatatcgaggtcgcgcaggatgagcgccgacttggtgacgatggaaacaggatggttcgcccgctccagcacctcgaggatctcccgcatgatccgccattccttctcgatcggctggtacgggtcggtgttggtgccgatggcgatcacccgtggcttgtagccgggtttcgccagctcgcgctccaggagcctggctgcatccggcttggcgaacagccgcgcctcgaaatcgagcccggccgagaggcccatataggcgtgggtgggccgcgcgaagcaatagatgcagccgtgctcgcagccgcgatagggattgatcgaacggtcgaaggggatatcgggggattcgttgcgggtgatcgccgtgcgcggcttttcgatctgcacctcggtcttgaacggcggcagctcttccagcgtctgccagccatcgtcgaaggtctcccggcgctgcggttcgaagcggccgccggggttcagtcccgcgccacggccacgccggcggtcgacctctatcctgaggccggaagaaacgatcatcgcgtcggcaatatccgccgtattggcaggcgcgaatgcggcctgccctgcaagggactgttcgttcatcgggtttctccgtcgatggaagactcggcgcctccatccgttctgctgattaaattcctatcgttgaaaggagaacaatgcaagaacaaaattggaaaactgccgctggtaatgttttgtgcgtcgcactataaatgagcaatgttgactgtcctattggaatgccgggatcaggagcctgaactggcgcagacattatcggtgttggttgccggtgccgtggaggggctggtgagtgatgtggtggtgctcgaccacggctcgcgcgacggctcgtctaaggtggcggacgccgccggctgccgcttccatcagcattgggatatcaaggatgtattgcgttcggcgcgcggcgaatggctgttgttcgtcgagcccggcgcccgcccgcagagcggctggatcgacgagatcgccgaatatgtggcgctgaacaagctgcccgcccgcttcaccgcctcgcgcggctaccgcaggcccttctatcagcgcctgcgtcgcctggcgccgctggagcttgggctgttgctgccgaagaaacatgcgctggcgacggcgcgaagcggcatgcagctggcggaattcgtcaaggggcagaagctgcgcaggctctcggccgagctcatcccgtcctgggtggcgcgttcggcgcggggttgatcgctagctcgatgcgtggattcaaggagttacagcgccacgcttcaggtgctcgtcgagccggggcatgatttccacgaagttgcacggcatgtggcgatagtcgaactgcgccttcaggatgccgtcccaggcgtccttgcaggcgccgggcgatcccggaagcacgaagacgaaggtggtgccgatcagccccgccgtcgcgcgcgactgcacggtggaggtgccgatcttgtcctgggaaatgcggtggaacaccgcggagaagccgtccatgcgcttgtcgaacagcggctccagcgcctcgggcgtcacgtcgcgaccggtaaagccggtgccgccggtcgtgatgatcacgtcgacatcggcttgcgcggtccaggcccgcacctgtgctgcgatcgcttgtctgtcgtccggcgcgatggcccgggcgatcagccggtgtccggcctccgagatgcggccggccagcgtatcgccggagcggtcgtcttcgggtgtgcgcgtgtctgaaaccgtcagcacggcaaatcccaccggaatgaacggacgcgtatcgtcaacgcctgtcatcatcatctcccgccaatgtttcggttgcctcgaaataccagtccggccgcttgccgagaagtgcttgtctcgcggcctgcgcttcggccatgccggcgaatatgccgaagcacgtcgcgcccgagcccgacatccgcacgaagagcgcgccctggtcgcgcagcatatcggagatctcggcgatctcgggcagcagcgcgcgcgccggcggttcgagatcgttgcgcatcgagcgcagcgcgtcgagccaggacaggccgggaacgatcgcaagcgcgccgttcgtcttcgtcgcgagccggcggaaaacctcgggtgtagaaacgcccttcagcggattggcgagcaccatggcgaaaaccggcaggtcgcgcaccgtctcgatccgctcgccgatcccgcgcgcgatcagcggccggctcgccaggcacatcggcacgtcggcgccgagcttgatggcgatcgcatcgatggtctcggcgggcaggggagtgccccacaggcgcatcagcccgcgcagcgccgccgccgcgtccgccgagccgccaccgatgcccgaggcgatcggcagatccttgcacagctggatgctcaccggcggcgccgcgccgccggcatcgccaatagccaggcgcagcgcatcccgcgccttcagcaccagattggtgccgccatcgctcgcgagcgcgccgccgaagcggccggagatgtggaattcgtcggtatcagccggcgcgaagtccagccggtcgcccgaccgcgtgaacgtcaccagcatttcgagcagatgatagccgtcgcttctctggcccgtgacgtgcagggccagattgatctttgcaaaggcatcctcgctgatcgcaacgccgtcggcgaagcccgtgccagccattcggatcaggtcttcttgtcggccggcttcggatcgacaggggccggatcgggcatcttcttgtcggcggccttggcatcgtccgtcacggcgggcaggccgttggcgatcttgtccttgatcttcgggatctcggcggcctcgggttccgagttcagcgcccggttccactggtacacggcctcgagcttgcgcccgacgcgccagtaggcgtcgcccagatggtcgttgatcgtagcgtcgccggccttgatctgcgccgcgcgctccagttcctcggtcgcgtcgtcgaacctgccgaggcggaaataggcccagccgagcgaatcgatgatgtagccgtcgtcgggcttgagatcgacggccttcttgatcatttccagaccctcgtcgaggttccggttcatgtcgatccaggaatagccgagatagttcagcacctgcggctggttcgggttcagctccagcgccttgcggaagttcggctctgccttgtcccactgcttcagccgctcgtaggcaatgccgcgctggaagaacaccgtccaggtgttcttgcccggcagcggcccgatcatgtcgacggccttgtcgtaattcgtcgccatggcctggtagtccttggcgtcggacagcacgctgccataggcgaggtagctgcgaatgtctttcgggtccgactcgatcagcccctgcagatgcttgcgggcctcctcgaccttgccgccttcggccagcgccagaccgagctgcagttcggagatgcggctcatcggcgaattgtcgggcacttccctgtagagcgcgatggcgcggtccagctggctctgcttctcggcgatgccgccgagcatgaccagcgcatcggcgctatcagggtcgagcgcgcgggcgatctgcaggtagagggagacgatgtcttcggcgccgtcgcggttcagcgcgccggcaaaggagaacagcacaccggccgcgccctgcttggccgtggtgatctgctgcacctgcttttcgttgttggtgatgctctggcgcagcgcgttgagcggcgcgtagttcggcaggaggttgtcgccgaccgaaaccgtgtcgagcgccttctgcttgttgccctgcgccgcctccaggcgggcgagcgccatgaccgcgcgcatgaaggtgtcgggcgcggtggcggcgccatccttgtcgagcacggcgtcgttcagatgcttgcgcgccgcgcgcacgtcgccgttgacgatggcgatcgcacccgcgttgtaggcctggaagatgccgagccagtccggccccttcagcttctcgacctgcgacagcgcttccttgccctttccggcgcccagccgcgcccaggcggcgatgagatcgttcatcacccggtcgagatcggtcgggccggtggtcttcagcaccgtttcggcggtcttgtattcctcgcgctggatagcgtcggcgccacgcacgatggtcgaaaggcgctcgatgctcggatcgttcttcaggtcgttggcgtaacgaacgctgtccttgatattgccgttgagcagcagcgagatcatcagacgctggcggatctccggattgccgggctcgatctgcagcgctttcttgtaaagctcgatcgcggttgcgtaatcgtggtcgacatcggcggtgcgggcggcaagcagggcgccggagaaggtgttgacgctgtcaggatcgaagaccactgtcgcgctggcgtcgtccttcttggccgcgtcttcggcattggcgccgccgagcacgctcagcgacagaactgccgcaagcgacgcgctcgaaagaagacgtatggcaaatttccgccgcattagaaaacctttcgtgagaacagcccaccagcgtcgactgcaaaatcaggtaaaagactgattcacgacaggatggcttttttgaagcgaccccgcaagaaaatcagcctttgaccaatgatcgtcggttaattgacgcgctcgatgcagaagtcgatgacttccatcagtgcggatttccatgccgtatcgggaagcggcgccagcgcatcgcgcgcgatcgtgccataatggaccgcgcggccgatggtatcgttcagcgttccgtacttggtgatcaggccaagcgccttttcgaggttctggtcgttgctctcgccgccctcgatcgccttgcgccagaaagcgcgctcttcctcggtgccgcgccggtaggcgaggatcaccggcagcgtgatcttaccctcgcggaagtcgtcgccgacattcttgccgagatcggcggccttgccgccgtaatccagcgcgtcgtcgacgagctggaaggccaggccgaggttcatcccgtaggacttcatggcgttgcggccggacttgccggcatccgccacgatcgggccgacttcggcggcggccgcaaacagcgccgcggtcttggcgcggatgaccgagagatagtcgtcctcggtggtttccatgttcttggcgaccgaaagctgcagcacttcgccctcggcgatcacgcaggcggcggaagaaagcacgtcgagcgcgtcgagcgaaccgacatccaccatcatgcggaaggcctggccgagcaggaagtcgccgacgagtacgctggcctggttgccccagatcgtgcgggccgttgacttgccccggcgcagattgctttcatcgacgacgtcgtcgtgcagcagcgtcgccgtgtgcatgaattcgaccgaggtcgcgagcttgatgtgattttcgcccttgtagccgtagagcgcggaggaggcgagcgtcagcatcggacgcaggcgcttgccgccggacgagatcagatggttcgccacctcggggatcatctgcacgtctgaaccggccttggaaaggatcaactggttgacccgctccatgtccgccttggttagatccaccaaaggcttgacggatgccagtttgtttttgctttcttcaagcggtatgaccacgcccaacgacccggactcctgttcactcattggatttgacaatagaaaggggcggcttgagcggcaagaggcgaaattgccacgtcgcggaaaattgaaagggatttcacggtaaatgcatgaacttatccgcgccaacgaccccgttctgctctccttcgcggaaagcctgctgaaggatgccggcatccattgctttatcgccgatcagggcatgagcattctggaaggctcgctcggcatgcttccgcgccgcctgctcgtcgatgacgaacaggccgatcgcgcccgccgcatcctcatcgatgccggcctgggcgacgaactgcgcgagcggaaatgagccacgccatggccagcacgccgacgtcccctgagccggtatccgtgatcgagaccatcgacgccttccatcgcggtggtttccatgtcgtccagccgaagggcaggggacatcgctccggcatggatgccatgctgcttgcggcattggtggacgacgacagggcggtcagggtcgccgatctcggcgccggcgcgggtgccgccggtcttgccgtcgcctcgcggctggcgaagaccgaggtcgtgctcttcgaacgctccgccgaaatggccggctatgctcgccgcagcctcgatctcgcggaaaacgcccacatggcgggccgcgtctccgtcgtcgaggcggacgtgacgctgaaggccagggcgcgcaacgacgccggcctcgtcgatgaaagcttccaccacgtcatcctcaatccgcccttcaacgatcccggcgaccgcaggacgccggatgcgctgaaggccgaggcgcacgcgatgacggagggtctgttcgaaagctggctgcgcacggccggcgccatcatgataccaggcggccagttgtcgctgatcgcccggcccgaatcgatcgccgagatcatcgacgcctgcggccgtcgcttcggcggcatcgagatcacggcgatccacccgcgagaaggtgaaaacgcggtgcgcatcctggtcaccgcgatcaagggctcgcgcgcccgcctgtcgctgcgcgcgccgctgatcatgcacgaagaggggagccacaggttctcccccttcgtcgacgacctcaacaacggtcgcgcggcctattcgcggcggtagactaaccgatcacgaaattgaggagcaggttgatgttaagcgcggcgatgacgaaggcgatcgtgtaggcgattgccgacagccagcgcggcgccacgagctcacccatcttcgccttgctggcggtgaacatcacgagcgggaagaccgcgaaggaaagctgcaggctgagcacgacctgtgtcaggatcaggagctcggcggtgcccgcttcgccataccagaccgtgacgatgctggccggcacgatggcgatggcgcgggtgatcatccgccggatccacggccgcagccttatcttgatgaacccctccatgatgatctgcccggccatggtggcggtcacggtcgagttgatgccgcagcacagaagcgcgatgccgaacagcgtcggtgcgatcgcgaggccgagcaacggtgccagcagtgaagacgcttcgccgagttcagccacgtccgtccgtcccgtcgcgtggaaggcggcggccgccaggatcaggatcgaggaattgatcaacagcgcgaagcagagcgccacggtggaatcgatcgtcgcataggtcagcgcctcgcgcttttccggcaggctgtggccgtagtcgcgggtctgcacgatacctgaatgcaggtagagattgtgcggcatgaccgtggcgccgagaatgccgagcgccaggtagagcatctccggattggagacgatctccgtggtcgggaagaagccgcggatcacctctccccactgcgggtcggccaggaagatctggatgccgaagcagacggtgatgatcccgagcagcgcgatgacgaaggcttcgatccagcggaagccgatcttctgcaggtagaggatgaggaagacgtcgagcgcggtgatgaggacgccgagttcgagtggaatgccgaacaagaggttgagcccgatcgccgtgccgatcacctcggcgatatcggtggcgatgatcgcgacttcggcgcacagccagagggggatcgacacccaacgcggataggcgtcgcggcatgcctgcgccagatcgcgaccggaagcaatggcaaggcgcgcgcatagcgactgcagcacgatcgccatcaggttggacaacagggcgaccgcgagcagcgaataaccgaacttggaaccgccggcgagcgaggtcgaccagttgccggggtccatgtagccgacggccaccagatatccggggccgacgaaggcaagcgcccggcgccagcgcgaactgtgcttgcgcgtgccgatcgagcgatggacatcggccatcgacgcctcctcgcgctcgtaacgccagcccgtcttggccttcggtgtcataatgtccatgcagcatccgcctgtttcgtcgatagaggcactatgactgattagaatgataatgcaagtcattcgcaacaagaaacttgacgcgcggaggtttcgtggcgcggttgtttcaggctgcccattgcgtttgccgttgcgacgcatacatgggagagacgtttcacgcagcttgcacgaaggaatgggaatggccggatttttgagaagactgatgccgaagcgcttccgcaaggagggtatcgttattccggttgtcaggcttcagggcgcgatcatgaccggcggcagccagttccgcccggcgctgaacctcgcctcgaccgcgcaagtgcttgaaaaggcctttggtttcaaggatgcgccggccgttgccatctccatcaattcgcccggcggctcgccggtacagtcgcggctgatcttcacccgcatccgcgaactggcgcgcgagaagcagaagaaggtcatcgtcttcgtcgaggacgtcgcggcctcgggcggctacatgatcgcgctttcgggcgacgagatcatcgccgatccgacctcgatcgtcggctcgatcggcgtcgtttccggcggcttcggcttccccgagcttctgaagaagatcggcgtcgagcgccgcgtctatacggccggcgaaaacaaggtgatcctcgaccccttccagccggagaaggaaaaggacatcgaatatctgaagaccctgcagctggagatccaccaggtcttcatcgccatggtgcgcgagcgtcgcgccggcaagttgaaggacgacgagacggtgttttccggtctcttctggaccggcacgcgcggcctcgagcttggcctcatcgatggtctcggcgatatgcgccaagaactgaagaagcgctacggttctaagaccaggctcgagctcgtaacgcctgcaagggggcttttcggacgccgcattcccggcatatcatccgcgtcgctggatggcgccgcctccggcttcgcggccggtcttgtcgagaccgccgaagatagggcattgtggagccggtacgggctctgacgcgattgcggcgaggatgcagcgcggttttgcacccgcaatcgcggtaggaaaagagggaagaagacagacggcatgctgcagcttgtgatcatgggtgtgctcgtcctgggcgcctggctcctctaccgccgcttcgtggccgaagccaagcgcctgcaggaaaaatcccgccgtgcgcaaagggagcagcagaccggcgcggtcggcacgctggtcaaggacccggtgacgggggagtatcatttgaagaaggatgaggagtgagggggagggctattgcctgtcccgaacccttgccgcccaatcggagcctgcatagcttacggtcaggataacgaccgcatggtcgtcttcgtcgatggtgaagcagatcacgcccttgtccgcggcgggtatcgcacgcaaccctgcaaggacttcgtcgcgaacggttcccttgtagggaaagtcagtcaggctgccagtgacatgctcgatcgcctgcagcttgcgtgtggcgctggccacgcccgaatagtcctttatgagcgtgaaaatctcaaccagatcgtcttcggcggctggatggtatcgcaactcatacggttgcttcatttcgagtgactgtctgcaacgcgtcggcgaacgcggtcgaacagattgtcatccttcattgaaatcaactgatccttcggcaactgtgcccgtcgccggatctcgtcagccatcgcagcgatcgggtcatcggtcgcttgatcgtcagcccgtaatcggctcagtccctctttgatcacgtctgacacgctcggaaaccgaccgtcctcgacgagctcttccgcatagcgaagatcctcatccgatagcatcacggcgttcttggcgttcataatcgtctccaaggcaatgtctgtagttactataaaacaaccgacaccgcttgtcctccctgcaaactgtggggaagcgaagggagggcgtgctttggcgctccatcgccgtgtgatatacttgcagcagtctacatcgaggcgcgccatgcagattttcaagttcggagatggtcttggagtgtgcattccgcaagcggttgtggatgcactcgggttgaaggagggcgacgacatcgcggttcgcgtgggcacggaccgcaaccttgaattcgtcacggccgatgcccggtcgaaggcgtttgaacggatcaaggcattcaagctgcagctgccgtcggattggacgtttgatcgcgaccgcgcgaacagccgaaacccttgaccctcatcgccgctcgtggcacctgtcgcccaccgaaccaattgaatggcgactaacctcatgtctgcacccagcatccccgaccacatgaacccgaagcgctcgtttcaggcgctgatcctgacgctgcacagctactgggcggacaagggttgcgcggtgctgcagccttacgacatggaagtcggcgccggtacgttccatccggcgaccacgctgcgtgcgcttggccccaagccctggaaggccgcctacgtgcagccctcgcgccgcccgtccgacggccgctacggtgaaaacccgaaccgtctgcagcattactaccagtaccaggtcatcctgaagccgaacccgccgaacctgcaggagctctatctcggctcgctcgccgcgatcggcctcgatccgcttctgcacgacgtccgcttcgtcgaggacgactgggaaagcccgacgctcggcgcctgggggctcggctgggagtgctggtgcgatggcatggaagtgtcgcagttcacctatttccagcaggtctgcggcctcgaatgctcgcctgtcgccggcgagctgacctacggcctcgagcgcctcgccatgtatgtccagggcgtcgacaatgtctacgacctgaacttcaacggccgcgagggtgatgagaagatcagctatggcgatgtcttcctgcaggcagagcaggaatattcgcgccacaacttcgaattcgccaacaccgagatgctgcatcgccacttcatcgatgccgagaaggaatgccaggcgctgctcgccgccggcgcgcccggagacagcgataaccagaagctgcacaagtgcgtcttcccggcctacgaccagtgcatcaaggccagccacgtcttcaacctgctcgacgcgcgcggcgtgatctcggtgacggagcgccagagctacatcctgcgcgtgcgcacgctcgccaaggcctgcggcgaagcattcctgttgaccgacgccggcggcgtcaatctcgccaccaaggctgcctgagcggtcagcggcgctgattggccggaatgtcggccttgatctcgacggtgcgcgctgccggacgcggcgcgcccctgaggatgaagaacgatccgatggcaagcatgttgagcaggaagatggctgcgctcatggtttgattgatcctcgtgacgtggtttggatcccgccgccgtcggccgatccgatagtcaagataggccttatccggcaaccgcggtatcgcgagatcttgggataccccgcgcgccgaaccgcgaaggcggccggcaaatggcgaaggcgggatgacaatcgccgccaagccgcatagtctcccggccggctttgcgtcgtaacgggggattcgcgatgtatatcattctaggcctcatcgtcctgatcgcgctctatgcggtcttcgtctataacggcctcgtgcgcgcccggcagatggccgaggaggcctggtcgggcatcgatgtgcagctgaagcgtcgcgccgatctgatccccaacctgatcgaaacggtaaaaggttacgccacccacgaaaagacgacgctcgaagaggtggtcaagctccgcaaccaggcgcagaccgttccggcaggcgacgtggccggccgtgcgcaggcggaaggtttgctcggtgcagcactcggccgcgtcatggcgctcgccgaagcctacccggatctgaaggccaacgagaatttccgtgaattgcagacctcgctcgaaaccatggaaagcgagatccagatggcccggcgctactacaacggctccgcgcgcgatctcaacgtcaaggtcgagagcttcccatcgaacctcgtcgccaaccagttcgggttcagcaagcgcgagtatttcgagatcaccaacgaggccgatcgcgccgtcccgagcgtgaagttctgaacccaaaagttctgacaacaggcatttgcctttgctgaaaagctgctatgagcagggaaagatcgcggccggatagggacgcgcgcatttgccggaaaagacgtcatgagtaaagacaaggtcatgagtaaagacaagctcaccatcatcccggcggccgagccgctgtccggccgcgccgtgcctcccggctcgaagtcgatcaccaaccgcgcgctgcttctggccggtctcgccaggggcaccagccggctgaccggcgcgctgaaaagcgacgacacgcgttacatggccgaagccctgcgtgccatgggcgtcacggtggacgagcccgatgcgaccaccttcgtcgtcaccagttccggagagctcaaggctcccacagcaccgctcttcctcggcaatgccggcaccgccacccgcttcctcacggcggcactggcgctcggccatggccgctatgtcgtcgatggcgacgagcatatgcgcaagcgcccgatcaagccgctggtcgatgccctgaagtcgctcggtgtcacgatcgacgcgcccaccggctgcccgcccgtcacgatcgacgccaacggtcgcttcacgaacaacaaggtcgtcatcgatgccggcctttccagccagtatgtctccgctttgcagatggcggcggcctgcggctccgagccgttcaccatcgagcttgccggcgccgatatcggcgcgcgcggctatatcgatctgacgctcgccgtcatgcgcgctttcggcgccagggtcagccagccgacgccctcgtcctgggtgatcgagccgaccggctataccgccaccgatttcgtcatcgagccggatgcttccgccgccacctatctctgggccgccgaagtgctgaccaagggcgcgatcgacctcggcgtcgccaacgaggatttcacccagccggacgccaaggcctacgacgtcatccggcagttcccgcaccttcccgccgagatcgatggctcgcagatgcaggatgcggtgccgaccatcgccgtgctggccgccttcaacgaaacgccggtgcgcttcgtcggcatcgccaatctgcgcgtcaaagaatgcgatcgcatccacgcggtctcgaccggcctcaacaacatccgcgcgggccttgccaccgaggatggcgatgacctgatcgtcgcctccgacccggccttggccggccagcgcctgcctgccgatatcgacaccttcgccgatcaccgcatcgccatgagcttcgcgctggccggcctgaagatcgacggcatcaccattctcgacccggactgcgtcggcaagaccttcccggattactggaaggtgctggcttcgctcggcgtcgcgatcaaggacgaatagccggccgcagatctcgccgggcaaaccgaaaagacaattctgaaaagacagtggggagaatgtcttgatgcgttggttgtccggtctcgttgccgctttcatgctcctcttggcggcatcgcttgccgccgccaacgagcgcatcacttcctatcattcggaagtccaggtcgccaagaacggcgaccttaccgtgaccgagacgatctcgatcgttgccgaagggctcaggatcaagcgcggcatcttccgcgactttcccctgaccatgctggatggcgaggggcgcaccgtccgtgtcggcttcgatctcctttccgtcacccgcgatggccagccggagccatacaggaccgaaagcatcgatggcggcatccgcatctatgccggctccagcgacgccatcgtgcccgagggcgagcgcacctatgtcctgacctacaaggtcgatcgcatgatccgctacttcccggatcaagacgaggtctactggaacgtcaccggcaccggctggcagttcgccatcgagcaggcctcggcgcgcattacgatgccatcaggcgaagtgacgaggctcgcagcctataccggacggttcggctcgacggcgagccacgccacgtcccgcatcgagggcaaccaggcgatcttcgccacgaacaggattctcgggccgggcgaagggctgaccgtcgtcgccggcgtgccgaagggcgtcatcgacccgccgtcggcgcagcagcttcgcgcctggtggctgcgtgacaacatggccgaagtcatcgccgttgccggccttcttctcgtcctcgtctattacgtgtttttctggatgagggtcgggcgtgatccggctcgcggtgtcgtcgtgccgcgttgggacccgccggaagggctgtcgccggcgcttgtgaattatatcgacaacaagggcttcaacggcgccggctggccagccttctcggccaatgcaattgacctcgccgtcaagggatacctgaccttcggcgatatcggctccagcatctcgatcacccgaaccgacaagccggcgccgaaagccttgccggccggccaggccgcgtttctgtccctcgtcggtcgcgtcggccagagcttctcgatcagcaagtccaatggcgagaaggtgcgcgatgccggccagaagttccgccaggcgatcgaaagcgaacatcgcggcaagtattaccacgccaacaccctctacacggtcggcggcatcgtcctcagcgtccttttcatcggcgcggtcctgacctttggcgagatcaacgccgatctcagcggcttcattgccgtcaccgttttctcggcggtgttcttaggcatcctgtcggcgcgcctcggtctcagcttccgcaaaggggcgccgctgcgcagcaagatagccggtgtgatcatcggtggcttcttcggcttcacgcttctgtccgtcctcgccggcatcgtcaccgccgctgtcgaacaactgaccgcggccgaccactggcccgtgatcgtcgccgtcggcggcatcgtcatgaccaatgtggtgtttttcttcctgatgggcgcgccgacatcgctcggaagccggctgatggatcacatcgatggtctgcgccgctacctgacggttgccgaaaaggaccgcatgaacatggccggcgcgcccgccatgtcgccgcaacatttcgaaacgctgctgccctacgcggtggccctcggcgtcgagaagccctggagcgatgccttccagacctggctggcgacggctgccgcggcgggagcggcggcggccgcctattcgccgatctggtatccgacccattccggcagcttcggcgacagcatcggcggcttctcctcctcgatggcctcgaccatcgcctcgacactccccgcgcctgttacctcgacctcgtcgggcttttccggc

SEQ ID NO: 16 - DNA, 83981 bp, Rhizobium matallidurans
  source 1..83981: mol_type = genomic DNA
ctcctcgcttttcgacccaccgaggactgccgagcttggtgcccccgaaggcgatggagtaacacctctatggaagagaacatcaatatcctcaagaacgtcgcatggatgaacgcgaagggatcatagtggactttgctcgctggcttgagaccgcctcaaaagaagccctagtccagtaaggaaagttcgcaacgatgtccgcgagcattgcaaaagcaatgcgtgtcaatgctggcgagcttgcacgcggtagaccggaggcagccgagcgtgttcagcaagcatctgagatgatggcccggttcgagcccgcctatcctcaatcctagcgataaacgccgaaatcatccgatttcggtcggtgtggaatttttcgcgccgcggatcttgaagccgaaactctcaaaagccaaattattttccagccagttgctgaggacagagctggccttgctggaggcgccgcctttcggcgtttccgtacccatgttgcttcaaggaggatatggctatgggaccatcttacgactacgcccccctgttccgctcgagcatcgggttcgatcgggtcttcaatcttctcgaaaacgctcagcgcgcccgctcgatcagcgactggccgccctatgacatcgtaaagaccggtgacgacggttaccgcatctcgatcgcggtggccgggtttgctcaggacgatctcgacatcacttttcagtccaacctgctgactgtcagcggcaagaagcaggaatcctccgccgatgcctacctgcatcgcggcgttgccggacgtccgttcgagcatcgtttcgagcttgccgaccacgtccgggtgaatggcgcggatctgagcaacggcctcctttcgatcgatctcgttcgtgagatcccggaggcgttgaagccgcggaagatttggatccagggctcaccagctctgacttcgtcctgccccgctcacatcgaggcgcgggaagcggcgtgatcgagcttgtccactaatgggcgccacgcgccgtgacacccaccaacatcgcgggtcggaaaggagagagagatgaagcccgatatgttcagagagccaatttgcattctcgtcggcctaggttttccggccgaggttcacagtgcgacggacgcgtatcgtcatctttgtgaatggccaatgaggctgagggataatgcgcatgctgttgccttgaaggcctgcggcgccgcgttgcgcggcgagatcgaggccgaaacggcgcgcggccttttcgcggcattcgctgaaaggcatgatttgctggcgccggaaacgggtgccatagccgcgtctcgcctgaggcgggatcaagatccgcacatccggtgaggaggaacccatgcatagtcaactgcaacgggccgccagccaagccgcgacgatagcgctggtggttctcgttcccggccttcagcttcggcggccgatcgacgtcgtccgtgcgccatttctctcgattgatgatcgtcgcgccttcctggcggcttgggcaccagacttgtaggcggtggattcgcaattatcgcagcggcatctcccgggaacgcccgccaggctcaatggaggaggtgcgggcggctccgggggagcttgatcacgacgctactgtcgagtgcacagcctgggattgacctcgatggcaccccagggacgcttcgctccaagctggcggtgaaaacagcgcgagccgcgttccaagtatatccatcgccatccaccacgtgctgacggtggtggatgcgtatcggctctcactgtcgcctagcgattacctatcatagggtccacaatgataagaggggcgagcggcctcgcccctcgaaggcgtcagccgatcggataaatcgggattacacgatcaccgatttctaacctgccttgcgcagttgcaatctcgatacgccggccgcgacattcagaccggtcccgacttcggcgctgagcggctgcaggccaaaattcttggcgttgccgccgaccagcgcgttcgcccccaggccgaggccaaccgaagctccggccgacgcgccaacgtaagtaccagctaggctaccttctccaactgtcgtcggcttggtgttgatcacgacccagctcaaataggacttccctgttacgccgacatcgatgccgagctttccgatcgtaccggtgtagcgttcgaccttgccggtccgctgtttgaactggcagtcaaccgttcggctggagccgatcagtaagccaataccaccggcgacttcgcaagaaagcgtacccagccgctctttcggctgcgaggcaactttctcgttatgctggcttttgccgtggcgaatatcggccgccgtggcaacggagccaaagacaagggtggtggccaacgcgagaatgagcgtcttcttcattttctcttccttgttcgagattaaagcgtgttaggtcgcacgaccggcttcacgcgagcttggatgtgggcgcgacccgcagaccgcaaagcaccggtttcgacgtgaagtcggcggcgatcgcgctcgccacgcatgcggcttcttccgacgacgccgtgccggctagcatgatggagccgtcgacgacttcgacttcgatctggcagtcttccaggccatgggtgtacgccaaaacgcacttgatcgcctcaatagtcgaaatgtgatccgcgacggtcgccgcgcttgcgaaagattgaaaaagcatcgggttgatccttattggacgaccacggctcgccttcgcggcgagccggtcgatcgcggaatcttacttcaacgcatccttaacggcgtccttgcctttaccgacggtgctctgcacctggccagcggccttgtcgaccttgccctccgcttcaagtttctcgttgccagtgaccttcccagcaacttccttgatcgtgcccttaagttccttcgcggcaccttcgatacggttcttatccataatgcggcctttccttagacagtgtttcgatcattgaccccgggtatttcggcgtcatgaagaaggagatagaaccgcgaccggaagaaattcagagctgaatgtactagtgcgattggtatcccgtgacctttttcggaggtgagatcacttttttctcggccttcgctcgggccgcttccgagattttggatcgggtgccgtgaagccgcgctcccgagcccaaatgaccgcggccgcccggcggttaacaccgatcttcgcataaagggaagcgacgtggtttcgaatggtatttcttgagagatgcaacgtttcgcccatttcggcatcgctttgcccgctacagatcagaccgagaatttcccgctctcgttcgctgagctccagcagcgctttcgtcggaaccgtcgaaccctgctttagggtcgcgaggcgctctacaatggagcggctgaaccacgacgtatcggccatcacactttcgatcgcctcgacgagttgagcctcgctgcgccggcgttccgtcacatcctggagtgcccagaccacgcactgctcgtcattgatttcgacccgctcggcggacacaagacagtccgcgaaatcaccgtccttctgtttcagccgcatgggttcgtttcgaacgaagatgttatcgcgcagcttctgctccacggctcgtctggcggcaatatcatcccaaagccggagctcaccagcagtccggccgacaacttccgtcagctcgtaacccgagatatccaggaaggcgtcgtttgcttcggtgaacacgaagtcttcgagccgtgagattgcagccggggcaggcgacagccgaaacgacttggagaaccgctcttcgctttgacgaagtgcgttctgcgcctttcgcctggcatcgaggtcggcaaaggtgaacagcatacaaggctcttcgaccacggaaataggttcaccggcgacaatcacaagccggtcgccaccttcgggcaacggaaccaaggcttcgcggtggcgtatcacccgcccctcgttcagtttagacagcgcatcttccgcggtttcgcagtttgagaatagaccgatggcttccacggtcctgccgatgacatcgtccttggtgaagcccgtcatctccaggaatccctcgttgacccgaatgaaacgctgatcgtggagccgacaaatcaggccgggggcaggattggcattgaacgatcgctcgaaccgctcctctgcttcaaaacgcggggtctcatctctgatgatcagggccagtgcgtcaggcttgtcgccagcgtcggtgatgaacatcgtgcgaacggtgtgcacccagaccatgtcaagatcggccgccggcgatacctcgactgtcacatcgtcgattgtttcgccagcgagaagtctctcgatcggatattggccttcctcgagaggatgattatttcgataccgcaaggtgaacgcccgacgatatcctcttgcgtcacgaccgagttcatcggtgttgctagcgcgatgcattgcgatcgccgcggcgtttgcccaggttatccgtccaccctgttcaacaaggatgataccatcactcaggcccccgatcagttcttggaggctgcccttgttgattttaggcggatcaggattatcgctcattttgtccctcaactgcatcggctgaccattacgttgcgtcccggctgaggatttaaagggtgaatgatcgacgttttgtgggataattcgagagttcgccttggcggggagattacgagctgtcctgcaacgcgattttattctcttagcctccaagtcgaatcgtgagatcggcgagtcgatttaacttagcccccttcaacatgggagctagtggtcggtcggggcgcagcaggtccaaacaagcaatatagggcgtttggaactaagcgcgagtgggcacgcggagcggtacgtgctcatggaaaggtcgcctccgggcggaaggaggcgggctgtagcggaccacgaggatccgcgcgctccggcggaggggaggccgcggagcgcttgtgaacgaggggaggcgacgttcaaggatagtcgtgacctgaaggtgggaataccagcctgaatcgaatcgtcatccgacgcaccattcaccgctgtggcttcctcgaccagtgtgcgaatgttctcgctcacttccgcgatccgaacttcaagctcttcgcgctctatgccagcgaggacatgggcagcatcctggccgaccgcaactatcagcacgacgcgcgtatcagcgccatcttcgacctgatcaagagggcttccgagttggcttgacggagcaatcctgtacgctgagttaacatgcctggcgtagctttcagttggcattaaccagactaattttccatgggttaaactggcgctgctaagaatcgggcattgcattggggccttgggcgatgaccaaccttgtcttgaaattcttgcgcgacagatcaggtaactttggaatcatcaccgcgctcattgccgcgccggtgatcggagcggctggcgtggcaattgactactcacatgcattggaaataaggacagagctgctggccgcggcagacgccgcggcagtcggcgcggtatctgaaaagtcggcggcggtaacacaagcaatgaccatgacatcggacggcgccattgctgtcggccagtcagacgctcgcgacatcttctccggccagctatcgcgggaggcggcttctcttccaatcaccgtgaatacgtcgatcgtgaaaacgggtaacaaagtcatttccacggtgagcttcaagacatccgtgccgaccacgctcatgcaagttctcggtcagaaaagcatcgacatgtcgggcagcgcgactggcgagtatcttaccgccagtttcatggatttctatatcttgatcgacaacacgccttccatgggcgtaggcgctacagccgccgacgtcgccaaaatgcagaccaacacaactgacacatgtgcttttgcttgtcacgacatcaacagcggatcaaagagctactataacctagccaagacgctcggcgtcaccatgcgtatcgacactgtcaggcaggcaacgcagcaacttacgacgactgcgaaaaccaatcgtgtttcgagcaaccagttcaggatgggtgtctacactttcggcaccaaggccgaagacgccaagctgaccacgatttcgagcccgacatacgatttggatacagttaggtcatacacggatgccgtggacctgatgacgatcccatatcagggatacaacagcgaccaaaccacgagctttgactcggcccttacccagatgaacgccatcattgatacggcgggaacagggagtacggccacggatcctcaaaagatcctatttttcgtggcggatggggtcggcgatagctacaagccgtcaacctgtacgaaaaagacaacgagcgggcgttgccaggagccgatcgatactgcgttctgtgccccgctcaaggctcgtggagtgaagatcgccgtgctctataccacatacctcccacttcccaaaaacaattggtacaacacctggatcgcgccatttcaggcggagataccaacgaaaatggctgcgtgcgcgtctcctgggctttactttgaggtcacgccaaccgatggcatcgcggatgcgatgaaggcgctgttcttgaaagtcatcaggactccgagattgacatcgtgacttggtgatcgattggacccgacaccggagaaaatgggtcggtcagcaaacgattgcgcgaagactttcatggcacccgaataaacggcgttatttatttcgatgtcctcaagcgaatatttcgtcgagttcattcgccggaaaacctcaataatctttccccgtggaacggagcccagttcgcgtacagctataaaccaggggacagcatacatcaggcttgttgaagatacagaacgtacgaaggtcggaaaagaatagccgctgccagatcatatctgccgatcgcaagacgatccgttaccagtcgaaccgaccgttggagaccgaattgcgagcagggctgcgcgagttggctaatgagcgaaggcgtttcggctaccgtcgactgttcgtcctgattcggcgtgaaggagagccgtccggcgtcaatcgcatctatcggctccatcgcgaggaagggctttcagtagacaagcggaaaacccgacgccgtactgtcggcacgcgtgctccgatcgtggtcgaagcgaaggcaaacgcccgcggggcgctggatttcgtccacgaccagttcgcccgcggacgggggtttcgtgggctcaacatcgtcgatgatgtgacgcgtgaatgcctggtagcaattccagacacctcaatccccggccgccgtgtcgcacgggagctgacgatgctgatcgaacgaaggtgaggggcgaaccaaggggtatttagctaaatatttcgcatccaaacaccctcgcattagcaagaggcgtccgccgccaaagttttgaatttggaagagtgatcacccaagtgcagtcccattccaacgccacctggcgcagtaggtaatcgagcggcgcattcaagcaggctagtagaacgtcacatcgagagcgggatcgtagagccgccttgttccgcgtaaaacgtcaacgagggctcgctcgaaattcgtacgtcagaaaaaaccgtttaacttcagtatcttgatggcttcgatcgtcgcccgcagtcggtcctctgactgccgattgccgttatttgcatcgggatgatgtagcttcagccgctctttgtatcgttgtctgatgtcctcaggcgctgctgtttgttgaagcccaagcgtttcgaaggcctttgcctcaagtggcttgagggtccgcgaagatgttgccgcgttctgttggctcgccttgcctcgtgctctcagtgatttcgctgatcccgacgggacggacgacggcagcggggtctcgaattttggctggtccgttcgtacaccgcgcgtgcctatcttaccagcagccgcatcgagctggtaccttgctatagcgggatccgaatggcttggataatagctgtagcccttaccgtatgcctttgaatgctctagacagaaggtgaggtaaagtccctcggcggcactgcctaccggcgctctttgagttcccgaattttcgcagccgtcccattggcacttaggcccgctcggctgggtgggcttgtcacggctgctgcggattggcctcaggccaacgaagattttcgaatcattcatcggcatcatatatggtggacgaagcgtcctcagcaaggtccgagcttgttaggaaactcgtctgcggccattcgcgcgttctgatcattcgaccttcgcaggtcgccagaacgtttcaaatgcctttttcaggcgctcacctgtaaggcttggtcaaatgtgtcatttcttgatgtgtatcacagttcagatcaggccgactaagggtacgacttagcacgtgcccgtgacagcggacagagcagatcagttccagttgggtgcagacgtcaattgatcggctgctgccgtcggcgcgagttcacgccacggttggaaagcaacagctagaaccgcagttatgcacagaaatcaacagcctcttaaccggcggttttgagacggaaagcaacactcacgaaaccgcacgttagttccataagctatcttatgcgatcttttcatgtagccgcaaagttagaatgtcctaatttggcaaagttagagtgtcacactccccgcgtttgataacgcggagacgagcagatgggattgatagcgatgagcgagcgggatctgcggcggatcgaggttttgtcgaaggtggcggctggccgtatgacgagggtgacggcggcgcatgtgcttgacgtgagcacgcgccaggtgcgccgattgttgacccggatgagcattggaggagccgcatcgatccgccacaaggcgatcggacgtccatcgaacaaccggatcagcgacggcgttcgggattacgcggtgacgctggtccgggaaagttatgcagactttggcccgaccctcgcgtcagagatgctggcggagcgggatggattgtgtgtgtcgcgcgagacgttgcgtcattggatgatcgatgccggcatctggttgtcgcgcaagcagcgccggaccttccatcagccaagattgcgtcgcgaggcttatggcgaactggtgcagattgatggctccgaccatcgctggttcgaagatcgtggcgatccgtgtacgttattggtgttcatcgacgatgcgaccggcaagttgatgcaattgcggtttgtgcgatcggaaagtgcgttttcctactttgaagcgctagggctttatttgcgtgagcacggtgccccaatcgcgttttattcagacaagcattcggtgttccgagtggcaaggaaggatgccaagggcggccaggccatgacgcagttcgggcgtgcgctttgcgagctaaacatcgagattctctgcgcaaattccagccaagccaagggtcgtgtcgaacggatgaaccggacattgcaggatcgcctggtcaaggcgctgcgactggccaggatcgatgacatggagactggcaacgcgtttctggcgagtttcatgagccggtataatgcgcgattttccatcgtccctgcccgttgcgatgatttgcaccggccgctgaatctggcgccggatcgattgaccgagatcctatgtaaacgcgagcagcgttacgtcggaacacagctgacgttttcgtttgaacgcaagcggatcatgttggcggagaccgacgtgacgcgtggtctggttggccattatgtcgagacctatgcctatgcggatggtcgcctcgatgtacgctggaaaggatactccctaccctatacggtgttcgacaaggaccagcgggtaacgcatgcggcaattaccgagaacaagcggctcggtgatattctggcttacgtcaaggagcgtcaggaccagcatgtgccgccggtcgtcaagaccaatagcgagaagatcggttaccagccacggggtcgaaagccgggacggagcacggatttcatgaatgatcccgcggtgattgcgcggcgcaaaaaggcgctgttgaagcaggcagccgcggagtgagctgaaggtcgaataacctcaaagctaaagccgaagaggtgtgtttgccacccgccccgatctgatcttgcaagcgggattagccgctccgatcggggctggtcggtgtgccgtgtagcgaccagtcggacatttctactttgcatatcggcggacatttcaacatggctgccacatttcatgtagccggggcagattcaattttcaaatgcaacgaggacaataatggccatggtttcaggaggatggaatggcccgctcttttgtgcagttgagtttggatgaacgccgcatcatcgcgcggatgcatgagaagaagatcagtcaagcggagatcgcgcgcgcccttcgccgcgatcgctcgacgatctgccgggaactgcgacgcaatttctggcgtgatcgtgacgttccgattgccgaaggatactggcacgtcactgcacatgggatggcggtcgaccgacgccgcaaataccgcaagctgctgcgggatcctggtctgtgtgccgccgtgatagatcgcttgaaggatggctggtctccggaacagatttccgggcggctgcggcttgccggtggtgccgccacccggctgagccatgagacaatttatcagtacgtctattcgcaggaaggccaggatcagcaattggcgcgtcacctgcctgaacgacgccgcagacggcggccgagatatgcacgcaaaccaagaaacctcgtatttccaatggaatgcgccattcgcaacagacctgacatcatcaactcccgaagtgaattcggtcactgggaagcggatctgatgatcttcagaaaggagcatggcgccgcaaacatcgccaccgtcgtggagcgcaagagccgttacactctgctgtttcgcaacaatgaccggcgctcgaagccgatcatgaaccagttgatccggcatctcgcacccctgcccgtccaagccaggcaaagcctgacattcgatcgaggactggagttcgtgtcatggcgcgagctcgagcacggcatgggaacgaccgcctggttctgcgacccccaggctccctggcagaagggcacggtcgagaacacaaacaagcgtgttcgacgatacctgccgccagaaacggtcgtgctggatgtcagcgatcaggagatccgttccctgtgtaacaggctgaatgacacgccgcgcaagtgcctaggatttcaaacgccaagggagatgttcagcagacctctattggatctggaaaggcaatgtgagtagcttacgaagcaacgttgcattcaatctggagtcagcaatcgtacgttaaatcaacagcgaagcctgagccatttgcaccgctttctgacctaagctcgcttgcggagaccatagacgttgtttcatcgcctacgccacgtgcagcttaaaaattgtcgccgagtgagctggaaggaagtttcgcttgaaagccgtcacatagtagacgagaaaggtagtgtaatcgcggacgaggaagtcactgctctttgtttttgaaactccgagccattgaagattgctacgccagttgcggcgataaccatttgtccaaccacgatccaatcaccatttcggagattggcgtcgattagaagaaacttcctggagtcaggttctctcatcccctggcggactttctcccaaccggttgatagctgaagccatgtctcgtgacttcggcgatcggatagatgttgcgcagatcgaccagcaccggcgtcttgacgagcgtctttagccgcttgaagtcgagtgcgcggaactcttcccattcggtgaccagcaccagcgcatcggcgccttcagcgatctcataagggtcgctgccgtagacgaccgggccgagcaggtctttcgccgcatccatcccctcgggatcatagacgtggacggtggcaccaccgtcgagcagcgcctggatgatggtgatcgagggcgcatcgcgcatgtcgtcggtattcggcttgaaggtgaggccgaggatggcgatcttcttgccacgcacgttgccatcgcaggccgcgaccaccttgcggcccatggcgcgcttgcggttgtcgttgatggcgacggtggtctcgatcagccgcatcgggctgtcatgatcctgcgcggtcttgaccagcgccagcgtatccttggggaagcacgagccgccgtagcctggaccggcatgcaggaacttgtcgccgatgcgcttgtccatgccgatgcccttcgcgaccttctgcacgtcggcgccgatctgctcgcagagatcggcgatctcgttgatgaaggtgatcttcatggcgaggaacgcgttggcggcgtatttgatcagctcggaggtgcggcgctcgcagaaatagagcggggcttcgttgagatagagcgggcggtagacttcgcgcatgacctcgatggcacgcggctcctcggtaccgagcacgatgcggtcggggcgcttgaagtcggtgatggcggcaccttcgcgcaggaattccgggttcgacacgacctcgatgtccttgtcgggaaactcttcgcggaagatgcgctcaagctcatcgccagtgccgacggggaccgtcgacttggtgacaacgacggtgaagccttcgacggatgcggcgatttcacgcgcggcggcatagacgtaactgaggtccgcatgaccatcgccacggcgcgagggcgtgccgaccgcgatgaagacgacgtcggcggcggccacgggggcggcgagatccttggagaaatccaggcgtccggcggcgcggttctgtgcgatgatggtgtcgaggccgggttcgaagatcggtacctggcctgcttctagcgcgtcgatcttggcggccgacttgtcgacgcaggtgatatgatggccgaaatccgcgaggcaggcccccgagacgaggccgacatagcccgagccgatcatcacaatacgcattcgacctcacaattccggggcgatgaagcgccccaacttagcaacgagttaaactgtcaattgaatgggcaatcgccttctgccctcaggtatagaccctaaaatagtccacgcgcatatgcgtcaacttatcctcgtcccgcaaaggttgtggaaacggcacgtcggttctcaacgcaagcgtcaaaaggggccagaacacgtcaaactcatcgtccagccgttcggaccgtgtgatcggccagttcgcaacttgccccgtcttagtatccaccactggtttgcgattgaagtacgggacgcaccgtgtgtcatcgacgagcatgccgtagaggcaatagcccgccgtcatgtcgactgacgtctcaacgcccgtgcttctgctacttgcgtccgggcctccccattcatgaagatatgtcccataaacagtcggctcccatcccttgtgctccacgacatcgagctcaatactggttttgggctccaggatactgcgaccgttcagcaaccagaatgccggccaggttaggggatgacgcggaaacaacattcgggcctcgaagtaacccttccgccagccttttagaaccaccccatccttgcgtgcggattggaggcttccggaaatccactgaaattcgggcagagagttcccataatacttgcgcacgtccatcggacggccaatgtatttggcggctatctgcagtgccttgccgtcttcggcagcatcgtcatcgacaatcgaatatggattgaacccttcctctccgtgtcgggtcgcaaaggccgagcggccatagaatccggtgccgtctgtggttgctttcggcccggcgttccagattgaccagtcgagcgaattgaatcgatcctcgaacacgatgttcctggatgccgtcgggtcatttgtcgttgccgcttcggatgaaaagcctccacacggcatcgctagcaaggtggatgcaccttgaagaaaccgacgtcgatcgaatagttgcatcatgtgcgcgccccgttccaacggttgtttctatgcaagctcctggacagccgaacgaagcgcctgcgcgtgaatttcaaccacgcgttccgggctgtatctttcgatgaaggctttccggaaatcagaatgcgccttttcgctcgctatgttgtcgcagtaatagatcattgcctcgaccaacgtcgcgccaccatccaacgcgacgagccggccaagacgactgtccactaggatatcgctaggcccaaagtcgcagtccgtggatacgaccggcaagccgaaacgcaatgcctcgcatatagcaagcgaccagccctcccatcgcgatgtcgagacgtaaacatcgcttgtcgcaagagcgggctcagggctgctaggatagtgctcgatacggacaacctcatccaacccgagctttgagatctcagcgcgcagactggcttcctcgctgccgtatccgacgaccttcagtctgacgtttggacgaaccttgacgagcctcgagaacgcatggaggagaatgtcctggcccttttgaaaggcaaaacgccccacattgacgaatgtgaccacgtcggacgactggtcggaagctgatccattgtcaagatcaaaagaccgcaccggattaggcacccacacttgtggtgttttgctgttgaacatctccttgaaagactccaactgcctcggagaggtgccaaaaacatatgacactcgagacaggaaataggtccgcatcaaaaagaacagcacctttgccttgaaatgggccgcctcgcgcttcggattcccgtgcagatgcacggcaaaccggcgcttcaggcctaggcaagccgccatgcacatgacggtcggctcgatttgcgggacaacgacgaggctgtaatctgtcgccttgatgacgctcctgaatgtccggatcaattcgatcctgctacgcgcgacccggtcgatactgcgatagccgcgtgcttcggtggggcggtttttatggactgatgtgtaaaggacatcaacctcgaaatcatccggatatcggtccgccagcatcgcgcagacggcatcgaccacccgctctatgccggcaaacgcgctcgttccaggctggatataaaggattttaaggcggcgcttcggtttatcgcgcacgcttgacccaacctgaatgttcattcgtcctccgggccaatacttggctaaacacgagccgccggcacaggcagatggctttcacaaagggttttcactcgacagttgtcgccgagaccatctcaacgttcggcaggcacttgctgtgatcgtcgccacctcggcggcggcgttgaacgccgtgccaaagaccgacgatgatggttataatgcagcctcggcattactcggatgtgacagttttatagacaatactatctcaataaagatgccgtggctgaggcgttattttctagacgtcttgcactgcacttgttatgctgctttgcaacataatctgtgcggagaaggtttgcaagatgttaaagtctcagcccctgctaagcgtcatcattacttgctataactacgaaacgtacatcgatgaatgcattcaaagtgttctctctcaggactatgataatctagaagtaattgttgttgatgacgggtcgaccgacggctcttggagtaagatccagaaatatggtgaccggatcaccgccattcgaggcgaaaacagtggcccgcttaaggcgtgtagaagtggcttgtcacgatcgcatggcgccttcatctatttccttgatgccgatgatgctttgtgcgaaggcgcactgacggaactagaaccctatctacgatctgacgtctccaagattcagttcatgctactgcccgtcgacaaagacgggaaggccattggcaatccgtttcctgaactgcgtagatcggccaactcccagcaacttatccagtccattcgacaaaagggtcactacaatacgccgccgacatccggaaacgtctatcgtcgggatgtctatgacgggttgggcgagatgacgtatgagcgggcgatcgacggggtaccctatcttctggcgcccttcgtcggagaagtcatctccatcgaccatccgcttggccgatacagaatccacaacgctaacctctcgtccttttccgacatcagttccaaacgcatgaaagcatatgtcgagcgttttatgggtcgcctccaccatctggccgagctcgtggaagcaaggagcgccacggccgccaaagtcaacgtgcgtaacgactatgcctacgtcacggaattgaacacgatgagtctggtcgtcgatgggaaaagacccagcgttgggcagatctcggcgcatatcggcgcggtcgtgcgcgaaaattctggcatgaagcgggttgcactatgcctattcgcagttggactgttcgcacttccaaatgttctggcgaagcgcctggccgccgtcagaatcgatccttcccgcgcgcgtcggatgcgctcgcgcctcaagcacgtcttttcgctcgcttgacttcaacctacggttagcttgccatcgctggggaggccgccgagggcgcccttgcctcgttatagacctcaagtgtttccctggcgacacgttcaatcgtcagatgctctattctgaactggcttttctggcgccattcggacaggcgactgggagcttccaacaaatgtcgaagcatgtcggcaagggcggccggatcacgcggtggtaccagaagaccggctttgccatgttccaacagctgtggaattccatcgacagacgaaccgacgacagcgcagccggcctcgcgcgcttccgacaggacgagaggggccggatcggcgtgcgacggcaaaacgaagatgtcggcgcccagcatgtagggatagggatcggtggtcgagccaacgaacgtgatgtcgcgcgcactgtccaacgccgcggctctggctttgtattcctcgcgtagcgggccgtcgccaacgatgtaaaggcgggcatccgagtacgatttgtggacgacttcaaaagcatcgagaagatcgggtaggcccttgcgcgggtggaggccaccaacgaataggatgcttggggagcgcagtggtttcggctcctcgctgcggcccgtcgaccggctcgatccgattgtgccgtttagcacgaccttcaactttgagggacgcacacctcgtcgttgcatcgaggcgccaacgacgtcgctaacagcaatgacgcgggtgccaagtcccatcagcgttgcgcttttctcgaactcattgtgaacagtggtaatcagcggaacaccccgcaacttgcagatcgggaacgcgatcactgcgcttgtcatcatatgcgcgtggacaacatcgacgtcatatctgccaatcgcacgatgcaaaccaaaaagcgcccttaaaagatgcggaattttccgctgatgtgggatgtagattgtcttgacaccgtttgcctttagcaggctgtcaaagtcgccaccctcgctcgccatgaagacctcatgcccaagctttacttgcgcacatgcgaggtcgactgcggcatggacatgcccgttctggcgccgcgtgtgattgagaacatgtaaaatccgcatggtcgacctcgtgtgacactctactgagaccctgatccgatctccgttgatcgtagcaatctcattgcgatgagacggcattttcaacgtccaacgtcgagacccgggccgtcggctgatagttgaagccgccctggcggccgatcgattccacgccgaaggctttcaatctcgagatcgcccgggcagcgtcctgcgcggcacctttagcgtagatcggataggcgttggcgagcgtatggcttccttcgagcttgagatcgccgaggaacagtcgattggcattggcgtgccggcgaaaatctgcttcggcctcttcgcacgaatcgacttggccggcgatgacctcgactgcaaaatactcacgaccatcgacgcgaccgtaaaagtctgagtagaccgtcaaacgcttccatgcaccctcgtgtgagaaattgtagatgatcgcctgggaaaagcccttgtcgccggaaaagctgaagtagagcgtaatcagtgtgatcgtcttcaatcccgaggtttgaacgttgccgcatatgcgttcggcaacgctaatcggaaccgtcgacacgactcgctcggcaacaagcgtttctcccttgtgcaccagttcatagcccgtggatgcccggctgaggtggagggcctcagccgatagtgtgaacaccacaccacgaccttcgagcttgcatcgagcgaggctgtaaagcgcttcgaagccttctcgtggccgcgccatttgacgattctttggaccgcttgcctttttgcgtttcaaaaatcgacggctcagattgatgatcgaggcatattcggagatccaaagcatgcgttttcgtgcgagatcaaggtcgatctcttcagcggcaataccatagaatcgctgcatgtaagtccccagtccggatcggtgtagcaagtaagcgccgatccagtagcgtgcgaagtcacgcgcgttttccatgcggcggcgaaacaggcgcgcataaaggacagaagcgaaaatacgcactacgccgagaggcccggctgctagaatgtcgtcgcgtatcgaaattggataaagcgtgattttcccctgcggatttagtctcccccagctcggcttgatgtgtacgtagcgttcaaggagctcgggaaagtgtcggagcaatggagaatcgtcttgaaatatcaggctcccgacatcaaaggtgtagcccgcccgcgacgaccaatccatgtggtttccgcccacatgggagtactcgtcgacaacggcaacccgcttgccttcccctgaaaaaatcgccgcggcaaccaggcctgaaatgccggcgccgagcacgatgacgtcaaaatgctgcactgcggacatgcgtgagggttgatggctcacatcatccattgttcacccccgaactgctatcactcacgaaagtgatacagtataattcaattgaaaaagcgtcgttatatcaatcgatacgacgaccaaagaatagataggtaaataaattttgcaactattctgcactgcaaaataaataatttttgcacttgatggaattaaaataatgctgcagaatttttgcaattgcgaattcactgatccagtccttgttgcagcgcatccacagcaacagtactgtccaatgacaggaacggggccgatcgatggcaaagggttattcggtgccacggcaaagcctcgcccatctgctgcaagcacccctggacggtatcgacttgatatcgacagatgtgttcgacaccctcctcttgcggcagcctcgatcccaaagatcgcgcttgatacaagccgagaagctcttttcaggagtgctgcgagatgagggatttcacatcagcccagatcatctgtttcgcacgcgccaacttgccgagcgctttggttaccgcgcgctcaatatcggtggcggggccggagaagttcggcttgtcgatatcctcaaacgtcagttcgcaattctcggcctgccggagcgcttcatcgagaagcgcatcgcgatcgaggtggcgatcgaaaagcgctcactgtcggcaaaccagatgcttgcccgagtgctgcgccttcatcgccggaccggcattcgcattgttgcagtctcggacacggcactgccaaagcgccaactgtcggaactgatcaatcatttccacgggcccggtctgatcgacgatatctactcgagcgccgaggtcggggaaagcaagcgttttggtcatctcttttcgcatgtcctcctgacggaaggcattgcggcatcacgtcttttgcatctcggagacgatcttcttgccgactgcacggtcccaagaaccatgggtatccacacgctgcatcttcctaaaggacgccttaggcgcctcgccacgcaagccgacggtgccaggtcacaagcagcccgtggcgttcgcaataccgtcatcaagcctgcccgcgtgccacatctcgcagatcgggaaggcttcggccgagacgtcttcggtcctgttgtcgcgcagttttgcttctatatctggctctacgcccgacaggcggagatgaaaggcgatgcggctctcctgttttgtgcgcgcggcggtatcggcatccgcgcagccttcgagaagctggtcgccaaacttgatctcccgattgcaatccgacgtgagaatattctcatttcacgcctgattgccgcgcgatcagcgctcatccagcaaagccccacagttcttgatgagttggcacgtgaattcaagaagaacacatttgccgaggtagccgacgcccttggtggcgcaacctacagactgtccgacgcctggcaacgaccctttgatccagcccagttctacgggttgctggagaccaccgaaggcggccgcgtgcttgctgatatcgcgcagcagaacgcgctcttcgagcgccatctggcgcagattgccggcgatgccaaacgcatcattctctgtgacaccggtctctatggaagcacccagcgtctcgtcgcagctgggctcccccagcgcaaatttgaaacgatccagttcgcgcggtgcaactacaaaggcctcagcgaagatcacttctcgcgcgttacgggtttggtcgttgaagaagacctctataacccgctacggatcgagacggtgattttgcgttactggcagatcatcgagagcctgttcgaaccagcaatcccttcggttcgccatcttagcgagtcggacgacggatccgttcatagcaacgccggtccgatcgcctatgggcagcttgatccagcgcaggtcaaccccttgcttacgggtgtctttcaatacatcgatcgtgtcgaaagcggtgcaagggtcatgtcggatgcagaccgcgcttggcggagacttaagagggcaatcaccaagcctgacgcgttcgacattatagcactgggcgtgggcgcgcgatccgtcgatttcggacgtgccgacaatgtccacgttctcgagaaatcgaacgcacccaatctggccaacaagctgacggagatcaagtcacagctgtggcgggaaggtgcgatcgttcgagactttccgttgctcaagagcgcgttgctcccagccctggagatggtccacattatcaggcaggtgtctgcacggctcaaatagccgcgccaagacactgtccacagcaagtcagatttcagcacagtgattaagttacccggcatgggggcctttcaagattgcatggccccgcacaatcacagctttacagcctggcgcagtgaacgagcgcttgaacttggagtaagagatgcttgcggtaaagacgatcaagggagccggatggctggtcttttcccgctttctcggacgcatcatcgactttttcaccctgctggtcctcgcccgtgtgctgacgccgggcgactttggcctggcggcgatcgccacatcgctcgtcgtggtcgttgatacggtgcttgaggttcctgtaacgcaggccctcgttcggctcccgacaatcaacaaatcccaccttgataccggttttaccgtaggcgtgatgagaggtgtcgttatcggagcgatagtcctggcgatcgcgtggccttattcctggatcaatcacgacagccatctcgtgctgcttgtcgctgtgctaagcctcggcccgatatccagggggctggccagcccagcaatggtgaacttcgcacgggagctgggatttcgtcagacgttcattctggaatcatcgggcaagttgaccgccgcgctcgttgctgtcttcgttgtccttgccggtggagcgtactgggcaatcgtcgccaatttcgttgtcgcctcgcttgcatcaacaatcgtgtcctacgtcctcgcgccctaccgtcccgccttctcgctcgcgcgtcttcccgacttcgccggctttatcggctggttttcctcggcacagctgatttctgcattgaactggcagttcgatcgatttcttgtgggagcgctggcagatcgtccgaccctcggtcgctatgcggttgcaagcgatgtcgcggtgatcccaacgcaaagtctgattggcccggctcttcagcccgtcatggctgctttttcgcaaatcaataccgatcgcgtccgcgtaaggcaggcctttttgaaggccacgcgcatcgcgatgatggtatcggcccccgcctgcgtgggcatatcgctgacagcagatctcgcgaccgatatcctgcttggcgcgaaatgggagcatgcagcacccctcctcagcctgctggcgttggccgttgcgccaatcccctatgttcagacactctcgtcagtgagcatcgcgctggatcggccgcaaatcatctttcggctgaacgctatagacctcacctttcgcgtgctgctgatctcgataggcttctacctggcttccgtcactggcgtcagcgtggccaggatcgccttgtcctcgctcatgtttgccttctaccttgctgaagcgcgccggctgctcgacgtttcctttgcagcccaactcctcaatatttggaaggtggtggttgcggtggctctcatggctgtggccgtgtggcttttacgagaagagcttgccggaagaaattttccgcacgtcgtggagcttgggatcgctatagccgccggtgcagccacctatgccgcagggctcctgctccttggggttagggtggcggcaggtcgcggccggttggcgctctacgacagatattaaggtactgctcagcaggcctccgccgtcaatgggggcgaaaaagcactgccaaaccccaaattgcgcgaggcagtaacccggcctgaggcgcttatcaaagcgggaccagcttagagttgtcagtaccggagcaatactccccattcgtgccgtttcatcttccccaggtgctgcggccgctggtcttccggggcgcgcgccggaagaccagcggcgcgtcatcgccgatactccttccgatggtcggaagggggacattggtgatcaagctgagggggacgatcatgatcctggatctgcatcagcaggggctgacggtgtcggctatttccagggaaacaggcattgatcgcaagactgtgcgcaaatagattgaacgaggccttgaggctccggcttatggaccgagaaagcctcgcgcgacagttatcgatccgttcgcttcatcggactgattggcatagtcttctatgctggctggttctccaggtgaggcgacggaagcgcgaaaatcatgcataggcggatgatggtcggatcaagggcgacatcaacttcccgaccgcatacttcaatcgcaaaggtcatttttccgagcgcaacaaaaacgcaaggctagttcatataacgcgttgacctgacgcattgctttgagctcgcgtcgatctgtatgccctacatcaaggagacgcgcggagacaacgacctggccgagtttggattggcgccattcgacgggcaccttcaccgtcgtttttgatggtcgctcggtgacaccatcctccccccggctcgggcggaggtcggcatcggtgccgtcatggcgccggtctataccgcaatgcagcagcgttcgcatgccacaatgacccgacatggatttgggtgctcagtcgctcgctgtcgcgtgacctgagacagtctcagtcgtccggccgcaggaaaaccactagccttagcctatccacgcgtacggttgatcaccgttccaataacatttgctcctgcacggcgcagcaactgaaccgattccgatatctcctcgatcgtcgtgtgcccggcgcgggcaacgacaagaacagcatcggcatagcttgccaaggcaagcgcatccatcgagtggcgcagcggcggcaagtcgagcagaacatcacctcgagaccgcgccacttcaaatatgcgccgaacacgaggatttcgaaagtcggtgaacagattggcgttggcgtctcgcgagtggattggcaacaccgcaacgccactgacttcctcaaacgacaattgctccggcataagcccagcaaaggccgccccggccaaggaaagagccgggccatggtcctcaactgcgtggagatcggcgccatccgaagccttgaaaagcgtaacctgccgaccgccccgactgatcaactgcgcgacactggcacataacgttgacaccccggcacccggggtccaaccaacaatggcgattacgatgcttttttcgttccgcaggctcgtgcacgcgatttcaatggatgtacgtagatctcgaattgcggcgacgtacttctgttgctgagggcttgtaatatgccagggaacgccttctgccccgggcacgtcagggatagatcccaaacagcgaagatcgacttcgtgcgccagttctttagcgctgcgcacgcgccgatcaagtgccatgcgcaggaccaccacgccggaaccgaacaaaagtccgacaacggcgccaagcgccatgataagtgatctgcggggcgccgacggtccaagcggcggcaaggctgcaccgataatgcgggcgtcggcgtcaggagttgcgatcgccggcagggtgccgaggtgcatcgcttcgcgcgctgcatcggactgccgagcaagcgaatccagccgcccttgtagggcctcggtgcccgcgcgagcaatctgttccttgaatgccacggtctggtagatgtaccccgaaatcgtcgcattggcgacgcgcgccggtagcttcgggtcggaagaggaatagtcgatctggattacgaaggactgaccgacgcgccgcgcgttcagccgtgaaaagaacttcagaaaggctgcccggtccgcatcattgtcaagctcatcggtggcactggttgcacctgacgcggtgccggtggtgtcggccacggtatctgccggtctgggcccgagtaggtcgaacaaccgcgcgatgaagcctggctgcttgccagcaagctccggatcgcttttcatgttcaggctctcaaaaaccgccgacagaagacgctcggactttatggtctgaagctcgctgtcggcacgattgagatcaagcgtctgctgagcgccaaattcccccgaagaaatcaccgattgacggggctcgagcagcagtgtcgcggtcgcctggtatgtgggtggtaaagagtaggcgtagagcgcggaaacggccaggccgaccgcgcagcaaatcgcaagcgtggccttgtggcgggcggcaagttcgataagagcgcgcaaaagcgcgattggcccatcgccagccacgttggcttgcgcctcattttcccgccagaacctcgatgtgacgtcaattgggcgaggtctgttgaacattgttctgctcctagcgttcatatggcttggcggctggtcgaggtgtctcgatcgctgcagcgcgttccggctcaaggcgccctcgtagggcgtcaaatgcagccaacagattgccgcggacccggccgcgtcggtcaatgaatggctcgggccagaaggctccgataaaattgctcgcggtattgcggaagatttgaccgacgactttgggcaggctcatcgtgcctttggtcagcatgtaaagcgggttgatcacctgcgaatagccaagccggtcgccactcacacgcccgccttttacacccatatgaacgccgaaggatcgccccgatttgacgagccggccaccgcgcttggcaagagcagcggcgaagtcgcgatcctccagccagccgtagagaaccaagcgctcatcgaacctgagatctccgatggccctgaaccggaaggccatgttgcaaccatacggactgaaccgctcctgccacgttgcgtccgatcgtcctgcctcgaccaggtccaccgcctgctgaaacgaaattccaggtcccttgatcccatccgcgatgacgttgcctgtgtagccgacaatctggtgttcgtcgcgaaaagtctggatcgcagccgcaagccagcctccatcggcgacaaaatcgtcatcgaagaaggcaacgatttcggtatatggcgctacatgccgcaaagccgtgttgcgctgcgcggcaagacctggaggcccagtgatgatcgtcacgtccggatggtcgctgaggtctccggcatcggccacgtctacaccggagacaatgatcttatcgggcgccacggtttgcgtcgcgagaaatcgacgaacgctagcggccacgacatcgggacgcccgcgcgtcgcgaagatgacgcttacacgtggcaggcttggatcaacggtcttgtgcgcgcggatttcggccttcggattgtccagcaggtcgacatatccgcgcgcagaggtctcccatgaaaactgacgtcgctgttcgtgaccagcacccacgagatcgcaacgtagctgctctgaggacgcaagggctttgatctgctcgatccactcgcgaggctcgaacggagacgccgcgagcgcggcttttccatagacttcgggcatgctcgcactgtgtgacgagatgacaggacaggatctggccatcgcctccacgatcggaagcccaaagccttccgctagggaaggaaacgctagacacaaggcacggtccagcaagtaagccaaatcatcatcggagacacgtccgaggaagtacacattgctgcgatgccgcaaggtttgttgagcaaatatgccgtcacctccgccggcgatgacgacatcaaggcccatctcgtcgagggcttccgcaatgtcgatcagaagagaaaggttcttatggatcgcgcgcgacccaagcgccagaacgaacggtcgcattgtcgatctcgtcgccagaaatgtcggcgctgcccgtgctagcgaaggatcccaacgaagcgcatgctcgtgtccgtttggtagaaccgcgatctctgacacgcgaaccggtagatatcgggccagctgtcgcgccgcagcgtgcgacaccgtggcgacgcgaagtgaacgccgaaccaggagtggttgaagcgtgtgatacaacgcgcgaaacgaccggctgtagctttgcggtgctgcgaaaatgttggcatcatggatgcagacaagctgatcgcccttaaaagccggggccgtgttgcaaaggttcaaaagcgtgcggttgctgcttaacaatggcaactcgacttgctcccaagcatgaccggttaatcgcccgcgtgtctccgatcgtagtcgttgcaaagggagttcgccggaaggctgcggcgcgatcaggacggcgtgctcggcgccggcaagcgtgtccatcgcagtgacgatgtttcgggcgtaacgctggacacccgtgagctcctgggtgaggaagcgaccattgaccgcgacgtctgttacgctcatgcacaatctcccggcgaccatcaatccgcgtcttgaccacgcagcttgacgcacgtgccgtgaagcacgttgcaacaacaatcacgaaggtggaaaggcgcggtgccgcgccgtgtaatgtcagtagctgccgcgcgagcgaaggaccgccggaacggttttcagcatgattgtcagatcgcccagaaccgtctgttccgcgacgtagcgcacgtcgagctgtacgcgttcgctgtaactggtgtcactgcgcccgctgacctgccacagacccgttacacccggacgaacctggatgtaatcagcataatgaatgccatagagttcagcttcgccggcaacgatcggccttggtccgaccaggctcatctgaccgcgtatgacgttcagaagctggggaatttcgtcaatgctgcttttacgcataagcgcacctagcggtgtgacgcgaggatcgtctcgcagcttgcgcgtcgcgttccattccgcgttgagcgaagggtttgccgccaagtgccgatggagaacctcgtctgcattcttcaccattgtcctgaacttcaggcagggaaacatgatgccgtgccggccgatgcgcctatgcgcaataaagatgggctgcccctgcaagacgagaagtaccacgaccaacatcgcaatcatcggcgccaagacgacgaggcctacgactgcgattgtcgcatcgatgccatatttgatgccatcgagaatggcggaacgttttccgctttcaaaaagatcggaccgtcgggatgtcgtcctgcgagcgggccgcggcgccttgttgaaccggccgaagttccgactgagatcaatttcactcatctgcgtactcccttgcaatagttcggaatgtgggcacgtgcagacaatgccttgtggcatgcagaagaaagttaacaagtattaaacggtttgacaataaaattattgcgctgcactatgtaacggtgcaatgcgggaaataacgtcactaactgttcataaaactgtttttcgtgcctaatataaatgccgaacgtctaattattgatcgatatttcggcaagaactacacccgcaatgcaagccacgatgttttcgatcgatgtatctcggggagcttggcgtgcgcgtagcaattattcactactggttggtcggaatgcgcggtggcgagaaggttatcgaagccttgtgcgatatctttcccacagctgacatattcacgcacgtgtgcgatttgtccgcgatttccgacaagattaagcggcacaagatccagacgaccttcatcggcggtctcccctatgcgaagcggatgtacaagcgttatcttccgctgatgccgatggcgctcgagcaaatcgacctttctccgtacgatctcgttatcagcagcgagtcgggaccggccaagggcattataccgacctcgcctgcgcttcacctgtgctactgccactccccgatgcgttacatctggaacatgtacaacaggtactacgagagctccgggttgatgacgcgaatgatgatgcctcccatggcgcactatttgagaacatgggacgtcgcaacggccaaccgcgtggacggtttcgtcgccaactcgacaaccgtcgctcaaaggatcaagagctattaccgacgcgaggccgatgtcattcatcctcccgtcgacacagcggccttcaggccggtggcgagccgtgaggtcgaggactactatctgatggtcggcgaacttgttagctacaagcggccggaccttgcagtcgaggcgttcaatcggatgaaggcaaagctggtcgtcattggcggcggcgaaatgctcgatcacctcaagaagattgccgggccaacggtcaccgttcttggcgcgcagcctttcgattctctcagacatcactacgcgcactgcaaggggctgattttcccgggcgaggaagacttcggcatcgtaccggtagaggcgatggcaagcggccggcctgtgatcgcctttggtagagggggtgcaaccgaaaccgtcgtaaacaacaagacgggcgtttttttcgagacccaaacgaccgatgccctcatcgacgcggtcgaacggatggagcggctggatttcaatcccgcagatgccgtgtcgcgcgcagccgattttcgaagggacgtctttgtggatcgctttcgaggctatgttgcacaagccacaggcgtgaagctggctgtgtcggcctgagcccagaccggaccgttgtcaaataggagtatacgatgccgctttctgccctcccccgagtcctcgtaagaggatgcggctttcttgatctccgtttgatcagacgcgccatcaatgctggtgtttgcatcatcgcgttgaccgccacagctgcaagcgcaacaatagcccatgccgcagaggaatacgttccaggaccgcaggacacgctgaaaatccgcgtctacgagtggcggcccagtaccatgacagcattcgagtgggctcccctatccggcgacttcgtcgtctcttccgccggcaacctctcgctgccgatcatcggaaatgtatcggtggccggcaagacgcttgagcagatctccgagaccatcggacagcgtctgcagacggaagtcggtctgcaaaagcgaccaagcgcttctgtggagatctcgtcctatcgtcccctctttgtcacggggctcgtggccaatcctggtaaatacaacttcagtccaggccttaccgtcgttcaggcactaagcatggccggcggaatagggtcgacggatgccaacataattggtctgcaacgggacgcattgtccagccaaggccaggtgcgggcactggaagcagagcggctcgggctccttgcgcggcaggcacgtgtcgatgcggtcttgagcggagcgtcgtcggtctcattcccacaggagttgatctcaagaggcagcgagcctcgatttgccaagatgatggacgaagagcggtcgttgtttgcgacgcgtgagcaatcgatgaggacggagattgacgctctcggccgcgccaaggttctcgccaacaaccagatcgcggcactgaaggaaaaaacagtagctctggccaagcagattgatctggcaagcaaggatctgtcctcggtcaacaagctgatatcccagggtttgacaatttccgcccgccaactgggcgcgaaccagacggtggccgaactagagagccgaaatctcgacgtttcgctggcgatcttgaaaaccgagcaggatctcgccaaaggtgaccaggatatcgccgatgtacgaaaccgctatcgtgtcagcgcgctaagcgaggcggcggaattgcgtgaccgatttgcctccaacgctgaaaggcttcggacggaacgagaccaattgagaaatcttgaagttcgcgcaccgtcggcaatagcctctcttgctgacgagcagaacccctttgcatacctgatgacggtcaatcgggtcgtaaacggcagcatggaaacactcgtcgtcgacgataacgacccggtcactcccggcgacatgatcaaggtagagcggcgcgaaaagactgccgccgcgccggctgatatcagcagcaattaagctgttgccgttgtcacacgacgggtcataatttgcacttgcctcgacatcccatatgcggaattatatctgcctgcggttccacggattgggagtcaggagcgacctatgggctgggcacttgttatctcgctgctgatcggcgcgatctgtgccttgcgcgtgcctgtgcttgtgttcgcactgttggtcatagccgttttggtgatctacgccgtcgtcagctacagtagtggaagcacactgtggcacgcggtcctgtggggaggcgccttcgcggttatgctagaggctggatacgttttgacccacgtccttcttcacgccttctatacccgtcgggtcgataacgatgagaaacgcaccccgcaaggcgcgaatcccaaataccccgctgactaatcaaaaggcctgggactagaccgtgttgttttgcggaaccgctttcgtctgggcgcccgcctttgcctgatcggccagtcgggaaagggcgagttcttccgcctgggccatgccgaacttcaatcggtatccggcatcccgcagccgccggctggaaaaccgcatgcgccatagcgggttcctcaacgggagcgttctgaagcgaaggaagtcgtgcaaccagtcgacagctgagggcgcactcacgacgcggtaatgcgggtccccacttgccctgaacgccttacgcataaagtcgatatggcgtggttgtggccgatcgtcttccgcaaggttgaagatctcgacgtcgcctggggttccccggccagccaatgcctgttcgacagaccagatgagtgcgtcggagacatcccacacgtatatgtgatgggcatgtcgatgtgacgcaagcatccgctttaccaagctccagtcgcgtatgccgatgatctggtccaaatccacgacgacagctggcctgaagattatgcatctcatctggtcggcaacgcgtgaaatggctcgttcgcctgcaagcttcgtgcgtccgtattcccgcacgtagtcgagcgcccaatactccgaagcgttatcctcatcaatcgacagcaccggcgaagcttcggagatctcgatcgagcgtccggaaccatagacggaaactgaactcgtgtagcaaaacgccccaacccgcgcgtcctgcgccgccttcgcgagccgctcggtcgcatcttcattgagcgcccgcatccggctcttcttgccgatttctgcagccagatggataaccgcatcgcaaccatccaccagcggaagtagatcgtcgttgcgggccaagtcggcttgacgccattcgagccgctgaacgccttctgatggcggcgactttgaagtaaccgccctaacgtgatatccacgctgtagcagatcggaaacgacgacccggccgatccgaccggtggcgcctgtgacgagcacgattttatccgacacgggccatcatctccaaaaccagcggacgttgggctttttcccttacatgatcggccaggcgaatagccatcgcgacaatcatctgcgtcgggttgcagtgcccggcggtgggaaagacggagctaccggatacataaagtccctcgaccccatgaacctggcaatcaacatcgacgacaccgttcgccggatcgcttgacatgcgtgtcgtgccggttggatgagcaacatcgacgaaacttgtgggaatgggtgccttatcgcgtacccaatcggcaagcgctgcagtaggaaaattcagacgggagaattcgctggcgaccagttcagccatccggtgcatcgtccgcgcctcggccggatggctgcgccagtcgattttgggaagcggcatgccatgacgatcgcgacggtccgagagcgttaccctgctgtctgcatcgggcatctgctcgcacatgcattcgagagtgagttctcgcaacttgcgtggcaacccattgcgcgcgacaaaatagtcgaccgcgccgcgcaccataagtggaatattgcgcgccacgtcgacgaggtcgtcaggcaacttcggctttcgggcggccaagcgccgcatcgcgtcccatggatcgtccggcgccaaggtctcgccgagccaggccgcgcagttaagcaggcgctcctcgcgctgaaccgcagggctaagcctaaggcccgcccggaaaaatcgaccttgaacgttgtaacgtccgaacctgcgctgcagggcagcggaacctggcacggaaatgaacgctgccgggccgcgcagatgatccatgagatagcggccaacctggtcgcgatcgttgccaagtgccggacgaccgggctcatgtgagttaagcagaagacgagcattttcgatgccgccggcacacagaaccacggaacctgccgcaagcgtatgcgtacgtccgtcaccagtcgcaaactccagcccgccgaccttattgcgcgtgtcatcgaccaataggcgcaaagcggttgctccaatgacagttgtgacattggaaccaagccgcttggcgatatggcgaccaaaccgcatgtattcaaacgggtagctttccgcatcatctctgctgaactgccagaagaatggcaacagcaggttggcacgaaattcttccttcggtgctggtcgtcccgaaattccccaaaagcgatcattgctgtatccggtgccgactgcgagtccgagatgaacagcgctgcgttccaaataggggtccagctccttcatggcgatcggccatccggaatgatcaacccactctcgatgttcgaaatcgatagcgtcaaacgggccgcatcgccccccccacgtgtgcgagctcccgccaagaattctatttctgacggaccactggtcgctcgcacgcggccggccgacattgtcgatgtcgtttagtgcatcattttccgcctgtcgtgttgtgccgccactctcgagaaggacaatgcttagccctgaccccgatagctctcgcgccaacgtggcgccagccggccctgatccgacaatgcacacgtcgcatcgaagcaatggtacgatgctgttgcctggctgaagatcgatcactggcattgtcagtcccccgcgggtcgttgccgcgacgccgtgcaaggcgtctcggaaatgcactgtcctcgtcctaacgacgcattctggttattcgtatgagataacttggctgatacacctagctcgtcccccaccgggtggagagcctgttctgctcgcttagctggagaaacggtgcgggcgcatcggcagtggatgtcggtcgggatgcggccagacccgctagaatgaaaaatagaagaccaagatcgacggtcggcccaacgatgaacgatccagtaagcaaacaaaggcatccattgcgtgccgaaagctgaacatcggcggtgaagcttctagccattgcacccgaagggccaagcgccgttgcgatgaacagcaggtagaatactgctcccgggatgcctacgttcgacaacactgctaccaggaagctcgaggttcgcgccgttccaagccccacaccaatgccatatgtatcgaagaaattctgcattccgtgcgtgttccacgcaccgcgctccatacctgaagccgaggtcgatttgcttaagatagccatgtcgatatagtcgtagatcgagttgaatatatcggtctgcagcacaacagcgaggccgacagcgacggcgaccaacggcgcaaagatgaccaccgcgctactgttggcgctcccatgcgaagtcccacttcggatcacagccgtcacatagaaaatggcaaggcagacgggtgcggcgacaagcccaccggatgaggtcgacaatataatcagcgcaaaagacgtcagggcaagtgcccctgtccacctggaggatcgcccacatagccacagcgtggacgtaaagccgaacgcgccgagcgtcgtgccggcaaacgcggaagcttctggccaagagccaacgatacgcttcattccgttgattttgtcattgtcatgaaagacatactgcgcattgcgcataaactgcagcatgtcttgggcaccgattgccccggtgacaacgtcgagcgccgcgaacacgatgttgagagccgtgtaggctatgaggccgctgattatggcccgaaacccctgggtcgttgaaccgatcgccgtcaccagcaggaagcaagcgaggtctgcgatcagataaacggtttgggtcaggttgctggagactggagcgagtgacacaacgccgctggtcagcggccggtcggccacacccaagggaacgatcatcgttgcatccgcaaacaggcgcggaagaaagtacgccgaaaggcctccataaagaaccaggcatcccaaccaaaatcctgggcgaccgaaatgcaacccatccgccagcggcgtggttttctgggtgccgcggaagatcgaaagagctacaaaaagaagaaacagatgtgcgggctgaacgctggaagagccgaccacgaaagcggctgcggctccaagcagcgtcaacgcaacaaaaaccttcatcgtcgcagcctgatcgagcgacaggcaatacagtccgagagtgaccgtaaaaataccgatcggctcgaaactcatggcaaaacgccctcgtcccggcgcttcgtcgtcaaatcgcagcagtgcattccgcggagaatgagatcgacagaagaaagcaacccaaggtggataacgcttatgggcgagcgtcccgtgaacgaactcttcatcgacatggtcattactcccgccgctgcgcaccggattaaggctaaatactacgctgcgtcgcacaataggacggattctaagatctgcaaagaggatattgcattgcgacactatctggcacttgagacaaaatatctaaccaaaattccctcggcccatcagtctactaggcgatcttgtcgctaggaaagatgactcacgcattaaaatgttgattattatagattaaatataagaagatgaatatgcgacgtcggcctaatctgggcctcagaatgttgcggcgcgtcaaatattcgtcgcgagaccggtgaatttccgccttggactaggtgacacttctccaattgtgttgcattgtttgattaaccatgagaaatattgccaatgactggaaataaaatgacgcgctttatccagttaatgcgagcaccaggtatctacttcaggatattcggcgctacttttggattctctataatcgcatatctgcattacaggtccgtgactttgacgttatactacagcgttatttgcatgtttcttatgcaggttggctacattggaggcgttctgttccttatctggcgggagggggttcgtcagaagatccactaggggttgtttcgagttcgtgtgtcatgcccgggattggaggacccggacatgggcgcacacattacagggtctatgtgtgtgatgaaatttgggacaagcgggcttcgaggcctttccgaggatctgaagggccgggcatcggcactctatgcgacggcgtttggccgctatcttctcgaaagcggccgggcgaaggcgggagacccgatccttgtcggtcgcgacttccgcgattccagccctcagatatcagccgattgcatcaaggcgctcggcaggctcggctttgcgatgatcgattgcggcacgatcccgacgccggcgctggcgctttacggcctgcatctcggcgccgcctcgctgatgatcaccggctcccacatcccagccgatcgcaacggcatcaaattctatcggccggatggtgagatcgacaaggctgacgaggccgcgatcacggcggccgccgcagaccttgatcgcacgggtttcgaatggccgctgggtgaccggcaggccgaggatcagtcggtcgagtgtctcgctctcttcacgaaacgcaacgccagcctgctacccgccaatgcgctcgcgggcctaaaagtcggcgtctaccagcacagcaccgtcgcccgcgatctcatggtcgacctgctccagcacttcggcgcagaggtcaaggcgttcgcgcgctccgaacacttcattcccgtcgataccgaagccgtctcggaagagaccattgcactgctgaaacaggcggcacgcgatcatggcctcgacgccatcgtttctgccgatggcgatggcgaccggccgctggtgtcagatgagacaggcaccccgctgcgcggtgacctccttggcctgatcgccgccaacttcctcggcgcggacgccgtggtgacaccggtgacctccaactccggcatcgaggcatcaggctcgttcagcgtcatccgcacccgcgtcggatcgcccttcgtgatatcgggcatgcaggaggcgctggcatcgggcaagaccggcgtcgtcggcttcgaggccaatggcggcacgttggtggcgagcgatttcaatctcaacggcacgacgcttctggccctgccgacccgcgattgcttcctgcctgttctggcgacgctggcgcaggcggcggcaaacaagcgcccgctgtcttcaatcgcatccggctacgcactcctcttcgccgcagccgaccgacttgagaacttcccggtcgagaccagcgcgaaactgatggcgcatctgcgcgcgagcccggccaatctctccgacttcctgcagccgattggagaagtcgacagcaccagcgacatcgacggcctgcgggtgacacttgccgacaagcgcatcatccacttccgcccatcgggcaatgcgccggagatgcgctgctatgtggaagcggaaacggagagcgctgccaccgaccttcttgccgccggtctcaagcgcatccgcgcctgggcgagcgcaaactgatcaacgattaaagaccatttcgaggaccaatgcagatgacgcagaagatcgttccggtaatcatggcaggcggcaagggcacgcgcctgtggccgctgtcgcgcgccgccgcccccaagcagtttatccgcttcatcggcgataccaccctctttcaggacacgttgctgcgcgtctccgacaaggcgctctatgaaccggcgatcgtcatcaccaacgaggaattccgcttcctcgtcgccgaacaggcccgcgaactcgatctgacgctgtcgagcatccttctggagccgatggcccgcaacacggccgccgccgttgccgcagccggcgcgctggtgcgtgaccgcttcggcgagagcgccatcatgcatgtgctcgcctcggatcacgagatcgatgcagaccaagtctacttcgacgcggtgcgcgccgcgatcgccgccgcatcctcgggcaagctcgtcaccttcggcatcaagccgacggaacccgcaaccggctatggctatatcgaaggcggcgaggcgctgccgagtggcgcgctgacggtcaagcgcttcatcgagaagccaccgctcgcgaaagccgaggagatgctggcatccggcggtttctactggaactccggcatgttcatgttcccggtcgccaagctgctcagcgagatgaccacgtttgcccccgatgtcctcaaggccgccggcgaagccgtcatcaagggtatcaaggatctcgacttcatccgcctcgacaaggcggtcttcgctgaaagccccgatatctcgatcgattacgcggtcatggagaagaccaagaacgcagccgtcgttccctcgcccttccaatggtctgatctcggcagctgggacgcgatatggaagagcggcaatcctgacgaaaagggcaatgtcgccgccgaaaacaccaccgtcgtcaacacccgcaactcgctggtcatgacccacggcgtgcatctcgcggtcaatggcatggacgacgtcgccgtcatcgccagcgaggatgccgtctatgtcggccacctcaaggacagccaggacgtcggcgccaccgtcaagatgctggcctccaggccggcgacatcgaagctcaccgagacgcacccgacctcctaccgcccctggggcggctacacctcgatcttcaacggcgaccgcttccaggtgaagcgcatcttcgtcaccccgggcaagaagctgtcgctgcagaagcaccatcatcgctccgagcactggatcgtcgtcaagggcacggcggaagtgacgatcggcgagaacgtgcagatgctgcgcgaaaacgaatctgtctacataccccttggcgaagtccaccgcctcgccaacccgggcaagatcctgctcgaactgatcgaagtccagaccggctcctatctcggcgaggacgacatcatccgtatcgtcgacgagttcggccgtagatgacgacaaagattgacatccagaaacttggaggcgcgcaaatgggtaacagcctgacggaacattcatcccagacgaggcaacaacccgcccttgtcggattcagtcgactccagcgtgaaagccggttctttcaagaagatttggactgcggatcggcttgcggcggcgacaatgccatccctgaatttgaaccgttacgacggctcagaattggaagggtggatttttgagcgcttggcggtggctcaagcgccgatcctcatagaccggagatcaaccgatgcaatcactcatcaaaacgcaatggctcagactgcgtggcgaaatcgagcgaggcgactcgaaaggacatcgatatgaaggtttggacatactaaggggcgtcgccgcgctcgctgtccttttcaaacacttccactctcgtctcgatcttccctatctcgctccaaacggctacctcgcggtcgatttcttttttgtcctcagcggcttcgtcatcgccaacgcatacgggaaacagctcgaggatggaacgctatccacaggcaccttcttttggaagcgatggatcaggctcatgccgctgattgtcgtgggtatgatgatttctgtgatcgcgcagctcgggcgacccgatcccgatcagacgcggcatttgagcgatgtagcaattgcgctaatctttggtctgagcttgatgccgatccttcagacgtcgtttttcaagacgccgacacttgagcaatcggtattcccgctgaacacaccgatgtggtccttgttctttgaggttttcgccaacattgctttcgcggtctatacaaggcttcgactgccgccgtggtctcttctcgtgatcgttgtggtaagcggtctttggctattgattgggatcagcagtagaggtgacgtaaactttggtttcaatacaagtggcttttggttcggctttccgcgggtgatctggtcattttccatcggcatgctgatctatcggtatcgttcattcgcccccaggaacatgtttttcccggcgatggtcgtcttggtcgccattctcctaacgcccacgcttggcctctccagggtggcagccgatatgatcatcgtgatgatcataatgcccgcaattgtctttgcatgcttgaatgcggatctcggcagccgcgctcggctgtgcgcgacctggggcggtaacctctcctacccgctgtatgcgctccactatccgatcgtccaagtcttgggctacgtggcaaaagcgcagaacttgccatggataatgcaggctggtgtcgtgatcggaggaacggccttccttgttggcctgtctgcggtcgtctacaccatggtagatgttccgctgagaagacgcatatcgatgctggtgcggcgcgcttgagcgcttcttcgatcgctctgggagccgtgtcacagccaatcagtgatggttggatttcgaatgccagttccaggccgagctgatgatctgggacagatcatgctgcggcacccagccgagcacttcgcgtgccttgtcgttgttggcgaccagcgtatgcgaatcgccttcgcggcggccgacatattcgacggggaatggcttggcggagacgtcttcgatcgcgcctagcagttccttaaccgtcgtgccggtgccggtgccgagattgagcgcgaccgagtcaccgccgcgcagcaggtgctcgacggcgcggacgtgtgcatcggcaagatccagcacgtggatataatcgcgcacgcaggttccgtcgcgggtctcatagtcgctgccgaacaccttgaagccgtcgcgccgtccgagtgctgcgtcgatcgcgagcgggatggcgtgggtttccggctgatgccactcgccgatacgaccttcgaaatcggcgccggcggcgttgaaatagcgcagcacgaccgagcgaaagccggtgtacttgtcgtagtcggcaagcgcctgctcgacgatgtatttcgtctggccgtaggggttgatcggcacctggcggtgggtttcatccagcggcacgctctgcggcaggccataggtcgcgcatgtggaggagaaaacgaaagccttgatgccagctgcctgggccgctgccaacaaggtgagcgtgccgatgacgttgttttcgtagaaggtgaccgggtcttttacggattcacccacctcgatcagggccgcgaagtgcaggatggctgcgggcttgtgcttggccagaacctcgtcgaggcgcgcgcggtccctgatatcgccttcttctgccggaccccatttgacgaactcgcggtgcccgttggagaagttgtcgtaaacgacgggcttgaagcccttgttggcgagatcgagacatgtgtgggagccgatatagcctgcaccaccaacgaccagaactgtttcacctgacatgcaccaccttctacagtgccaccatcacagggtaatggccacgttcttctcatctggcaagggtcatccgggtgccatcatctcgaaagcaagcgcaacaaaggccgcacttaaacacttaccgcccatcctcaggcattcatcaagcggtcttgagcggctagcttcgcgtaacggggaacgttgacgttctcgaaggcagtaaaaagaaacagtttcaacgcagtgacctctatttccatcgcagccgcctgtgctggatcagaagcagtccattgccgcacggttgagatcgacctgctcagcgcgcctggagaggtaaggttggctgcgtcaaacttcccgctatccgttacataccaaacgaacaggcggatcgcgacataggctggattgtagtaaccctccgcgcaaatattttcatgctccttgcgcagcatagcggatgtttcgcgttttagtccacgcatgtccaacccgagctcgcaaagcttatcggcgacactttccgactgagtttcaggcctaagccttgcgagtatgggtctcatttccatacgcacagcgtaacgcgagattggcgagttgagaacggtgcttacataagcaatttggctaatgtagtgcagcaaaaatacagaccgcgatcttctatccagatctcgcggaattcgcatcggacataccgatcaagtagggttgatgtctctcgaaacccgctggcccttgaggcgctttgttctattgaactttcctggacccttggtcggtgtcaaccacgatcccgtgctttagggcttcgtccacaatttcctcgatcgcttgccttacgcggtaaactgcgatgtcaaatccagggcctccccctaggggcaatgtcaccggcgacaataagtgttaaaatcaactgtgcaatactggattcgtcatgaatatcgccctcatgtaatcgtagagactggcggcaatactcttatgctgcaatgcacaataccagaatgcgcttgcgaaattgcagtggcgatgtctccgaggtcagactgcgatccgttcaagcggccccacagtcctcactcccatcactgtaccggatatgcggactcctcgctgttgactttcaccgagaaatgacccggcattgccggggatgcagacctaaaacttcgatcaccgagcgttagcgcaatcctattttccggggcctcgaggagaccaacatggtcccattcggcggcttccttcccacggttgaagtggatgcatcgaccgaggtgctggcaaccttcatttcggacttcccgatctttccgccggaaacgtcttgggtgcgagaaccaaaatcaaacactccggccatcaccatcaaaaccacgtccaacggcggcaagccgcggccgacttggaccgttgctatgggcgtgacgccaatcccgacctcgcgctgatcattgccaacgcagtgaattacgcgatcggcgacgaacgaaaggtggcgctgtcgggtacccacggtgtcatcattgctgagctctaccgtcagggaggccgcaagatccttcacctgaacaacaggattctgctctcgaacgtcccaggaagacaatatgacctcgttccgatcggtccggtcactgtccgccttcgcatcgagaaggcgtccgcgaagatcgacctgcgtgttcgtgggaaggccgtggaaggaaagaccgacggtaactacgtgaccttcgttgtcgacgccatcccccaccatgaagttgtcgtggtggactgacgaggctagccaagtgatgggggcggtgtgctcccatcgctaccccagtcggtcggcagtggctttgcttgctgaaatacgcgatcccacccccgacgatctggtgcgttcacctctccggcaagccagctttccggaagccatcgacgaagtggtcccgcacatatgtgtcgcgcagcggctgggagtttaaccagtggtcgatcgtgaaatgagggtgggcgatcaggaacaattccgcttctcggtgcgcttcctcatggtcgcccaactgcgcaagcgtagcggccaggaatttgcgtgagttggtgcgatatgtctcctccctgcggagtgtggctttcgccgcctgatagtcgtgtgcggcgtattgcgcctgtccaagatggcaaaggtaccagcaggctggatagggattaagccgcagggccttttcgatctgcgccaagccggcggcaaccttgccatccagcacggacatgtccgacatggcagcccaggtgtcggcgtggttggggtccaactccagggcctttgcgaaggctgtctcggattcctcccatcgccgctcataagccatgatggtccccagaatgtaacggcagtcggcatcgttgggatccatgtcgaccgcttcctgcgccagcgtcactgccatcgcccggtttggatcttccggctcgccgaaatgagtccaggcaagccaacgattatatgcgagcagaccgagcgcctcggcatatgatggttcgagctgaaccgcgcgctggagcaacatgtaagcctcgcgctcggtttgcggcgactcttccgtcaggaggcgggcgcggacacacagatcgtatgcctcgacgttcttcggacgattgcgttgcgccggagcggtcagccggccgacgagggcttcgacgatcttggcattgacttcgtcctgcagctcgaaaacatcttcgaccgtcctgtcaaaccggtcggcccacaggtgcttgccgccaagcgcgtcgaacaattgcgcgttgatgcgcacacgccccatcgtgcgtctggcgcttccctcaagcacgtagcggacgccgagttcctgggcgaccagccgtacgtcgaccgctttgcccttgtaaacataggcggaattgcgcgcgataacgaacaggccggccgtacgggacaggtcggtgatcaagtcttccgtcaagccgtcgacaaaatgagcgtcagcatcatctccgctcatattggtgaacggcaatacggcgatcgagggcccttcggggagttgcaatatgctctgcagcgcatccggccaatgccacacgtggaccgggcgggtcaggttcttcaggtagcgttcgccggcatcgaagaaccgctcgttgattttgccgacgatttcgccgtggacgccggctgaaatgcagatgcctcccgatgcggcctgcgtctgaaggcgcgcggcgacgtttacgccgtcgccgaggatgtccgagccgtcgccgatgacatctcccacattgacgcctatgcgcaaaggcaggcggcggtctccaaccagttcaacagcggcagtggcccgctgtatctccaacgccgcggcgaccgcgtccaacgcgcttgcgaattcgatgaaaaatccgtcgcccatgaccttgaaaatgcgaccgttgtggcgcatcgcggccggttcgatagcgccggaacggagtaccctgaggttctccaccgtcgcgacttcatcagcctccatcaggcgagaatatcccaccacatcggcaacgacgatggcggcaaggcgccgctgaagagatagatccgtcatctgaggacaagcctaacgactgagctcgcaggttattgttcagccgtatgtgagtcaacaagtcgtgagaggtgcaatgtctactgtcggcatgaagtcgccataggggctcccgcgcttcccattggcgcgtccatgatcattcatccaaacatgccgaataagccttcagctttcgaagctcggtcgatatgaatcgagtggatgtcagtcgaggtcaccgacctatggcaagtagaaaatgagttgctgcagctttgataacaaatcgaagaagggtcgcttccggatcgcgcgactgtggtccagcccgctacgtcttctccaccatgcgatgtcaaagagatcccaggcggtcgtgttcacgtcgggacagctaagttgcttcttacctttgtcggcgaagggccgccacgcgtgaaagccccaggttactgacttcaatctcgatggggcccattcgctgcggccttgggattgcaattgtttttgagtgagatgccacgctctcgctatcttttgtcgcacctgcatccagtggcaattaaaattaaaatcgattagcagattcatggaacgacagaaatgcccggattcgcgatttccagtactggacaggtattgacgtctttggttgatcagcctcggccataaacgccgtgcaatgaataagcgcgacccggtcgccgttaggggtacaataaacatgacattgaaaattggagctccgaaggagcttttagccggcgaatcgcgcgtggcgatgacaccggaatcggcgtcgcaactgcagaagctgggttatatctgtctgatcgaggctagcgccggctctctggccggcttttccgacaaagcctatcgcgcggcaggagtggaggttgtcgaaacagccgaggccctgtttgaacaagccgatatcatcgccaaggtgcgccctcccgaaccgcgggaactggagcgcctgcgtgccggtcagacgctgatttcgttcttttatccggggcaaaacgccacgctgctggagcaggccaaggcaaccggtgccaacgtcatcgccatggacatggtgccgcgtatttctcgcgcgcagaagatggacgcgctttcgtcgatggccaacatcgccggctatcgtgccgtcatcgaggcaggcaacaatttcggccgcttcttcaccggccaggtcacggccgccggcaaggttccgccggcaaaggtgctggtcatcggcgccggtgtcgccggacttgccgcgatcggcacggctacttcgctcggcgccatcacctacgccttcgacgttcgcccagaagtggccgagcagatcgaaagcatgggggccgaattcgtcttcctcgacttcaagggcgacagccaagacggcgcagcgaccggcggttatgcagcaccgtcctcgccggagttccgcgaaaagcagctggaaaagttccgcgaactggcgcccgagatcgatatcgtcatcaccactgccctgatccccggccgcgatgcgccgaagctgtggctatcagacatggtggcgctgatgaagccgggttcggtcattatcgaccttgcggcggagcgtggcggcaactgtgacctgacggtcgccgaccaaaagatcgtctccgacaacggcgtgatcgtcatcggctacacggattttccgagccgcatggccgcgcaggcatcgacgctctattcgaccaatatccgccacatgatgacggacctgacgcccgccaaggatggcaagctcgtccacaacatggaagacgacgtcatccgtggcgcaaccgtcgccttcgagggcgcggtgacctatccaccaccgccgccgaagatccaggcgatcgccgcccagaagccaagggaaaagaccaaggagccgacggctgaggaaaagaaggcccgcgaggcggccgccttcaaggcgcagaccaagagccagggcttcctgcttttgatcggcaccgcgctgctgctcctggtcggcgcttatgccccggcgagcttcatgaaccatttcgtggtcttcatgctcgcctgcttcatcggtttccaggtgatctggaacgtctcgcactcgctgcatacgccgctgatggcggtgaccaacgcgatctcgggcatcgtcattctcggcgcgctgctgcaggtcggttcgggcaactggctggtcgtcatcctggccgctctgtcggttctggtcgcgacgatcaacatcgtgggcggttttcttgtcacgcggcgcatgctcgccatgttccagaagtcctgatcgggccagggatatcaagggattttcaatatgacgattggtatcgtttcggccgcctatatctccgcggctgtgcttttcatcctctcgctcggcggcctgtcgggccaggaaagcgccaagcgcgccgcttggtacggcattgtcggcatggcgctcgccattgtcgcgaccattttcggccccggtgtcagcaactggttcatcattcttccgatgatcctggccggctccatcgccggctactacgtggccaaccgcgtacagatgaccgagatgccgcagcttgtggccgcgctccactccttcgtcggcctcgccgccgtcttcatcggctacaacgcccacatcgaagcatggcgcgtttccggcatcgatgaggtagcacgcgcagcgctcgatggtttcgccggcattctcgcgcacaaaaccccggtcgagctcgcgatcatgaaggtcgaggtcttcctcggcgtcttcatcggtgcgatcaccttcaccggctcggtcgttgccttcggcaagctggccggcaaggtcgacggcaaggccaggaagctgccgggcgggcattttctcaatgccgccgccgcgatcctgtcgctgatcctgctcctgatgtacgccaacgatgctggcgtctggacgctcatcctgatgacgctgctcgccttcttcatcggctaccacctgatcatgggcatcggcggcgccgacatgccggtcgtggtgtcgatgctgaacagctattccggctgggcggccgccgccatcggcttcacgcttggcaacgatctcctaatcgtcaccggcgcgctggtcggctcgtccggtgcgatcctgtcgtacatcatgtgcaaggcgatgaaccgctcgttcgtctcggtcattctcggcggcttcggcacgacgaccggtcctgccatggaaatcgagggcgaacaggtcgccatcgacgccgaaggcgtggcgtccgcgctcaacgatgccgatagcgtcgtcatcgtgccgggctacggcatggcggtcgcgcaggcgcagcaggcggtgtccgagcttacccgcaagctgcgggccggcggcaagaccgtgcgcttcgcgatccatccggtcgcaggacgtctgccgggccacatgaacgtgctgctcgccgaagccaaggtgccctacgacatcgtgctcgaaatggacgagatcaacgacgacttccccgagaccgatgtcgtcatcgtcatcggctccaacgacatcgtcaatccggccgcgcaggaagatccgaactcgccgatcgcgggcatgccggttctcgaagtctggaaggccaagcaggtcttcgtctccaagcgtggacagggcaccggttattccggcattgagaacccgctcttctacaaggacaacacacggatgttctatggggacgcaaaggcgagcgttggagcgctggtgcctcttctcgcatagttaggtgacgagaggcagcctaccgcgacttccaacactgcgtgaatacactatgccgggcgatctaaaagcgtccggcattttcccgtcaggttgcgttttcgcggacgtttctggcgtcccacggccgccagaacatcattctcaatgtaccggttttgaaaaatcctgcgacaaacttcctacagacccggcaaacccctgcgacaactctaaagtaacttccgctcaccgataagtcctcaaagggagacggatatgcgtggagaactttggcaggtgatcattatgcggcatgtgctcaacgagttctgcgctcagcatgatctgtccgtcaaggatcgccccgcgatcgaagcggctgaattgctcatgcggtttgtggcggaaggtgagttggatcccgacgaaccgcggacgcgtctcgatgacgtgatggtggatcaccctttcggcaagcggccccagcccgcagcgcaagacggcgcccgcgcctaaagccttttcgcgttcacagttataaaataccgaagggggagcgaactgaaggatggctctggtatccgcgttgaaattcattgatggaaaattcagggtaagcgcgattttcaatgcgcattgacggcagttgacggacacttgcgcttagctgggtagcagtacccagctttatcaggccgccgtggtcttggagtaattgaagggcagcaggtcgccgatgtcgtcggcttcgtcaagctggggcagctcagtgaggacgtggcgcagccaagagagcggatcgacgccacaggcgcggcaggtcagcatcagactgtaaatcacagcgctggccctggctccgtcagcggtatcgctgaacagccacgattttcttccggtggcaaaaactctgatctcgcgttccagaatgttgttatcgatcggcatcctgccatcgctggtgtagcgcgtcagataatcccattggtttagggtgtaggacacagcatcgccgagcttggtatccggtacgaccttcggcgcgatgttatcgagccacgtctttagggcgttcaggacaggcaggctgtgctgctggcggaaacggcgaatgcaatcggcctttgtctcccctggatctggggtcttgtctcttgcctgcttttcgatccgatagagctgctcgaagaaccggagcgcctgctccggcggtccgcctccattcttcctggttttgagggcctcgacaaagcgccgccgtgaatgcgccatgcatccgacatgggttgcgccatgcaatgtgcgccaggctgtgtagccgtcggtcaccaatatgccgtcgtagtcaccgagaaaggtctgtgggtggatttgaccgcggccgggctggtagtcgagaagcacgattggttcgtcactgtcctcgctgctgcgataggcccacatgtacgacgtgctggtcgcttccttgtctttttccttcaacacctgaaccgtcgtctcatcgccatggatgagagaatgcgatcgtagtcgcagcttcaaagcatcatagatgcggtatagatgcttctcgctcgagccgatgacccaatgcgcaagagcgccacggctgatcggaacgccagcacgctcgaatgtttgcgccacgcggtagagcggcgtgccgtcgacgtatttatgcacgagcgcgaaggccagcgtcgaagcagtagcgatgctgcccggcaagggttgcggtggcatcggtgcgattaccacaggcgtgttgatcccggtacgatcgcagtggcggcaagcgtacttgaaccgcacattttgcaggacctttgccttgacctcgatatggagctgctcgctaacggcttcgcccatgcgatgcattgggcttttgcagcacgggcaagccttctgatcgtcagcaaggtcgtattcgacacgctcgcgcggcaggtctgccggcagaggcctgcgtccccgctttttgcccgtaacgccctcggccgcaggcaagccagtatccggaagctcgacaacatcgtcttcctcgcgaccaccttcgaccgcagcctcttcggcctcgttgaagagacgatcaatgtgcttctcactgcggggtgcaaagcgatggagctttgccagtgccagttcttcttccagcttgacgacccgctgcgagagcgcttccttctcggctttgagcgcagcgatttcggcagcgttggctgctaattgcgccatcagttctgcaatgctcggttcgccggtgcgcgtcatcagattcttgaatctgaaccgcccctgcgcgtcaatctcaattcgccatcctcagccagcaatctgatactgccgcacgggatggcggatcatcgcatcgatatcgatgccatcgaggatccagtggagttgctctgtcgtcagcgtcaccactgcggtttcccggcggggccacctgaaccggtcttccgttagtttcttcaggaccataacaaacccggaccgatcaaagaacaagagcttcacccggtcacgcctgcgattgcagaaggcaaacactgatggagcaaacgggtctagctccatcacctcttgcacaaggaccgctaggctgttgatgcccgcgcggaagtcgatgggttcccgatggaggtagaccttcagatcagcgcccagtctgaacatggctcaacgctcctatgattgccgccagaccatcgacatcgctgcattccagcgtcaggctgaccccgttcggcagcaccgcgctcagcttggatgcatgagatcgcttgcccaccggctccaccttcgtcagtggaccgctggcagaagacgagtgcatatccgtagctatctgaaccggaacgaacctagataccgcaggcaatgcactatcttctttagctctcttcacccacttgcgaacgagattggcgttgacgccgtactccagagctagacgcgaaaccgaaacgccgggctctaaacacgctgcgacaagctgatctcgggaggaagggtcatatcgacggcgaccgtcgcggccaacaagccgcacctgcagtttaggagcatcgtccatgatttggtgtccacctgtttttggtggacacttcatgcatcagagcactccgcttcaaaaggcgcatagaaattcgcgcttacaattcaggcgtcagccttccgtccgctttccaggctatcaacgagctgtcagggaattgtgccggatagtatgaaaagtgtaacgggattgtctcaactggctgtacgatgcgatcgcaattcattgcgtccgctgccactttaccgcatcaacgcgcggctatggaacgcgtgacgctgtcgcgtcagagagcgggtgctgaccgcgaagggtggtcggcgatgtcgtgctgatctggcgcttcagacgtgaataagtaagcctgacgttttcatgatcgatctgctcggacgagacgcctaagataggcgctccgtcactgtgcgcggttgccggatcaaggcagtggcggcgcattcgtgcggcccgctaccgctatctataccgcaccaggcaatgcctatggatgctgttgcacgctcagaccgccatcgatggtcaggcaggtcgcattcatgaatgggcattcgtccgagatcatgaagaccgcggccagtgcgatctcctcgggcgtcgctatgcgcccgcccgggtgcagcttcatcgtctcggccttggcggcgacgggatctgggaagctgtcccagtaatcgatgaccttctgcgtcgccacgtagcccggtgccagggcgtttaccctgacattgtgggccgcatattcgagcccgagcgactttgtcattccgagcagtgcgtgcttggccagcggataggggaatgtgtggggtatgatggtgaaggcgtgggtcgatgcgatgttgaggatgacgccaccccgcatcgcaatcatgtcaggaagcacagccttgcagcaattccaggcacccttcaggttgacgtcgaaacaccgatcccactcctgatcggtggtccccaagggatgcgagaagacgttgacgccggcgttgttgaccagggcgtttatcgcgccgatttcatctgctgcctgcttgaccgcggcggtgacagccgttgcatcggtaatatcaaccgagcagtagcccacctttccgccaagctgcttgagacgctcggcttgttcggccaggagcgctgcatccctgtcgatcaggaacagcgaggcatcctgccggaaaaactccttcgcgatagccaggccgatgccctgcgccgcgccggtgacaaagattttctttccacttaatcgaccggacatattctcgctccaacctaccattcggcaaagctgccgtcgccatggcgccacactggattgcgccaacggtggccttgcttggccttctcgataacgtattcctcgttgacttccaccccaagccccggcccttgagggatgctgacgaaaccgtccgcatagtggaagacctccttgttggagatgtagtccaggatgtcgttgcccttgttgtaatggatgccgaggctctgttcctggatgaaggcgttgtagctgactgcatcgacctgcaggcaggcggcaagcgcgatcggcccgagagggcaatgcggggcgagcgccacgtcataggcttccgccatggtggcgatcttgcggcattcggtgatgccaccggcatggctgagatcgggttgaaggatatccacatagccctcggccaggatgcgcttgaaatcccagcgcgagtacagccgttcgccgagcgcgatgggcgtcgaggagtgattggcgatttccttcagcgcctcatggttctcggaaagcaccggttcttcaatgaagagcagcttgtagggctcaagctccttggcgagcaccttggccatcggtcgatgaacgcggccgtggaaatcgacgccgataccaacatgcggcccgatggcctcacggatggtcgctatggtctcgaccgctttttccaccttgtcataggtatcgacgatctgcatctcttcgcagccattgagcttgatggcctggaacccacgggccaccacctcacgggcgttgttggcgacatccgcggggcgatcaccaccgatccaggaatagaccttgatccggtctcgcacctggcctccgagcagcgagtgaaccggctggccgagcgctttgcctttgatgtcccagagtgcctggtcgatgccggagatcgcgctcatgtggattgcgccgccgcggtagaagccgccgcgatacatgacattccagtggtcttcgatcagaaacgggtccttgccgatcaggtagtcctcaagctcgtgcacggcggcctgaaccgtgagggcgcgcccctcgacgatcggctcaccccaaccgacaatcccctcgtccgtttcgatcttcaggaacagccagcgcggcggaacgatgtagctggtcagcttggtaatcttcatggcgtgggtccgatcaagcgagaatgaggtcggccgccttggcggcggcggcaaggacagcggcgttggtgttgccgctaacgatggtcggcatgagcgaggcgtcgatcacgcgcaggccgcgtgttccgtagacgttcaggcttgcatccaagacggcctcgggatcgccgtcgcggcccattttgcaggtgccgacagggtggtagccggtctttacggtgcgtttgcagtgggcggcgacggctgcgtcgctcgagacatccgggcccgggaaaatttccttgtcgatcagatcacgcagcggcgaggcttgcaggacctttcgagcgaagcgaaagcttgccatcgtcagccgcaggtcgtcggggtcggaaaagatctgcgtatcgacaaccggatcggcaaatggatccgccgacgaaagcgttacggatccgcgtgccttggggcgcagcagcagcgagttgatggtgacgccgtctcccggctccgtccccatcacgtcgcgatctaggtagaccgtaggcacgcagaacaactggatcgtcggtcggtcgttgttgccgtccgggtcatagaaggcgcaggtctcgacgccggtggtggaaacgggcccggacttgaacagcagatattgcagccctgccttgatcatcggccaaccccggtcggcgccgtaatatccgaacgatccgcgggtcgtggcgacgaccgggcactcatagtggtcctgcaggttcttgccgacaccggggagcgcaagcctcgtctttattccgtgccttgaaagttcatcttccggtccgatgcctgagatcatcatcagcttcggtgtctgataagcgccggcggccagaatgacctcggcgccggctgtcgccgttttgctgctcccgcctttcatgtagtcgacgcctgtcgcgcggtcgccttccatgcgaatggcggttacggtcgcaccggtctcgatcgtcagcaacggattgtccatcaccggcttcaggaaggcatcgaccgcgctcgaacgcttgcgcgtcgcccaatcgatcgtgtgttgcatgaagccgacgccgaactgatgctcgccgttgaaatccgggttgtagggaatgcccatgccctgcagcgttttcacataggtgcgcgtcatcgggcttgtatggcccagatgcgatattttcagcggaccgccgaagccatgatacgcccccgccagatgatcgttgtcctcctggcctttgaagtagccaagcatgtcctgataggaccaggcgccatcgttattggcaccggccggtgtcacgagctcgttccaatgatcgaaatccgctgcctggccgcgcatgtaaaccatggcgttgaccgtgctgccgccgccgagaacgcgaccctgcggtacgatcggaccacgatcgcccaactgtggttgcggtttggtcttgtgcatggcgaggtacgtatccttcgccaggaatttcatgtatccggcggggaaattcatgattgggttgggtttggcggggccgcgctcgaggatgagcacgcgcgccttgccatcggccacaagtctcgcggcaacgacgcaggcggaactgcctccgccaacaatgatgtagtcgaactgaccagtaccgggcatgcgattctccagctatgcgcgacgtattaaatggcttgtggccgaagccgaatggatcccgagagcgtctcgccgggttccagccgcctgagatcaccgagaccgggaagattatgcccgttcgccagatgcgacattggctcgaagcagaaataatcccgcttgaatgaaggatcgaacgccgtatcggaaacgaagacgaaggcgtgcttgaacacggggtccgccgtcagatgaagagcggtgtggcgctctggccatgatacgatcgcctcgccgcaccagtcctcgaatccgttgtttacccaccgatgcggaagttcggacggcctgctgaaatcgaggtcctcgggaatgtttgtcgcctctccgggcagccagccctcgacctcggtccagaacttcgaagccggggcgaagagcgttgtctcagctgtcatcggaaagtatggatgccagccgatgccaaacggcaaggccacttctccgcggttctccactgccaacgtcaaaaccagtgcgccatccttcaacgcgaaggactgcgtcgcatgatatgcatagggcgtatggccagctcggtgcgtgaagccgagctcgaggtgatcatcgccctggctatcgatcgcccattccgactgccatccctcgccatggaggtaatgctcatcccatggggtgtttggcgtgaattgataccccctaccctcgtacacgaagcggttttgccgaacgcgatttccgaagggcaccaggggatagcatcctgatgatagcgcgtcggcatcatcagaccgagccgggcgcaacagcggcaccttgcccaagtcactgtcttgccagaagccgagcacaagggcgcccgtggtcgataccttcagtgacagcgagcctgacgtcagttcgattgcggacatgatatgcgctcagcccttgtttcgcgacatgctgcgcttgatcgcctggatgtttgccagcacggcgatgacgataatgagaccacgcacgacctgctggaagaacgggttgataccgagcagtacgaggccattaccgatcagtgtgatgacgagcacaccaagaagcgttcccagcatggacccgcggccgccggacagcgatgtgccgccgaccactaccgccgcgatcacgtcgaattccaagccggtggcagccgttgcattgcccgatccgagacgcgagacgagcaggatgccggagattgccgccatggcgccggcaatggcaaataacgcgacccgaattttcgatacgctgatgccgctcaggaacgcggcatgcgcattgccgccgatcgcgaataccgaccgaccgaaggctgtctttctgctgatgaacgcgaagaccgcaaacagcaccagcatgatgattgccgccggcggcacgccgaacagcgagcgatcgagcgcgtccagcatgtcgttgcgaccgatggagacaggcagcgcatccgtgacgaacagggccgtaccgcgcagcgcgctccacaggccgagtgtggcaacgaaggatggcacgtcgcaataggcgcgcagcgcgcctgcgatggatcccagcaaagcaccgaccacgatcgcgagcgcaaaggccagcggtgtcggagcaccccactgcaggaagaaagccaatacgacggaaatgaacgccaccatcggtccgacgctgacgtcaatttcgccggcgatgatgatcagcgtggccgcccaggcagcgatgccgatcgtggcggcatcgcgcaggatgttaatctggttgttgaacgacaggaagccgttcgcggacgaggtaaacacgacgtagagaacgatgatggcgacgaagaggctcaactcgttcatgtgttgcgacagaccaaagcccgacttgctggattttgatcttgaggacggcttggccgtctgttcgagtgacatctggtgcctccctcaatgtccgctgatgcaggcggccatcacggcatcctgatcgatgttgggtgatatgaactcgtcttttagcgtgccgtctctgaggacgaggacgcgatcgcacacaagcggaagttcctcgatttcgctggagacaaagatcacgctccggccctcggccgcgagttgacggatgattgcatagatttgcgccttggcctcgacatcgacgccacgcgtgggttcgtcgagaagtaggatacggctgttggcatagacccagcgaccgatgacgaccttctgctggttgcctccggagagcgtgccgatcggcgtgtcggtgcgcgctgccttgatatgcagccgatcgatcacgcgccgtgttgcttgcgccatcatccggctcgacaggacacctgtcttgctgacaccggagaagttggtcgagagcgtattctcatcgacacccagcaacgggacgatgccttcttccttgcggctctccggtgtgtagccgaagccacggcgcagcatctccttgtagcggccaggcttcacggtcgcgccatcgacaagcaactgaccggcatcaaaacggcgcacaccggcgatcgactgcaacagctccgttcgcccggagcccagaaggccggcaatgccgagcacctcgcctttcctgagtgcgaaggaaacggagttcagcttaggcgcaagcgccagatcccgcacctcgaggacgaccttgtcactgccggtgttttcaagagcggccgtccgcgaagcttccgatcccagcatcagccgaacgatctcgcgcgtgtcggcgcccttgacgtcaaccgtgtcgatgatgcgcccgtcacgcatcacggtcgccgaatgcgcgatctggcggatctcgttcatgcggtggctaacatagatcacggctatgccctcggaagcgatgcgcgtcaccgcggccatcactttttccgcttcggccgctgcaagcgagcttgtcggctcgtccagaatgacgatcgtcggcttgccgacgagaacacgggcaatctccagaagctgccgttcggcggggctgaggccagcaaccagcctgttgggaggcaggtcgaggcccagccgtcccatcgcttcggctgccgcggcttccatctccgcatattggataacgccgcccttgcgcggccagcggccgaggaacaggttctcggcaagcgtcattcctggtaccaggctgagttcctgatagacaacccgaacacccttttcgaatgactcctgagcgcgccccgatccggcatgcgacagttccgcgccgttgatcgaaaccgatccgctgtccgggatttcggcaccggtcagcatgcggatgagcgtcgattttccggcgccgttttttccgagcagcgcccggacttcaccggccgccacctggaacgtggcgttgtcgagcgcaagcacgccagggtagcgacgcgtacagccgatgacggatgcaacgatgggcgatgacgctggctgaagattggtagcttgtgtcataggtctttccacttatggagcgatgccgccggtgggccggcggcctctttcttcaaggcaagcgagaggatccgcgatcaggggatgccgtccgcgtgtgccttcagccaagcctttccgtcgtcggaagacttgtagaggtcgatgtcgtaggcaaccttgatgtcggccggagcctgcccgtcaatggacttgatcgcctgggccagagccaacttgcccaacccctggccggagatgtcgaccacggccttgatgaccgtgaagtctgaaagttcctgtgcgatttcagtggtcatgtcgccgccgaagacgacaaccttgccggtcttgccctggctcttgaccgcgcgagcggcgccgagcgtagcgccaccggcctcgccgaagaacgcatcgatatccgggttggaggaaagcatggtgctggcgacggataccgccttgtccagaacggcaccttcctggttcgcgacgatctgggcgccgggaaccttggctttcagggcatcttcaaagcccttgcggcgcgtgacgcacacttcgacaaattcacaattgaggaccgcgatcttcggcgcatcctttttctcggcgatgaagtaatcggccgctgcctcgccgagcttgtgtccaaagtcgtaggggtctccgacggcataggcggagatatattccttcatgtcggcgtcgttgaggcaggtattatagcagaccaccgggatgccggcgtcatgcgcgcggcggatcgcgcggtaggagccgtcggcggaaacgggcgagacgatgatcgcttgaacgccggcggagatcagtgaatcgatgaacgacgattccttgctgacatcgccctgcgcattggtttccaccacgtccagtttgcgcccggcgtcgttggcgccagtctggatacccttgcggacgccggcatagaagccctgggcatccatgtagatcgcgccgaccttcaggtccttgtcctgcgcaaaggcaggggctgcgcttgacgcagcaagggcgctaatcgccgccaatgcgacgcggctgaaacgtttcattttttcctcccaacaaaattgaccaccggcgaaggccaaggctcatctgccgccctctccacgacgactggaaactattcatcatcgtacaaatgtcaatataaatacgatttattttcggagttttgcctggatttgacgctgggtcgccgagaagacccgagttctcgtcaaattcacgtataataaatcgtatttatttgacggtttatcggcgattgactactgctgcatgttgcgggcatttgcaggagatgaatcgggaggacacgagtggcaggcgcaaggacggcacgcaatctgacggaagacggcgacccaatcgcagcacgcggaaagcgcagtgtccgcgaggcacttctgcatcacttcgtcgagaagatcgtttccggcgagatggcggagggctccaccttgcccaacgaggctgagcttaccgagcgatttggcgtcagccgcacgagcttgcgcgaggcgatgcagtatttgtccgcgctcgggcttgtacggtcgcgtacgcgggcgggaacgacggtgctgccacgcgagaactggaactatctcgatccgctggttctggatgtgctgctgtccatcggcagcgacgagaacttctacatgtcactgatcgacgcccgccagttgcttgagcccgcggccgccgcgcatgcggccgcgaatgcaaccgcacgccaactctaccagatctccaaggccttcgaggacatggtcgaggccaattcacgtgacaacgaggcctggagtcgcgccgacctcgagttccatacggccattatcgatgcgagcggcaactgggtctatcgccagttcgccagcgcaatccgcgccgcgcttctggcgagcttccgtctgacgaaccgcgccagccagtcacacgagcaggcgatcctgaagcaccaggacgtgcttgaagcaatcagaatgcgcaggccggaggccgctcggcacgcgatggagcagctgatcggtgtcgcccgaagcgagatcaccgatgcgcttcgcaaggttcgcgtgtgactacaaggctgttgtcgcggaggcttcattcttccggccggtgacgtctcattgatctgaccgcgctatcgctcatgtccagcagtggcgacacgattggcaaccccgcttcggcaagcgaccggttggcaacgaccggatgctcagatgaaaggatgagcgtcccctcaccgttccgccggaatgtcagcgcggcggcctggcggcgtcggatagccactcgaaaccgacagcggcttcgttcgcaagcatttacgctggttccgtcgcaagctccagtatgcgccgcgcctgccgcaggtgcggtgcatcgatcatccggccatcgagttgaagcacgccttttcccggattcgcttcgaatgccgcgacgatggctcgggccttttcgacgtcggcccgcgtcggcgagaaggcctcgttgataacggggatctgagagggatgaattgccatcatcccggtaaagccatcgcagcgcgcccggtgcgcgtagcgccgcaggccctctaggtcgccgagtgccgggtagatggtctcgatggcagcggcgccggcggcgtgaccggcaaacaatgtcagggagcgcagcatttcatagggatgggtatagctgccatcctcatttcgcgaccgtgtcgcaccgatcgccgctggcagatcttccgccccccaggtcaatcccaggatcaggtgacgaacggccgcatagcttccgagctggaagattgccgcgggcgtctccgtcgcgatcggcatgatcggcacaccgggggcgagcgccgccaagacctcgacacttgtgctgccctcggccttcggcaagacaagcgcatcgggccgggcatcgagaatggtcgcgagatcctgctccagaaggccactccccagtgagttcacccgcacaaagagcttggtccgccgttcggccgatcgcaggaacgtcgcgacagcctctcttgccgcgagtttctcgacaagcgcaacggcatcttccagatcgagaatgagggcatcggcggaaagcgcgagcgccttccacatgcgatccggacgatctcctggcacaaagagcagtgagcgcaacctcatgtcggtctcctttgcaccagtgcggtgcgcaggcatctgcaaaccacttcgccgcgctgattgatcaactcgtgctggaaggtaacgatgccggccgtcggcctagatcggctgtccctcagatcggcgatttcggtttcggcgcgcatcgtatcaccgatgaaaacaggtttcggcatcacaagcttgtcatagcccaaattggcgatgagggtccccatggtcgtatcgccgaccgaaagcccgaccatcagcgcgaaagtgaaggtgccgttgaccagtatctggccgaattcgctggctttcgctgcttccgcatcgagatgcagcggttgcggattgtgggtcatggcggagaagaggagattgtctgtttcggtgaccgtgcggcggatctcgtgcgcaagcctgtcgccgattgcccagtcctcgaaatgccgcccggccatcactggtctccttccagctgcatgaggacactgccttcgacgacctgggcgtccgcgagggctttcatctccgaaacgacgccatcgaacggcgcgctcagcgtctgctccattttcattgcctcgatgacgacaagaggctgacctctagtgacgcgatctcccctggcgaccatcagcgcgatcaccctgcccggcatcggcgcgacgatcgcaccatcggaatggccggcactccctcccgcatgaccggcgcgtggcgacccataagcccaggcttcgccatccagaaagagcacgccggcatcgatcaccgcaggctcgccaccatcgcgcagttccacccgatatgttgcaccgccgacctcgacgccgatttcccgcgacggcggcgcgttcatccgcaagccgcttgccatcgtccatatatcgccgcccaatttcggcaggatcgcccgtgccgccgcttgcagcacgcgcccgctgggttcggtcggcgggatgagatcggtcgcgtgtctttcgatgaagccggtatcgaccgtgccggccttaaaatcgggatgatcaagcgtgcgcgcgaggaaggctgcgttggtgcgcacgggccagacctccacggaaccggccgcgcgggccaatcgccgcgccgcgtcctgtcgcgtcgcgccgtggctgatcagcttggcgatcatcggatcgtaataggagctgatctcattgccttcctcgacaccgctatcgacccttatgccatcgggaaaccgcaaatggctcagccgcccggtcgacggcagaaagccggtggacggattttcggcatagagcctcgcttccatcgcccatccgttgatcgataattgctcctggcgcagaggcagcggctcgccggatgccaccaggatttgccattccaccaaatcctggccggtgatggcctcggtcacaggatgttcgacctgcagccgggtattcatctccatgaaccatatgcgatcggcgcgaagtccgtcggacgaatccgcgatgaactcgatcgttcccgcgccgacataatcgaccgcgcgcgctgcctggaccgcggccttgcagacagcctctcgcgtcgacgcatccatgcccggcgccggcgcttcctcgatgaccttttggtggcgtcgctgaagcgagcaatcgcgctcgaacaggtgaacgacgcttccgtgtgtgtcgccaaagatctggacctcgatgtgccggggcgagaggatgtatttctcgagcagcacccggtcatcgctgaaggcggcaacggcttcacgccggcagctggcaagcgccgctggaaattccgctgcgctatcgacccgacgcatccccttaccgccgccaccggcgacagccttgatgaggacaggatagccgatcgcttccgcctcgcgccgcagtcgttcgtccgtttggtcctcgccgagatagcctggcgtgaccgggacgcccgccgcgatcatccgcttcttggctgcatccttcaggcccatggcccggatcgaagccgccggcgcgccgacccagatcagaccggaggccgtgacccgctctgcgaactcggcattttccgacagaaagccgtatcccggatggatcgccttcgcgccagtcctgatggcggcctcgatgatcctgtcggcattgagatagctctccttggccgacgccgggccgatgcataccgcctcgtccgcctcgcgaacgaagggcatgtcgccatcgatctcggagtgcacggcgatcgtgcggatcccgagccgtttcgccgtttttatgatcctcctcgcgatctcgccgcgattggcgatcagcaggctgtctatcacggtctctcctctccctgccttcgcgactacatgcgaaacagaccgaactgggcgcgctctggtatcggcgcattcagcgtcgccgcgaaggccaggccgagcacatcgcgtgtctgagcggggtcgatgatgccgtcgtcccacagccgcgcggttgcgtagtaggggttgccctcgtcctcgtacttccgccggatgggcgccttgaaggcttcggcctcatcggcgctccagctctcggcatcgcgatgcacggtcgccagaaccgaggccgcctgctcaccgcccatgacggaaatgcgcgcattcggccaagtaaacagaaagcgcggctgataggctcggccgcacatgccgtaattgcccgcgccgaagctgccgccgatcagcaccgttaccttcggcaccgatgccgttgccaccgctgtcaccagtttcgcgccgttcttggcaatcccctcggcttcatattttccgccgaccatgaagccggagatgttttgcaggaagagcagcgggatgcgccgctggcaagcaagctggatgaaatgggcgcccttcagcgcactctcggagaagagcacgccattattggcgagaatggcgaccgggataccccagatacgcgcgaaaccgcagaccagcgtggtgccatagagcgccttgaactcctgcaactccgatccgtcgacgatacgggcgatgacctcacggacgtcgtatggcgtgcgcacgtctcgcggaacaatgccataaagctcctccggatcgagcttaggcggctgtggctcggccacctcgatatccacccgcttcggccgattgagcgtggcgacgatgtcgcggacgatcaggagcgcgtgctcgtcgttttcggcgacatggtcgacgacgccggatttccggccgtgcgtatcggcaccgccgagttcttcggcggatatgatctcacccgtcgccgccttcaccagcggcgggccggcgagaaagatcgttccctggttgcgcacgatgacggtttcatcggacatcgcgggtacgtaagccccacccgccgtgcagctccccatgacgcaggcgatctgggcgatgcccgccgccgacatccgcgcctgattgtagaagatgcgcccgaaatgatcgcgatctggaaagacctcggcctgatgcggcagattggctccgcccgagtcgaccagatagatgcagggcagtcggttttcccaggcgatctcctgcgcccgcagatgcttcttcaccgtcatcggaaaataggcgccgcccttcaccgtcgggtcgtgcgccacgatcatgcattcgacgcccgagacacgcccgatgccggcgatcatgcccgcgccgggcgcctcgtcgtcatacatgccattggcgacaagctgtccgatctcgagaaacggcgagccggggtcgagaaggcgctggacgcggtcgcgcgggagaagcttgccgcgctcgacatgccgctcgcgatgcttttcggaaccacctcgggctgcctgcgccaccttggatcgaagtgtctccaccagagcaagattatgcgcatgattggcggcgaaggttttcgagctggaatcgagcatggtctgcagttccggcatcagcccctcccctcagcacctatgacttcgcgcccgatcagcatgcggcgcacctcgttggtaccggcgccgatgtcgagcaatttcgaatcccgccaataccgctccaccggccagtctttcgtatatcccgcgccgcccagagcctggatcgcctgctcggccactttgaccgcactctccgacgcataaagaatggccccggctgcatcatgccgcgtcgtcttgccggcatcgcaggctcgtgccactgcgtaaacgtaggcgcgggcggaattcagtgccacgaccatgtccgccaccttcgcctggatcagctggaaactcccgatcggggctccgaactgcttgcgctccatgatataaggaagcaccacatccacacaggcctgcatgatgccgagctgaatacctgagagcacgacgcgctcgtagtcgagcccggacatcagcactttaacgccgccattcagcgggcccatgatgttttcttccggaacgaagcagtcgtcgaaaaccagttccgcggtcggtgagccccgcatgccgaccttgttgatcttctgcccgatcgagaaaccctcaaaacccttttcgaccaggaaagcactaatgcccttcgagccaccatcgggaacggtcttggcataaacgaccagcgtatgggcataaggcgcgttggtgatccagaatttggtgccgttcaggcggtaaccgccatcgaccctatcggcgcgcaggcgcatcgagaccacgtccgaaccggcgcccgcttccgacatggcaaggctgccgacatgcgcgccagatatcagaaagggaaggtatcgctgcttttgttcggcggttccccatcgcgaaatctggttgatgcagagattggagtgcgcgccataggacaggccgaccgatgccgaagcgcggctgatttcctcgcacgcaataacgtgttcgagatagccaagcccaaggccgccatgctcttcgggcactgtaatgccgtgaaggccaagtgcgcccatctcgggccagatttcgaccgggaacaagtcttcctcgtcaatcctcgcggcaagcggggcaatacgctctgtcgcaaaccgatgcgtcgtctcacggatagcctccgccatttcggataacccgaaatccaactccagcatgtcgccagtcctcccagaccgcgatcatgctaccgcgacgaatgcgattagtaaaatcgtatcaacgccatcgcctcctggcaggttgccggtaggcacaatgggctacgccttgcgccgcgccaaaatctcggctgcgaccagcgcctgcaggcgccataggttacggtcgcggatgccctccgcctgaagatcgacgatcgtgttgtgtagatactcggcgcaggagccgccctgaccgcaggctgccgcgatcagcgaggaagcttccgccgccggcagcggtttcgtcagtccggcccgcttggtgctggcccagaatgtcagggcttttttggcgccgctttcagttctgaccggaagccagcgcaccatgtcgatcacttcactatacttgatctcgcgcgcgacgagcgcgcgcagatcctggcggcggcgatcggctgaaagctcgaaggcgataccatcgcactggccgccgcgctcaagcgccatcatcagcccgggctggtcgctggttgcgcgccagcgctgaattttcaaggagaacgacctgtgccagccataagcggtggctcgttcgcggctggcgggttcgaactccgggttccagatcagggacccataggcaaagacgagaagaggctcacctgccgcttcgcgttcaatcctgtcgacgagatcgtcaagctcagcttccgaaagcggcgtccagcccggctccggtccgtcatcacggacatctcggatggtcagggcaacaagttcgggcgtcagctgcatggtggtatcgatctgtatcaggtcaaggaaatggagcaactggccgtggcggatgtctgccacgaccaggtcttttcgttaggactgcacgaaagcgagcaagtcggcgttcagcacatcggcattgacagtcagcatgccgtgcgagaagcccgggtaggtcttcagcgaaccgttcttcaggagcttggccgacttcagcgcggagtccgcgatcggtacgatctggtcgtcttcgccgtgcaggacgagcgtcggaacggtgatcgccttcaggtcttccgtctggtccgtttcggagaaggccttgatgccgtcatagtgcgccttggcgccgcccatcatgccctggcgccaccaattctggatcacgccttcctgaaccttggcgccatcacggttgaaaccgtaaaacgggccggccggaacgtcacggaagaactgcgcacggttggcggcaagcgcggcacggaagccatcgaacacttcgatcggcagaccctcggggttgttttcggtcttcagcatcagcggcggaacggccgataccagaacagccttggcgacacggccggccggctggccgaacttcgcgacatagcgagcaacttcaccgccgccggtggaatggccgatatggacggcgttcttcaggtcgagcgcctggacgacggcaaatgcgtcggctgcgtagtgatccatgtcgtgtccgtcggcaacctgcgcggagcggccgtgaccgcggcgatcatgggcaacgacgcggtaacccttcgacaggaagaacagcatctgcgcgtcccagtcatccgacgacagcggccagccgtggtggaagacgattggctgtgcgtccttcggaccccaatccttgtagaagatttcgacgccgtccttggtggtgatggtagccatttcagtatttccttctgttttagtgtttgcgggcgcagcgctcgctgcgaatgtaaaggcgggtgagattgccatggtcgttgcggccgcgccggcggagagcagtgcgcggcgacgcgtcatggaagaaaaaatctcggtcatttcatatcccgtaatcttgtcgtttcaagcttcagacgacgctgttgctcggctgatgactggaaattgccacggatcgagggacgcaaacaattgcactaatgctttcgatttaattgcctaatttgcaacaatggagaagaaggtttcgggtgaccggcgatgagagactttctggtcggttacgagccgatcgcgcgtcgatcccgcgagccgtcgatcaaggcaggcgcttctgccccacctatgctttgctacctcaattgcgtcagttctctcacgcgatgtggctagtggtttgccagctcgcacggatcatcagtcctcaacgccggaaaggcccggctgcgagcaagcgtctcagctgaaatcacccaattcttcgtggatggccgaaatgatttcggcgcgctgctgcgcggatcgaccggcgtgagcagcgtaggtcagtgccagaagtcttaccgtgctgaggattgtcgtatgcgaaggaccgagggcgaagctcgcgacatggcaggacagaacgactttggaataacgctgagcctccagcatcgaggtgcggtcggtgatggtgatgacattgagacggctcgtcgcggcagctgagaatcggccgcgaaatcggctgatgtggcggcagcgtcaccaggatcagcacgtccttcgggccggtcatggcaagggtcctcgtcccacgatccctgattgatgccgaggttcatcacattgtgacgaagccgcgccgatcagttcggcggcctggcgtaccttgtcggagcgcatctcctcgaaggtcttggtcaaatcactcagctcaagttccaaaagggcgccgatcgtgcggccaagcgcaacctgttcgggctgggtaacggaatagccataaggttcggtgcttggcgagcgccccgatactcaattggtcgcagcgagcgataacaattctcaaggtgacgttttcgcagatcgactgcgcgctctggcgcaggatgtcggctgctcatatcgtcgattgcgaccggccgccgaggaccggaacgacgtggtgaaacagtccggaaggttcgcttgacctccctttatcctgcggcatagacgagccgtttcgacggttagtgtctgttcgggtcgttttgagactgcttcaatggaagatcgttggggtcggtgctacggaccacccgcacgctgccgcggattgcgagccagatgcagctcagcattgccgctggcattccccattcgaagatcactccggcataggtcggccacggttgcccggcgctcaagccgtcgatcagatatcggtatccaccaagaatgaacgacagcagggttgcccaaccgataagcaggaggagcagattgagcgccttcaatttgaacagcttggatggtccgcgcagggggatgtagccgcgttccctagtgcgatcgatgaaggctgcaactcgccgagcgtcgttgaaaaatcgatggtcgggacccacgatccagctgcaaagcacgtgacgagcaattgccagtatgaaaaaaatggatgtgatcgcaaagaccgcggatgcaaatcccttgccgtgattagggaacaaatccaccagcgggacgccgataatccagatcggcagggttgcgcccaccacacgcaacgtcccgagattggcttcgatgtttcggagccgatgaagctcgaagattgactgctgggccattgagggctcccccagtttggatttcggtgatccatatgattgccacagtctatgggttgtggatgaccccggcaaccggcaacttccttcatgcggacattaaaatgcgtcgcctcatatcgtcgcccgccatagccctcgcggccactgcatagctgcattgcgcaataaatgttttccaggtggtcaatattcaggcataacgcctacagctaatgcatatgacggtttcctcccagttccgtcgcattggctgttcccctctggaggttttttgaccttcaaactttatgggccgcggctttcgccgtcggcccttttttcttcccgcgacgctggcatcattctgatacgatcagttgctcaagaggcgtcggtcggcgtcgtgctcgcgcttggcgccggcaacttcaagcttgaagtcgcaggattatgctcgacggcatcggcgccgaaacgatcggtgcgatcgtgctctatcacgcattgggctggtcgaaagtctcgggtcgcacgaacaacaatgcgtagtagcgattgctctgtgcacgagcacaagagatcgaggccgcctcgtgagaggcggcctttctgctcgtttctaccgtcatctggccggaagactgatttcgaaaattgatatggatctatctgcgcctggacgatcaatggttcgcttccgacggccgaaagggagttggctcaacaaatcgaacacctagcttagcccgctctcatccgcatcatcatgcgaaagttgcgaggggtgtcttccgtatggtgtttgaaaacagcgtagaaacgcgcgggggaaccgaaaccacagtcatgtgcgatctcaaggatcgggtcgtcagtctccgccagccgttgcatggcacgcgacaaccgaaaccgcgtcaggtactccatgacagatatccctagcacgttgcgaaatgccctgttggcggttgtgggatgcacgcgagctagcttcgcgatcgatgcgagcgtcagtggttcacggtagcgcttgctgattatctccgtgagagcctgcgtatagcgtatacccggaccggcgagcgccgtcgcttcgcggcgggtgatgccagcgtctgcatggtcaaggataagccggcgcacacgaagagcaacctcatcgctgaccagttgccgccgcgcctgatcgccagcggaccattcacggacccaccgggcgcctgaaagcgtcgcgccttcggcgggattgggctcctgtatgaacgccccttgcaggatggcctgtctggcggttgcctcgatcggcattgccagaaagtccgcgagcggaagataggcgcagacgagcggtgattgtggcgtcacgacaatcgtttgatgggggatcgccgcccagaacaagaccagacgccccgcctcgacatgctcctgctttccgttgaaaaggtaggtcatcgagccctcgcgaagcagattgatctcgatgtgatcgtgccaatgcgctgacgtcatcgtatcggccatatgctcttcaacgagaaagtcgcgtggtgagccgagccacttgccttgcgtaccagcttcttctccgttcatcgtcgtctgctccgatccgagaataatttccctattatcgagaagaaagtcccaattaaaaggggcatgaaaggtcgatctcatcaaaggagaaccttatgccaaagatttgcctcgtcggagccggaagcacggtctttgcccagaacattctgggcgacgtgctatcgacctcgtccgaccatgattatgtaatcagccttttcgacatagatccggagcgtctgaagacgtccgagattgtcgcgcgacgcatatgtgaggcgctgaagttgccctcggtgcggatcgaggcgacgctcaatcgtcgcgaggcactcaagggctcggacttcgtcatcttgatgatgcaggtcggtggctacaagccagcaacggtcacggatttcgacgtgccgaagaaatacggcttgcgacagacgattgccgataccctcggcatcggcggtatcttccggggtctcagaacaatcccggtactcgaggccatttgccacgacatggaggaggtgtgcccgaatgctttgttgatgcagtatgtcaacccgatggcgatcaattgttgggccatcaaggagatcgctccgaccatccgcaatgtaggcctgtgccatagcgtgcaacacaccgccggccaccttgcagcgtgccttggagagaatatcgacgacatcaactacgtctccgccggtatcaatcacatcgcgttctttctcaaatacgagaagatcggagcgaatggtggccgcgaagatctctatccgaggctgaaggcgctggcggatgagggcaaggctcccgccgacgatcgtgtccgtttcgatgccctgaaacggctcggccatttcgtcaccgaatccagcgagcacttctcggaatatacgtcctggtacatcaaggatcgccggccggaactggtggagcaactcaacataccgctcgacgagtatatccgccgatgcgaggtgcagattgccgaatggcatgcgttgcgcaaggacctcgagggtggcaagccgatcgaggtgtgccgcagcaacgagtatgccgccggcatcatccacgcggccgtgaccggaaagccggcgctgatctatggcaatgttccgaacaacggcctgatcgagaatcttccgccggaatgcatcgtcgaggtgccctgccatgtcgaccgcaatggcatccagccgacgcggatcggcaggattccatcgcagctcgcagccgtcatgcgattgagcatttcggtgcaggaactgaccgtcgaggcagcgctgaccggtaagcgggaccggatctaccaggccgcgctgctcgatccgcacacatccgccgagctgtcgcccgacgaaatctggcacatggtggatgatctgatcgaacaacacggcgacctgctgccaaagtatcactgagcacacccctacccttttcagcggcgccttgtttaaggcgccgttttctttgtgcgcaaggaaaacgatcataaaaaatcataatagtgattgacattgatcttttcaaatgaaaacctgattgaaattataaagccaaaaagggagcatgccttgaaccagagcggcggcctcaagaccgatcggcaagacctcatccgcagtcatctgtatgcgaacggattttccacgatccaggacatcgcggatgcggtcggcgcttcgctcgcgaccgtgcggcgcgatctgcagcttttgcaggaggctggtgcgatcgatcgggtacacggcggcgcccgcatcgccgaagggtcttcggtggagctcgcgtttcaggagcgcgagaagcgtcaattggctgccaagcgcgctattgcgaatgcggcccacgagcgccttcacccccgcaccgcaatcttcctcgatgccggcacgacggtgctccagctggccaagctgatccgcatcaatcccatgccgctgcgtatcttcaccaacgggctgatcgtggcgcaggagttcatgaacgtcccgaacctcgacgtcgtcctgctcggcgggcagttgcgcagcgaaaatgcatcgctcgtcggcccccaggccgaagccatgctggaaacgatctggttcgaccagctgtttctcggcgcgagcgcggtgagcaatgatggcgcgatctatagcgtggacagcgccgaagcgagcctcaatcggaagatgctcacccgatccagccatcgcttcgtactcgcggactcctcgaaattcggcacgacggcaacctacaaggtggcgccgctgaacagtgccaagctgatcaccgatgccgatctgtcgaaggactggcgcgcgcagcttggcgaccttgccgtcgagacaattttcgccgaccagggagcgaagtcttgagcaccgacctgatcctcggcatcgacggcggcggcacaaaggtgatggtggcgcttgccgatcgcagcggacgcatccttcgtaccggtttgggtggtggcgtcaacgccatggacaatccagcctggcggaccgaactcgaggcgcggatcgaaccgtttcgcggcgaaaggcgattgaccgccgtggcggccgccttgcccgtttacggagaggtcgcccatctttcccaacagttggaagaaaccatcgcgcaagccttcccgaatgcgcggacacgcgttctcaacgatgtcgatgccgcccatctcggcgcgctcgccggcaagtcgggtattctcgtactctctggaaccggttccatggcctgggcgcgcaatgcagggggcgaagccgcccggaccggcggctggggcgacatcatcggcgacgaaggcagcagctactggatcggcaggctggcgctcaatcttgtcagccagagcctggatggacgtctgccgccgaccgccttggcaaaggctgtctttgatcaccttcaactcgacccaaccaacccgatggacagcctcggtgcctgggcgacgtctgatgcgaaacggtcaagcatcgctgcgctgtccgccgtggtcgacaaggccgcactaaacggcgacacggccgccattgttctcctcgacctcgcggcggacgagctcgccaagcaccaccgtgcgatcgccggccactgtgaaccgggagccgactggacatttgccggcggcacgttccgaagcacgatccttttgaaagccctcgagcgacgcatcggtcgccccccgattgctccgaaactacccccgatcggcggagcgctcttcgctgccgcccaacttctcgactggcccatggacgaaggctggatcgggcacgtcgtcgcatcggcaaatgcggcgtttgcgcaataaaatcacgtaaattcttgataacaaagaaggatgggaacatgcgtaaaacaatcttatcactgctcgcttcagccgccctggccgtcgctcttccggcggccgcgcaagacaagccgcttgccggtgaatcgatcaccgtattgatgccgtcgccgcagggccccgatattgccgccgcgttcgaagccgaaactggcatccacgtcgacctgcagacgctttcctgggacgatatccgcccgaagctggtgacggcactggttgccggcacggcgccggccgacgtgaccgagttcgactggtcctggacgggccagttcgcggcagccgactggtatatgccgcttaacgatgtgatagacgcggactccaccaaggacatcggcgttgccaagatcttcacggtcaatggaaagctgcttggcgtcccctattcgaacgacttccgcgtgatgctcatcaacaagaagcatttcgcggatgccggcatcaccgagaccccgaagacgctcgaccagctggtggcagcggccaagaaaatcaaggaaaagggcatcgccacctatccgatcggcctgccggtgtccgcgacagagggtgcctcgacgagctggtacttgctgaccaaggcatttggcggcgagctgttcgacaaggatttcaacccgctcttcaccaagcccggttccgccggctacaaggcgctggcattcgaactgatgcttttgaaggaaggcctggtcgatccggcttccaccggtctcaaggatagccagatcaacgagggtatgttctcccagggtctgaccagcatcatgatctcgggcgaacccggccgtcttggacagatgaacgatcccaagcagtccaaggtcgccggtcaggtcgaggcgatcctggttccgaccgaaagcggcgagactcgcagcttcggcctgccggaggcgcttgcgatcccgaacgtctcgcccaacaaggaagcggctgttgccttcgtcaagtggttcacgagccgcgaattccagaagaagaacatggcgaacggcttcctgccgacccgcacgtcggcactggccgagctcaactcggaaggcaagctgaacagcggcgatgcgctcgtggcgcagtctaagacggtcgaggcgctgttcccgcagggcacgcccccttggtacccgcagttctccagcggcgtgaacaccgcgatcaacagcgctgccaagggtcagatgagcgttgaccaggctgtcgaaagcatcgcctacgccgccaagcaggcgatggcgcaatgactgctgtcgcctataaggagaccgcggccaagaagggtgtcggcttgaatgccgacaccattctcggcgtgctgctggtgtcgcccattctcatcaccatgacggcgctcgtcttctatcctatggcgcgaacgctttgggacagccttcaccgggtcaatccgatgcaggccggcacgcccttcgtcggcctggaaaactacacgcgcatgttgtcggacgcgcagctcggcacgacctgggtcaacacgctcatctatgtcgtgctcgcagtgctcgcggaaacggtcttcggcgtgctcgccgcctcgctgatcaatcagttgaaggtcggccggcagtgggttctcgcggcggtcattcttccctgggcgcttcccggtgtcgtcaactccgtgatctggctatggatctatcagcctggcgcgggcctgctgaacggcatcctcacctcgctcggccttcccttcgaaaaccacgtctggttcaacgatcggacgagcgcgatcattgccgtcaccgtcgtgcatgtctggcgcatgatgccgctgacgatcgtcatcgttctcgcggcgatgcagagcattccctcgcatctttatgaagcggcacgcatcgatggcgcgacacgcccgcagatgttcgcgcttgtcacgcttccgcttgttcgtagcgcgatcgcggttgccatgaccaacgccacggttaacgccttcaatcttttcgacgaggcctgggttcttgccggctccagtctcgagacgcgaccgatcctcgtgcagatttatctggagaccttccagaacttgcggttctcatacggcatggcgctttccgtcgtcatcaccttcgtctcgcttctcgtctcgctcatttacgtccttcgggtctatcgcaacacacggttcgactgatgaaacccacccttctttatcgcctgatgatatggatcggcgtcgccgtgctattgatctggtcgctcggtccgatctactggacggtcgccagttcggtgacgccgacggacgacttctccgtccggccaatcaacttcttccctcaacatttcacgctagatcactactctcggctgctcggcatcaacgtcgatcgtatcggcggcgttgaggtgtggcggcagtttcgcgcggcgctcttgaacagcgtcgtcacctcggcggccgcgacgctcctttgcgtggccatttccgcgctgggcgcctacgccttcacccgcatacgcttccccggccgcaacgcgctcttcggccttgtggtcgcgacgctggcgatcccggcctatgcggtgctgatcccgctctaccagatcatgatcaagatgcatctcgtcgatacctatgtcggcgtcgccctgatctatgtctcggcctacctgccgctctcgctctggctactgcgcagcgtcttcgaggccctgcccctggcgctggaggaagccgcgcagctcgatggcgcgggacgtctctacatcttcttcaacatcgtgctgccgctggccggtcccggcctgaccgctgccgcgatcctcaccttcctcggcgcctgggggcaatatctcgtgcccctcatattctcgccgcaggcgaccaagccactgactgttctcattcccgagttcgtcacgaaaaacttcatcgactacgggctgatcacggctagcggttccatcgcgatcgtcatccccgccctcgtcgtcatcttcctcaaccgatacctcgtcagcggtctgctggccggctcggtcaagtaatcggagccaccatgaacacgaccgaaaaagtcatccgcgagcagttccccttctgggagaaggcactgggctctaacaccgcgaccacgcgcgacgacgtgctcgtctatgtcggctgcggaacatcctactacctcgccatgtcgctggcggcccatgcgaacaatgccggtcgtcgtgcgatcgccgtgcctggcgctgaatggctcaatcgtccatcattcttctggccggactggaagaacacgcatgtcgtcgcgatctcgcgcagcggtgaaacgaccgagacggtcgctgccgccaagaagagccgggaaaacggcgccttcgtcaccgcgctgaccgtcgaggccgagagctcgcttgcaaaatgcagcgacgacgtcgtcgcctcgccgacccacagcgaggaaggcatcgtcatgtcggtctcggccagcctcatgctgctgcttggcttgcagatgatcggccatgagatccccgcatcggccgtggcatccgcaaaagagctcgctgatgcgctcgacgcttcgctcagcaaacaggttctcgatcgcagccatttcgtttttcttggcggcggtccgcttttcggcctggccgccgaaggcgcgctgaagctgatggaaatgagccaggtcctgacccagcccttccatccgcttgaatatcgccatggcccaatcagccttgtggacgagaagaccgcgaccgtcatgctctacagcaccgaccagaaggatgccgaagccaaactcgtcgaagagctgcgggaaaagggcgctatcgtcatcggcctcggcggacctggcgatatcgaactcgctgtcgacgccgatctttcgctcgccgcactcgtcgttctccctgccctgcagatgctcggtgagcgtgtcgcgcaatcgagaggcatagacacggtatcgccgcgacacctgaccaaggttgtaacgttggtatgagcgacgccctcgatcaaaatcgtgagcgcgcgctctccaagctttttggcgcgcgccaacaagccttgccgcgcgggataacgtcagtgtgctcggcacatccactcgtgatcgaggccgccttgcggcgggcggcacgggaaggcaccgtggtcctcatcgaggccacctgcaaccaggtcaaccaggaaggcggttatacgggcatgactccggcagccttccggcggttcattgagcggatcgccacagaggtcggtttcccactggagaggatcatcctcggcggcgatcatcttggtcccaatccctggaagaagcagggtgcggacgaagccatggctcaagccgaggtaatggtcgcggcttatgtcgaggcaggcttcgagaagctgcatcttgacacgtcgatgggatgcgctggggaaccgccggcgctcgacgacgaggtaaccgccgaaagggcggcacgtctggcacgggtcgcggaggaaacggcacgccgcatccggcaacggcctccggtgtatatcatcggcaccgaggtccctccacccggcggcgcgacgcatgcgatcaaggagcttgaggtcacctctcccgatgccgccctgaagacgcttgccatccacgcatcggctttcgagaaggctggcgccggagcggccatggaccgcgtgatcgggatcgtcgtccagccaggcgtcgagtttgggaatgcgaatgtcgtcctttacaagccggaccgcgcccagggattggcatcgtcgctttcccggatgccgggactcctcttcgaggcccattcgacggattaccagaccgttgccgagctttcggctctcgtcgatgacggtttcgcgatcgtgaaagtcggccccggcttgaccttcgcactgcgcgaggcgctctacgggcttgatgccatcaggcaggtacttgatggcgggtcggatagcctgcatgccgagatggaagcgatcatgttgagccagccgcgacactgggcgggtcactacacagggtctgccgaggaactgaggctgcagcgccacttcagctacagcgaccgtatccgctactattggcccgacaggcaggctgccggcgcggtggaaacgctgatgcaagcgcttcccgatccgatcccggaaacgctgatcagccagtatctcgctcgtgtttatcctgacgtcgtgacaggacgcgtggcgccacgagctcgcgatctttgcctcgccgcaatcgatgcggcgctggcgccctattccacggccacggccagccagtaaatttcaagtggtgcggcaggctgccggtacggcggccacacgtcacacagtttcagtcggagagaattatggcgtcagtcagcgtcgcgaatgcccgcaagaactacggtcacctggaaatccttcatggggtcgatatcgacattcaggacggcgagttcgtcattcttgtcggtccctcgggctgcggaaaatccacccttctgcggatgatcgcgggcctggaggagatttccggcggacgcatctcgatcggtgggcgtgtcgtcaacgacgtcgccccgaaggagcgcgacatcgccatggtgttccagtcttatgctctttatccgcatatgacggtggaggccaacatgggcttttccctgaggttggcgaaggcaccgaaagaagagatcaaggcacgcgtgcgtgaagcagctcaaattctcgggctggaaaaactgctcgaccgccatccaagaaacctgtccggcggccagcgccagcgcgtcgccatggggcgcgccatcgtgcgccagccgcaggtcttcctgtttgacgaaccattgtccaatctggatgccaagctgcgcgtccagatgcgctcggaaatcaagcaactgcaccagcgcctcaaaaccaccaccatctacgtcacgcacgaccagatcgaggcgatgaccatggcagacaagatcgtcgtcatgcgcgatggtcatgtcgagcagatcggatcgccgctcgacctctacgacagcccgaccaacctcttcgtcgccggcttcatcggttcgccgggaatgaacttcatcaaaggccagatcagtgccgaaggtcccatcgagtttatcgcgaatggagacgcgaggttgcccattcccgccgacgttccagtcacccgcggccagcaggtcatctatggcatccgcccggaacatctgacgatcaaccagggtggcgcgcaggctgacgtcaccttgatcgaaccaacgggcgctgaaacgcagatcacggctggccttggagacgtgcagatcgtggcaaccgtccgtgaccgtcttgcgctgcacgctggcgactcgatatcgatcgcaccagagctgaccaaagtgcaactcttcgatgcagttaccgagaaggcgttgcgagtgtgatgggaccgactgactgtgaccagcgataagccgttgcagcggcggttgacgctagcgcgacaggcgccccctcatcgtcgatccgtgtgagaccttcggatttttgacaaagtttgccaatatcagtaatgaagatcggacagatggaggcctgctatggcgacaatgaatgtttctctccctgacccgatgaaggactgggtcgaggcgcaaaccaaaaccgggcgatactccaatgccagcgactacgtgcgggacctgatcaggcgggaccaatcgcgcaatgacaagattgccgcaatgcagcgcttcgtcgacgacgggcttgaaagtggcgtcggtactcgatccaaagaccaactctttgccgaagctgcggctcgcgccggcaactcatgagtttcaagctctcagtcgaggcagaagaagacattattacaatcgcggcgcaaggcgttcgtctgttcggcgtcgcacaggcgcgacgttatcacgatgatctctacggcctattggatctgatcgcaggcaatccgcttatcgcccgcgaaagagacgaaatccatccgccggttagagttcatcctttcaaggctcatctcgtagtttatcggatcgaggacgacgattcgattctgattatccgaattcgacacggtcatgacgattgggcgagcgatgcattctaaattagcgcagcctctgtattcccctgtgccgtgtctggcttacccggcgtctaaaagaaagagccgatgactttggccatagacgccgtgaagtgactatccaaccttggctacgcagagatgcctctcgctagtaggcgccttacttg

SEQ ID NO: 17 - DNA, 81726 bp, Rhizobium matallidurans
  source 1..81726: mol_type = genomic DNA
aggcatccatgtcttcgccgatcatctgcgcgacgccggccatgtcgtccacacgccagatctcttcgacggccatgtcttcgccagcatcgacgagggcatggcctatatcgaggcggcaggcttcgatgcgttgcgcgagcgcggcgtcgaaatggcgcggaacctgcccgccgagctcgtctatgccggcttctccttcggcgtcgtgccggcgcagcagctggcgcagacgcggcccggcgcgcgcggcgcgcttctgttccacgcctgcctgccgatatcgggcgaatggtccttcggtccctggccggagggcgtgccggtgcagatccatgccatggacgccgacccgatcttcatgcgcgaaggcgatatcgatgccgcccgcgagatcctggagcatgtaaaggacgcgagcctcttcctctaccccggcgaccagcattatttcgccgacagctcgctcccctcctgggattccgacgccgccgagctattgacccgccgcgtcatcgatttcctgcgccacgtcaacggcgccggcgacggcccgccgtaaacgagaaacggccggcggatgatgcatccgccggccgcaacgtctggggttgggagcgttcatcgcatatgaacgtttcccggcactttctatgtcagacgctcagtcctcgttcgccgccagctgcgacagcacctgcccgcgcccgcgcaggcgcaggatgagggggatgatgaaggcggcggcggcgacgagcagcaggcccgccgcgatcggcgacatgaccagcgtcgtcacatcgccctggctgatggcgagcgcccggcgcaactgctgttcggcgagcggcccgaggatcagccccaccaccgccggcgcgatcggatagccgaacagccgcatgatgtagccgagcacgccgaatgcgagcagcatgccgagctcgaacaccgacggattggcgccgatggttccgagcgtcgcgaacagcaggatgccggcatagagccacgtcttcgggatggtgaggaggcgaacccagagcccgatcatcggcaggttcagcaccaggagcatggcgttggcgatcaacaggctggcgatcaggccccagacgagctgcggattgttggcgaacagcaatggcccgggctgcagcccgtattgctggaagccggccagcatgatcgccgccgtggccgaggtcggcaggccgagcgtcaacagcggcaccagcgtaccggccgccgacgcattgttggcggcctccggtccggcgacgccctcgatggcgccatggccgaattcctccgggttcttcgccagcttcttctcggtggcgtaggacaggaacgtgccgatctcggcgccgcccgccggcatcgcgccgatcgggaagccgatcacggtgccgcgcagccaggccttccacgagcggccccagtcttccgccgtcatccacagcgagcccttcacggcctcgaccttttcctcgatgctgttgccctggccggcgatgtagagcgtctcgccgatcgcgaacatcgcgaccgcgagcgtcgtcacctcgacgccgtcgagcagatcgggaatgccgaaggcaagccgcgcctgccccgtctgctggtcgataccgaccatggcgagcacgaagccgacgaacagcgaagtcaacccgcgcagcgccgaatccccgaaggccgacgacacggtgacgaaggcgagcaccatcagcgcgaaatattcgcgcggtccgaacaccagcgccagcttgacgatatagggcgcgatgaaggcaagcccgagcgtggcgatcaggccggccacgaaggagccgatcgcggctgtcgccagcgccgggccgccgcgtccggcgcgcgccatcttgttgccctcgagcgcggtgacgatcgaggagctttcgcccggcgtgttgagcaggatggaggtggtcgaaccgccatacatgccgccgtaatagatgccggcgaacatgatcagcgatccggccggatcgagctggtaggtcacgggcagcagaagcgccacggtcagcgccggcccgatgcccggcaggacgccgacggcggtgccaagcgtcacgccgatgaaggcatagacgaggttcatcggctgcacggcgaccaggatgccctggaacaggaattcgaaggtattcatcgcctatttcctagaaaaacagtcgctcgagcggccctgcgggcagcgtgagcttcaggagctgcgagaagatcacccagacgatgaagctgaaggcgatgccgaaggggatcgagaaccagagcttgcgctgcccgaatccgcgcgcggtaaaggcaaacagcaggccggtggcgatcgagaagccggcggtcttcagcagcagcatctgcgccgcgagcccggcgatgacccagacgacggggccgatttcctggcgctcgcgcttaggaaactcgccgcgaaacgcctcgaagatcgtccagatgccgagaccgatcagcccgaaggccacgaccttcggcgcggtcgccggcccgatgcggtcgtactgcgcgatgacgcgcatgttcgaggcgtcccacagcatcacggcggcaacggcgaaaagacagatggcgatgacaagcgccgcccagtcggggcggcgcttttctgccacgggttctctacccatgctcattgaacaagtccgatgtctttgaggatcgtttcagtcgccgagacatccttgtcgagctgcgccttgaaggcgtcgccggcgaggtaggtgtcggcccagcccttggtcttcagcatctcctgccagctggcggacttcgacagcttgtcgaaatcggcggtcacggcggcggtctgctcggtcgagaggccgggagcggccgcgaccatgcgccagttctgcaggctgacgtcgacgccggcttccttcagcgtcggcgcgtcggcgccttcgatgcgttcgtcgccggagacggcgagcaggcgcagctggcccgacttcacctgcgattcgaattcgccgtagccggagatgccggccgtcacctggccgccgagaatggccgccagcgcttcgccgccgcccgagaacgcgacatagttgatcttcgtcggatcgacgccgaccgccttggcgatcaggccgaccgcgatatggtcggtgccgccggccgagccgccgccccaggataccgagcccggatcagccttcagcttggcgacgaggtcgtccatcgtcttgatgtcggaagaggtgggaacgacgatcgcctcgtattcgcccgtcaggcgcgcgatcggcgtgacgtccttcagcgagaccggcgacttgttggtcaggatcgcgccgaccatgacatagccgccgacgatcagcgcgttcggattgccgttgttctggccagtgaactgcgccaggccgatggtgccgccggcgcccggaacgttcatcacctgaacgttgcccgagatgccttccttctgcatcacctgctgcagcgagcgcgcggtctggtcccagccaccgccgggagcggccggcgccatgatggtgtaatcggcggcaaaggccggcagcgcgatggcggccgcaaacatgcttgtcaggaaaatatgcttcaagagactgtcctccatgagcgcggcggagcaccgcgcattgttctcgatcggatcgggaaggacagcgcccacggatgctggacgcgtccgaaacatctggcgaaactcctcccgaaacttcccctatccgcctccacggagttgaagttcgtcaaaagggaccacaacaagctgtcatttagctgacgtcccgcgcttatccagtcacgcgggacacttttttgccgcaattcgaattgggagccgaaatcgcaaatttcgcatacgccgcgggaaccgtttgcggccttcgacgttaggccgatgtaataggggaaatcgcgccatgagcacgcatatcgacgtcaaccagatcaacgacgaccgccagaacgaccgcctgcgggaagtatggagcgtcaccgaattctcgcgccgccaccggctggaacaggacgaggaaaagcgcctcttgaagctcttcgggtccttcgcgacgaagcaggaactgctctccaacgcccagcgtccctgccgcttccgctagactaggaggcgtgcgaacaggttcgatacgggaaacacacggccctcggcatcgccggggcctttcgtctggcgcctgcgagcaaccacacgcgacagcgatagagcgccgcatccatttccggaaaatcaggattgaaactgcgctagacagcgcgggggttcaagacgccagcggcatcaggaagcgtggcgagatcagcgatttgccgaagcggatcgcggcggcgtaatcgagcgcctccgacaccttctccggccaatgcggcttggacacgacaccgacggcgttgcggttgtcgcgcaccatctccggattgccggtgacgaagacgacggtgacgccatgctcgctggacagccgctcggcgatcgcggggccggtcacgccgtcggcaagctgaacatccaccagcgccacctcggcctgctcggcaagctccagcgcttcatccagcgttcgggccgggccgatgacggtgtgaccgagatcctcgacgatggattcgagatcgagcgcgatcagcaattcgtcttcgacaatgagaatgttcatgcggtattgcccatatccgtggaatgcacgctagcctgaaacccgaaaacgcctgacggcgcgattggttcccgacctttccaatttcctaatatggagcccgagggttaaaagaatagtatgcgcgccgcaccaattttggggtgtgaatgttcagtacaaagcccggatatcccggcaaagccgaggaaaccgggcggcaatatacttatgcaacccacccgatataattgccccgaaacaacacgcctggcgcttattggcgatcgtccgacgcttactgcgtgcgcagcacctcgttccagcgcgcgatcagccgcgcccgtttcacctgatcgagatagaccatcagaccggggctgacgggcaccggcctcagctgcgcgccgagcagcgcctgcatcgtgttggcggtgttttcgccggttacttcgggactgacggcgggaatctgcagctcgcgcgccatgaccgtctgcccctccttcgacatgaagaaggagagatagcgccgcccgagctccggattggcggccgcctgcggcaccagcccgatcctggacatgaccaccgtatagtccttcggcagcacgatgccgacttgcgggttgcgcttggcccaatccgccgcgtaggagccgagaatgttgtagccgagcacgaagcgcccgtccgacacacgctcgaggatcgccgagctcgtcgaataaagcttcacgcccgccgcccccatggcgccgatcaccgaccagatgtcgccgaactgctcctggtcgcgcgccatgaacaggaagccgacgccggagcgttcgatatcgtaggtgccgatccgcccgtgcacggcgtcgcccttgcgcttgaggtagtcgacgaattcggcgcgcgagctcggcggctgttcgttgacgaagctcggcttgtgatagacgaagacggcgggctcgaaggtcagcgcataggcggtgttgcgccagttcgcccatttcggccagagcccgctcatcggcaggttgctcggctgcgcatagccgtcgttggaaagcttcacctggaggtccatggccgacgagaaggcgaaatccgcagttggtttgccggcgtcggtctccctgacgatgcgatcgtagatctcgcccgtcagcatgtcctcgtagctgacggcgacgtcgggattggccgcctgaaatccgcggatcatcggctgcgccagcggctcgtcgagcgaggaatagacgatgagcgtcggggccgtggcattgcccgagaccgccggatagaaaaccggctccgccagggcgagccccggacagatcagcatcagcgcaagtaacggcagtctcctcatccatcaagaatgcatgactgcgatggcgcgcacaagggagcacctctcttcacgcgatttggccctcaccgcatgccgcgcatgccacatgcccgtccaaaggcgtaaccgtcgcgcgcgacaaaaacagccaaagacgttagacttcccaaagcacccgcctgaaccaccttcccggatcattcggaggacgcattggagcgccgactgacagccatcctcgccgccgatgtcgtcggctacagcaggctgatgggcatcgacgaggccggcacgctgaaggcggtcaaccgtcatcgtaccgagctgatcgaaccggcgatcgcccgccatcgcggccggctggtgaagctgctcggcgatgggctgctcgccgaattcggcagcgtcgtcaacgcggtcgcctgcgccgtcgacatccagcgcggcgcggcgcgggacaatgacaatgtgccggaagaccggcgcatccgctttcgcatcggcgtcaacctcggcgacgtcatcgtcgagaacgacgatatcttcggcgacggcgtcaatgtcgccgcaaggctggaggccgtggcggaacccggcggcatcgcggtctcgtcgtcggtgcgcgaccatgtcggcgcccgcctcgatctcggcttcgacgatcgcggccggcagacgctgaagaacatccagcaggaggttcacgtctatgccgtccgcttcgaccgccccgccgacacgaccggcgatcgcaagccgcgaacgcccgcccccgaaacgacggccggcgacgaccgctcgatcgtcgtcctccccttcaccaacatgagcggcgatcccgaccaggagtatttctccgacggcctgaccgaggacatcatcaccgatctctcgaagatctcgggcctcatggtgaccccgcgcaacaccaccttctcctataagggccgcagcgtgaagatcggccagatcgcccgcgaactcgcggtgcgctatgtgttgcagggcagcgtccgcaagtccggagcgcgggtgcgcatcagcgcccagatgatcgacgccttgaacgaggaccacctctgggccgatcgctacgaccgcgacctcaccgatatcttcgccatacaggacgagatcgcccatgcgatcgtcgggcaattgaagatcaagatgcggccggaggaagtgcgcgcgcttgaaagcgaccccaccaccaatgtcgaggcctacacctactatctgcgcggccgcaagttcgcccgcagcatgaccatgtcctatctgatcatggcgaggcgcatgttctacaaggcgatcgagctcgatcccgactatgcccgcgcctatgccggcatcgccgattgcgacagcgcgctttacatctggtacgccgccgaactgccgatcggtgaaattctggagatgacggaaaaggcgctcgcgctcgatcccgctctcgccgaggcgcatgccgcccgcgccatcgcgctgcatcacgcggaccgcgatcaggaggccgacatctatttcgcccgggcgctggcactcgatcccaatctcttcgaggccaattttcacttcgcccaccgcctgttcaagcgcggccagttcgaggaggcgatcgtctatttcgaacgctcggcggcactctacgccgatgactatgtctcccccgtccttctcgccgccgcctgccgctcgctcggaagcgacgaggaagcccgcaactgggcggccgaaggggcggcccgcgccgaacgctccgccgagcagaaccccggcaattccgcccccgtccaccgcgcggcgctggcctacgcgcagatcggcgaccgcaaacgcgccgtctcctggatcaaccgcgcgcttgccatggacccgcacgacgtcatcacccgctacaacgccgtctgcgtccacgccgtgctcggcgacaccgaccgcgccatggaactcctgcagcagctgctacccaacagctccgcctaccagatcggctggttcgaaaacgattccgacctcgacaacatccgctccgacccgcgcttcatcaagctgatgcaagcgatcgcgcggcagtgagagccatcgcacgaccgctcaaggcaacggccggatccaagcaccgctcatgcgcccgtcatcggccagaacgaaccgccactccatcttctcgttttcaaacgtaacgtcgtagacgtcccagccttccgaggtgacgcccttgaaaaggtgatcctgtagaaggccggccttctccaggtctgccttgattttcggcgcctgttcgcgcgtcgcctcagcgagcatatcggtcatcttgtcgaaatcatattcgccttgcgtagcctcacgaataaggctacgcagccgcgcctagctatcgggcgccggacgtctctctttgaccctacctgcaagctcggcagcgatcgtcagcgccagctcttcattgatccgcaacgccgtctgttcgtagccgttctgatgcagcaccagactgcgcgctgttcctccgccgtcgcatgtgaaactcagttgcgccgcgacgacgcgcaggaaaaacaggtcatccttctccgcgaatatgtcgagcggatcctgacccgtgagttgtgccgacagcccgccggaccttatggagatcgtcataaccgcaccggtttcaaatcgatagaaacccacatagcgatcataaagcgctggatcggttggcacttcgacacgtggacgcgcttgttcgtaacgtcgccatgcaacggattcgctgccaccatcgctcatgtctgtctcccttgctattcggatgatgtcgtggattgcaaccgactcgcccaaagcgattcgtctgcgcgaagtctggatcaacgccagcccctcatcggcacgccgccgcacagccatcattgttgcctcttgcatggccaacgtccgatccaaatccgccgtgtgccctgcaagcagatcagtaatgtgggcaaggctaagcccgagacgtttcaaggcgaggatttcatgcagccgcgcgatatccgagatgccatacaaacgccagttcttacccgttcgtcgcgggttgataagccgccgcgtctcgtagagtcgcagcgcacggacggtcagacccatctgctctgcgcactcggctgcggtcagccagcgatcatcattgacttgctcactcatagggcctccagcaaccgttataggctatgaccttagggccggctcaagtaccaccgcgaacaattttgccgcgtctgcacataggctccacccgtgacatcgccagcgccgccctgtagtctccggcaaaaatcaggggaacatccgtgcgcattctactggtcgaggacaatatcgcgctggccgacgggctgtcggccatcttgcgcggcaccggccatgccgtcgacgtagtccatgacggcgcctccgccaatgccgtgacggcggccgaaaacttcgatctcgtggtgctcgatctcaacctgcccgagatggacggcctagacgtgctgcgcgccatgcgcgcccgccagaaccaggccgccgtcctgatcctgacggcgcgcggcacgccggaggagcgcgtcagggggctcgatcttggcgccgacgactacctgatcaagcccttcgacatcgccgaattcgaggcccgcgtgcgcgtccttttgcgtcgccaggccggcctgcattcggcgaccgtcagcttcggcggcctgtcgctcgatctgaattcgcgcgccttcttttccggcgccacaccgctcgacatccccgcccgcgagctcggcctgctcgaaatcctcttcatgcgcgccggcaaggtcgtttcgaaggaagcgatcatccagtcgctgaccgccttcgacgacgatatttccgccaatgcgatcgagcaatatgtgagccgcctccgcaagcgtctcgcgccgcatgggctgacggtgaagaccgcgcgcgggatcggctactatctcgacaagctccccgccccctcttcgacgggcgccccgccaccgggcgccgtcactcccgaggcgccatgacagcggcctattcgcttcgccgccggctgctcttctggctgctgatctcgaccgccgtcatcggcatcgtggcgctggccgatacctaccgcgaggcggtgcagacctccaacatcgtctccgaccgcgtcctcgccggttcggcgctggcgatcgccgaacgcgtcgtcgtcgccgaggatggctcgctgcaggtcgacataccctatgtagcgctggaaatgctgacatcggcggcgcaggaccgcgtcttctaccgcgtcgacggcccgcccggccagttcatcaccggctaccaggcgctgcccgtcatcaagcagacgaagggcgacggctccgtcttcgccgacgacctcttccgcaacgagccgatccgcgtcgccaccctcaaccgttcggcctcgacgggcatccgctcggtccccttcaccgtcaccgtcgccgaaaccaccatcgcccgccgccagcttgcccgcgccatcctgctgcgctcggcgctgcgcctctccgtcatgatcctcggcgccgccatcatcgtctggatctcggtcaccgtggcgctgcgcccgctttacaagctgcgcgacgcgatcggcgaacgcagcccggacgacctgcacccgatcgagcaatccgtcccgagcgaggtccagccgctggtcgataccgtcaacggcttcatgatccggctggagcaggcgctggacgcgctgcgcaacttcaccggcaatgccagccaccagctgcgaaccccgctcgccatcatccgtacccagctggcgctatcggcgcgcgccacctcgctggcagacgcccaggccgtcgcgctgaagggcgatcaggccgtggcgcatgccgagcgcgtgctcgcccagctgctcctgatggcgaagatcgacgccgccacctcgcgcgaggcgctggcggcgacagcgatcgacctcaccgcgatcgcccaggagatcaccggcgaactcatcccgaccgcgtccgccgccggcatcgatctcggcttcgagggcgacggccaggagatgatccgcgccgaaccgctgctgatcggcgaactcctgcgcaacctcgccggcaacgccatcgcctatgccggccacggcgccgaagtcaccgtccgcatccgcggcttggaagatgccgtgctgctcgaagtcgaagacaacggccccggcatcccgcccgaccagctagaagccgtccgccgccgcttctcccgcgccgaccaatccggcgcccccggcgctggattgggcttgccgatcgtcgaggagatctgcgggttgtttggtgcgacgctggcgctggaggcggggattggcggcagggggctgagggcggtggtgaggtttgggcggctgtaagtttatgcgagttcaattttcggtggagcccggagcccccctcatccgcctgccggcaccttctcccctttgggtagaagggactcgtggcccgccgctcgcgccaacctccccttccccccagcggggggaaggtggcccgaagggtcggatgagggggccacgcggtaaaacagcagaccatctagccacacccacagcacttaccttgaacacccatccccgccttgcattctctcgctgcattgcacacactgcgaccgggaacagcaaaatgccgtacaacgatacggccgcggataaggcagtccatgtcgatcaaagccagcatctatcacctgacgcattacaaatacgacaagccggtccgcctcgggccccagatcatccgcctcaagcccgcgtcgcattccaagactcgggtgatcagccattcgctgaaggtgtcgccggcgaaccatttcgtgaacctgcagcaggatccctacggcaattatctggcccgctacgtcttccccgacccggtgaccgagttcaagatcgaggtcgatctcgtcgccgacatgacggtctacaaccccttcgatttcttcatcgaggagagcgccgagatgtggcccttctcctaccccgaggagatcagggacgacctgaagatctacatgcagccgcagccggtggagccggcgctggcagcctatctcgccggcatcgaccgcacctcgatgcgaaccaccgatttcatcgtcggcctcaatgcgcgtctcaagaacgacgtcgaatatgtcatccgcatggagcccggcgtgcagtcgccggaggagacgctgaagctggcgctcggctcctgccgcgatagtagctggctgttggtcgaaatcctccgcaatctcggcttcgccgcccgcttcgtctccggctatctcatccagctgacacccgacctgaaggcgctggacggcccctccggcaccgaggtcgatttcaccgatctccacgcctgggcggaagtctacatccccggcgccggctggatcggcctcgacccgacctcgggcctcctgaccggcgaaagccacatcccccttgccgccacgccgcactacagcaacgccgccccgatatcaggcgcgctctacggccacgccaacaccgaattcgccttcgacatgaaggtcacgcgcgtcgccgagcatccgcgcatcaccaagcccttctccgacgacagctgggacgaactcaacgcgctcggcgccaaggtcgacagcatcctgcaggccgaagacgtccgcctcaccatgggcggcgagccgaccttcgtctcgatcgacgatttcgaatccgccgaatggaacaccgaggccgtcggcccgaccaagcgcgaaaaggccgatatcctgatccgcaagctgcgcgagcgcttcgcccccggcggcttcctgcattacggccagggcaagtggtatcccggcgaaagcctgccgcgctggaccttctcgctctactggcgcaaggacggcaagccgatctggcgcgatcccgagctcatcgccggcgagggcaaggacaccggcgttgcggcagacgacgccgccaacctgctcggcgccatcgcccgcgaactcgccatcgaacccgacatggtgctgccggcctatgaggacccggccgaatggatcctcaaggaaggtagcctgcctgacaatgtcgatccctcgaattccaagctcaaggacccggaagaacgcaaccgcatcgcccgcgtcttcgagcgcggcctgacgacgccgacgggctatatcctccccgtccaggcctggaacgctaaggcatccggccagcgctggatgagcgagcggtggaagacccggcgcggcaagatcttcctcgtgcccggcgacagccccgtcggctaccgcctgccgctcgggaccctgccctacgtgcccccggcccgcttcccctatctccacccggccgacccctccatcccccgcacgccgctgcccgacgtcttcgtgccctcgggccgagccatgccggaagcctcgcgtcatagcgaggaggccggccagagccgcgtcgagcagacgctgggcgagatcggcggcgccgtgcgcaccgcgatctcggtggagccgcgtgatggccgcctttgcgtcttcatgccgccggtcgagcgcatcgaggactatctcgagctgatcgcggccgccgaaaacgccgccgccgagctcggcctgcccgtccatatcgagggctactccccaccgcaggatgagcgcatcaacgtcatccgcgtcgcaccggaccccggcgtcatcgaggtcaacatccacccggcctccaactggcaggactgcgtggcgatcaccagcaccgtctacgaggaagcgcgccagtcgcgcctcggcgccgacaagttcatgatcgacggccgccacaccggcaccggcggcggcaaccatgtggtggtcggcggcgccaatccaggtgacagcccgttcctgcgccgcccggatctgttgaagagcctggtgctgcactggcagcgccatccctcgctctcctacatgttctctggcatgttcatcggcccgaccagccaggcgccgcgcatcgacgaggcccgccacgacagcctctacgagctggaaacagcactcgcccagatccccgcgcccggcaagggcatcacacccctgccctggatcaccgaccgcctgttccgcaatctcctgatcgacgtcaccggcaacacccaccgcgccgagatctgcatcgacaagctgttttcgcccgacggcccgaccggccgcctcggcctcgtggagttccgcggtttcgagatgccgccgaatgcgcgcatgtcgctcgcccagcagcttctcgtccgcgccctcatcgcccgcttctggcagcacccggccgatggccgcttcgtgcgctggggcaccacgctgcacgaccgcttcatgctgccgcacttcgtctggcaggatttccaggacgtgctcgccgacctgaaacagaacggcttcgacctcagcccggaatggttcaaggcgcagctcgaattccgtttccccttctgcggcgaggtcgaatacgagggctcgaagctggagctgcgccaggcgctggaaccctggaacgtcatgggcgaggaaggcgcgatcggcggcaccgtgcgctatgtcgacagctccgtcgagcgtctgcaggtgcggctcgagaccagcaattcttcccgttacaccgtcacctgcaacggccgcaccgtgccgctgacgccgaccggcaccgctggcgtctcggtcgccggcgtccgcttcaaggcatggcagccggcgtcgggattgcacccgctgctgccggtcaacacgccgctgaccttcgacatttatgatacatggtcgaagcgttcgatcggcggctgcatctatcatgttgcccatccgggcgggcgtaactatgacaccttcccggtcaatggtaacgaagccgaagccaggcgtctggcgcggttcgagccatgggggcatacatcgggcggctatatccccgcgatcgagaccggatcgccggagttcccgctgacgctggatctgcgacgaccggcaggcatttagacgcattagactaggggtccatgggcaagaaaccggcaagagagctgcggcaagacaagagcgagcgcatcggcaacgaggcggtgctcggctatcgcccgccgcctggcgtcgccgacgagatggtcgatcagaacggcgcgatccgcccggtctggcagcgcttcatggcgcatctgagcggcatgccggaaaaggacctgaccgagcgcttcgcccgcgccgaccgctatctgcgcgatgccggcgtcttctaccgcgcctatggcagcaccggcagcgccgaacgctcctggccgctttcgcccatccccgttctgatcgacgagcgcgaatgggaaagcctgtcggcaggccttgtccagcgcgccgatctcctggaagcgatcgtcgccgatatctatggcgacaacaggctggtcgaggatggcgtgctgccgccggcgctgatcgcctccaatccggagttccagcgcccgcttgtcggcgtcaagccggccggcggccactatctgcatttctgcgccttcgaggtcggccgtggccccgatggcaactggtgggtcctggccgaccgcacccaggccccctccggcgccggcttcgcgctggagaaccgcgtggcgaccacccgcgccttctccgacatctacgccgaaaccccggtgcaccgcctcgcctccttcttcggcgccttccgcgatgcgctgcagggcatgaagcacagcggcgacgaccgcatcgccgtgctcacccccggccccgccaacgagacctattacgagcacgcctacatcgcccgttatctcggcttcatgctgctcgaaggcgaggacctgaccgtcgtcaacggcaaggtgatggtgcgcaccgtctccggcctgaagccgatcaccgtgctctggcgccgcctcgattccgcctatgccgatccgctcgagctcaaccagacctcgcacatcggcacgccgggtctcgtggacgcgctgcgcgccgaaagcgtcaccatcgtcaatgcgctcggaagcggcatcatcgagacccgcgccctgctcgccttcatgcccaccatctgtcgccgcctcttcggcgaggagctgaagatgccgtcgatcgccacctggtggtgcggccagaagagcgagcgcgaccatgtggcccataacatcgagaagatggtgatcggcccggcctattcgcgcgcgcccttcttcgacgacaacggtgaatccgtgctcggctcggcgctgcgcgccaccgcccgcgattcggtcagtgactggctgaacagcgatggccccaagctcgtcggccaggaagccgtgacgctctcgaccacgccgagctgggtgaacggcaagttggtgccgcggccgatgtcgctgcgcgtcttcgccgcccgcacaaagaacggctggcagatcatgcccggcggcttcgcccgcatcggcgccggcgacgacgtggcggcgatcgcgatgcaatcgggtggcgccgccgccgacgtctggatcgtctcggacaaacccgtcgagcgccacacgctgctccccaccgaggcgagcttcacccgcaacatgccgggcagcctgcccagccgcgccgccgacaatctcttctggctcggccgctatatcgagcgcgccgaaggggcgctgcgcatcctgcgcgcctggcacgcccgcttcgccgaggccgccgatccgagccagccgctgctggccgatgtcagcgcctatctcgccgccgtcgacatcgacaccgaggacgcggtgcccgacacgctgctgcgcaacatcgacagcgccgtctattcggcaagcaacatccgcgaccgcttctcgccggatggctggctggcgctgaccgatctcgccaagaccgcccgccgtttccacgcgacagtgtcgcccggcgacgacgccagccatgcgatgacgatcctgttgcgcaagctcgcgggcttcgccggtctcgtgcatgaaaacatgtaccgcttcaccggctggcgcttcctgtcgctcggccgccatatcgagcgcgcgctgcacatgacccgcctgctcggccacatgtccggccccgaggcgcccgatggcgcgctcgacatgctgctcgagatcggcgacagcgtcatgacccaccgccgccgctacaacgtcaacaccgcgcggctgaccgtcaccgaccttctggcgctcgacccgctcaatccgcgctcgatcctcttccaattgaacgagatcctgcgcgaggtcgagcagctgccgaacgcgcttaccaacggccagatgtcgcccttctaccgcgaatccatgcgcctgcgctccggcctcgccgtcatgacgcccgagaccatgaccgacgacgtctatcgcagcctcgaacgcgagctcgagaacctctccgatctcctcgcgcaaacctatctggggtgatgttgtgctctacgatctgtcgctgcacatgggctatagctacgattggcctgcctcaggcgcccgccacatcatgcgcctgctaccgctgtcgctgcccgatcgccagcgcctgatcgcgggctcgatcaaggtgtcgccgacgcccgacgagcagtccagtttcaccgatttcttcgagcatcccgcgacctccttcatggtccgcgcgccccatgagaagctcgacatccgcatgcacgcccgcgttcaggtcgagagccactcgatcacggccgatttctcccccgtgctcgccgatctgccggaggagatatcgggcgtctggtcgctgaagccgggctcgccgcatcatttcctcggcaacagcccgcgcctcatcgagacgccggtcatttcggattacgcccaaggcgtcgtccagccccggctgaccgtgctcgaaatcgccaccgccctctgtgccgcgatccacaaggacttcacatacgacgccgaggcgaccaacgtcgacaccacgccgctggaagccttccggctgaagcgcggcgtctgccaggatttcagccatgtgatgatcctggcgctgcgcagcctcggcatacccgcgggctacgtctccggcttcctgcgcaccatcccgccgccaggcaaggagcggctggaaggggccgacgccatgcatgcctgggtgcgtgtctggtgcggcgagacgaccggctgggtggaactcgaccccaccaacaacatccccgccggcaccgaccatatcgtcgtcggctacggccgcgactactccgacgtcgcccccgtcatcggcgtgctgaagagctatggcggccagcgcgccgtgcaggcggtcgacgtcattcccgtcaagtagcgccggtgaagtagcgccagcaaaacaacgtgaaataaggcggccatccggcctcccggcgaacgccaggaggcgaatccgaccgcatcgtcgccgatttcgcgcgattccgcgcaggaaagcgacaaatcgctaaatttcgaacgaatgcataaagtcgaccgcaacgaatgtggcccatgaatatccgcattaagggcaaccccattctggtgaacatgatgagcaccttgcattcgctgaaggccagcttcgccggcctgctgaaagaccgtggcggcaacttcgcgatggtgacggctttgatcgccaccccattgctgctggcagggggcgtcgcggtcgattattccaatgcatccacgcagaggacgaatctgcagcagattgccgacgcaaccgcgctcgaaggcggcaaggtcttcgacggcaccaatcttgccgcggcaaccaccaccgcccaggccttcctcaagggctattcctcacagatgccaggcaatgtcacatcgacaatgaccgccgatggccggacgttcaaggttgccctgaacgcgtcggtcgacacatcgctgatgaagatcgccaactataactcaatatcgatcggcgcgaacgcagcggcaatatcgccgatgaagccgcaaaagatcacgctgacaccgaccaatgctcagggcttttggtacaaggtcgtatcgatcatcgtcgtacgcccggacacgaccgatgaggttgtactcggcacctatacctaccagcctacaacgcaaaacgatagcggccagggcacgaaggtcatgagcccctccggcgcgatcgatctcgggaaatataccaagctcgtgctgaagatggacatcaaaaccgacggctgcccgctcggcgcctacgctacggtcaacagcaagaaagacgtcacctgcaacgtgatccccgccaaggataagaacaagagccaatattccggttacttctcctacaacaacacgctcagaaccgacaatccggcgaccagcaactacctgtttgttgatggcaagcagatgccccagggcatcaacttcccgctggaaaaatacttcggttgcgcgaagccgcaaagccacgcctgggaagacggcggcggttgggatcgccaggacatcttctacacgatctcgtcggattgcaccgctaccgacagcaactacgtccgcctgacccagtaacatcaatttcatcgcaccaaaaaagccgctccggaacaaaccggagcggcttttcgttgttgtgcaaatccgcctctatcaaaatcagaaagccgataaaaatcaagttctttccatcggcgatgggcggcccgcgtcaatttttccgtttgccggttttcccttgttgcaagtgcgtagtaacggtgcataaactgcagggctagtgcgtgagtaaatcgattgaagcacctataacatactgaaacaaaaccagaattggcgagcctgacgatgacccccgtttcgaagcccaccatcccctctcccgcgccgcgcagttccaagccggaaattctcgcagaagaaatcatcgagcgcctgacctaccgcatcggcaaggatgccaaggtcgccaagccgcacgactggctgaccgccaccatcctcgtcatccgcgaccgcatcatcgacaaatggatggacagcacccgcaaggtctacgccaccggcgccaagcgcgtttactatctatccctggaattcctcatcggccgccttatgcgcgatgccgtgtccaatctcggcctgatggaagaggtgcgcgacgcgctcggttcgctcggcgtcgatgtgtcagtcatcgccggcctcgagccggatgccgcacttggcaatggcggtctcggccgtctcgccgcctgcttcatggagagcatggccaccgtcgacgtgcccgcctatggctacggcatccgctatgtgcacggcctgttccgccagcagatggccgatggctggcaggtcgagctgccggaaagctggctcgcccacggcaacccctgggaattcgaacgccgcgagagcgcctatgaaatcggcttcggcggctcggtcgatgtcgccaacggcgccgatggcgaaccgcgctatgtctggaagccggccgagcgcgtcatcgccgccgccttcgacacgcccgtcgtcggctggcgcggcaagcgcgtcaacacgctgcgcctctggtcggcgcagccgatcgacccgatcctgctcgacgccttcaacgccggcgaccatatcggcgcgctgcgcgagagcaacaaggccgaaagcctgacccgcgttctctacccggccgacgcgacgcccgccggccaggagctgcgcctgcgccaggaattcttcttctcgtcggcctcgctgcaggacatcctgcgccgccatctgcagcagtatgacgacttcacctcgctgcccgacaaagtggcgatccagctgaacgacacccatccggccgtctccatcgctgaactgatgcgcctgctctgcgacgtacacgggctggagttcgaccaggcctgggacatcacccgcggtaccatcgcctacaccaaccacacgcttctgcccgaagcgctggaaagctggccggtgccattgttcgagcgtctcctgccgcgccacatgcagatcatctacgcgatcaacgccaaggttctgctcgaggcgcgcaagaccaagaacttctccgacaccgagatccgctcgatctcgctgatcgaggaaagcggcagccgccgggtgcgcatgggcaatctcgccttcgtcggctcgcattcgatcaacggcgtctcggcgctgcacaccgacctgatgaaggtcaccgtcttcgccgacctgcacaagctctatcccgaccgcatcaacaacaagaccaacggcatcacgccgcgccgctggctgcagcagtgcaatccgggtctgacgggcctgatccgcgaagcgatcggcgacgatttcctcgacgacgccgaaaagctgcgtgcgctcgacaagttcgccaccgacagcgccttccaggagaagttcgcggcggtgaagcgcgccaacaaggtggcgctcgccaatctggtcgcatcgcgcatgggcgtgaagatcgatccgtcggccatgttcgacatccagatcaagcgcatccacgagtacaagcgccagctcctgaacgtcatcgaggcggtcgcgctctacgaccagatccgctcgcgccccgaactcgactgggtgccgcgcgtaaagctcttcgccggcaaggcggcgccgagctatcacaacgccaagctgatcatcaagctgatcaacgacgtcgcccgcaccatcaacaacgacccggccgtgcgcggcctgctcaaggtcgtcttcgtgccgaactacaacgtctcgctggccgaggtcatggttccggccgccgacctctccgagcagatctcgaccgccggcatggaagcgtcgggcaccggcaacatgaagttcggcctcaacggcgcgctcaccatcggcacgctcgatggcgccaatgtcgaaatgcgcgacaatgtcggcgaggacaacatcaagatcttcggcctgcgcgccgatgaggtcgccaagctgcgagccgacggccacaatccccgcgccatcatcgaggcctcgcacgagctgtcgcaggcgctttcggccatcggctccggcgtcttctcgccggatgaccgcaaccgctattccgagctgatcgagggcatctattcgcacgactggttcatggtcgccgccgatttcgatgcctacgcccaggcccagcgcgaagtcgacgatctctggaacgacaaggccgcctggagcgagaagaccatccgcaacaccgcccgcatgggctggttctcgtcggaccgcacgatccggcagtatgccaaggaaatctggagagccggatgaaaacgccgaaggcgacccctgaagtcaagcttccctgggaaatttcggcagatgaaatagcggcaatccttgctggcgcgcattccaatccgtttgccgttctgggcgtccacaaatcgggcagcgtttacgttgcccgatgctacattcccggcgccgaggaggtgaccgcgatgtcgctcgacggcaccgtgatcggcgatctggcgctccagcatccgagcggattcttcgccggcaccgtcgcagtcagcaagcaggtgccggtgcgttaccgcgcccgccgcggcgatgccgaatgggccgtcaccgacccctacagcttcggccccgttctcgggccgatggacgattactacgcccgcgagggctcggatctgcgcctcttcgacaagatgggcgcgcactggatcaagcacgaaggcgctcaaggcatccatttcgccgtctgggcgccgaacgcgcagcgcgtctccgtcgtcggcgacttcaacaattgggacggccgccgccacgtcatgcgccttcgatcaggcgccggcatctgggaaatcttcgctcccgatgtgccgacaggcgtcgcctacaaattcgagatccgtggccaggacggcgtgctcctgccgctgaaggccgatcccttcgcgcgccgcagcgagctgcgcccgaagaacgcctcggtcaccacgcctgagctgttgcaggagtgggaggacgaagcccacctcaagcactggagcgagatcgacaagcgccgccagccgatctccatctacgaggtccatgccggctcctggcagcgccgcgacgatggcacgttcctctcctgggacgagctcgccgcccgcctgatcccctactgcgtcgatatgggcttcacccatatcgagttccttccgatcaccgagcacccctatgatccgtcctggggctaccagacgacgggcctctatgcccccaccgcccgcttcggcgagccggagggttttgcccgcttcgtcaacggcgcccacaaggtcggcatcggcgtcatcctcgactgggtaccggcgcatttcccgaccgacgagcatggtctcggctggttcgacggcaccgcgctctacgagcacgaggacccgcgcaagggcttccacccggactggaacacggcgatctacaatttcggccgcaccgaggtcgtgtcctatctcgtcaacaacgcgctctactggtccgagaaattccatctcgacggcctgcgcgtcgatgccgtcgcctcgatgctctacctcgattactcccgcaagcacggcgagtggatccccaacgaatatggcggcaacgaaaacctcgaggccgtccgcttcctgcagaacatgaacacccgcatctatgccgagcaccccggcgtcatgaccatcgccgaggaatcgacgtcatggcccaaggtctcgcagccggtgcatgaaggcggcctcggcttcggcttcaagtggaacatgggcttcatgcacgacacgctgagctacatgagccgcgagccggtgcaccgcaagcatcaccacaacgagctcaccttcggcctgctctacgcctattcggaaaacttcgtgctgccgctctcccacgacgaagtggtgcacggcaagggctcgctgatcgccaagatgcccggcgacgactggcagaaattcgccaacctgcgcgcctattacgcgctgatgtggggctatcccggcaagaagcttctcttcatgggccaggaattcgcccagtggagcgaatggaacgaggccggctcgctcgactggaacctgcttcagtaccgcatgcacgagggcatgcgccgtctggtgcgcgacctcaacttcacctaccgcagcaagccggcgctgcacgcccgcgactgcgagggcgaaggcttcgaatggctggtggccgacgaccacgagaattcggtcttcgcctggctgcgcaagtcgccgggtgaaaagccggtcgccgtcatctgcaacatgacgcccgtctaccgcgagaactacgccgtcaagctgcccaccgaaggccgctggcgcgaaatcctgaataccgacgccgacatttatggcggcagcggcaaaggcaatggcggtcgtgtccaggcggtcaacgccggcggcaccatcgtcgcatcactgaccttgccgcctctggcggtgatcatgcttgaacctgagacttgagactggtgggaggaagacaatggtagaaaaacgcattcagccacttgcccgcgatgcaatggcctatgttcttgccggcggccgggggagccgtctgaaggaactcaccgaccgacgcgccaagcccgcggtctacttcggcggcaagtcgcgcatcatcgatttcgcgctgtccaacgcgctgaactcaggcatccgccgtatcggcgtcgccacgcaatacaaggcgcactcgctgatccgccacatgcagcgcggctggaacttcttccgccccgagcgcaacgagagcttcgacatcctgccggcttcccagcgcgtctccgagacgcagtggtacgaaggcacggccgacgcggtctaccagaacatcgacatcatccaggactacggcgtcgaatacatggtgatcctcgccggcgaccacgtctacaagatggactacgaatacatgctgcagcagcatgtcgacagtggcgccgacgtcaccatcggctgcctcgaagtgccgcgcatggaagccgtgggcttcggcgtcgtgcatgtcgacgagaccgaccgcatcatcgatttcgtcgaaaagcccgccgatccgccggccattcccggcaagccggacagcgccttcgcctcgatgggcatctacgtcttccgcaccaagttcctgatcgaggaactgcgccgcgacgccgccgatccgaattccagccgcgacttcggcaaggacatcatcccctatatcgtcaagaacggaaaggccgtcgcccaccgcttcgccaattcctgcgtgcgctccgatttcgagcgcgagccctactggcgcgacgtcggaaccatcgatgcctactggcaggccaatatcgacctgacggcgatcgttccggaactcgacatctacgacaagtcctggccgatctggacctatgccgagatctcgccgccggcgaagttcgtccacgacgacgagaaccgccgggggtccgcgacctcctcggtcattgccggcgattgcatcatctcgggggccacgctcaacaacagcctgctcttcaccggtgtgcgcgccaattcctactcgaagctcgagggcgccgtcgtactcccgagcgtcaagatcggccgccacgcgcagctgaccaatgtcgtgatcgaccacggcgtcatcattccggaaggtcttgttgtcggcgaggacccggttctcgacgccaagcgtttccgccgctccgagggcgggatctgcctcatcacgcagccgatgatcgacaagctggatttgtaaacgatgaaagttctttcggtttcgtccgaagtcttcccattgatcaagacagggggcctggccgatgtggccggcgccctgccgatcgcgctgaagcgcttcggcatcgaaaccaagacgctgatgcccggctatcccgcggtgatgaaggtcattcgcgatcccgtcgtccgcatgcgcttcgatgatctgctcggcgaacccgcgaccgtgctcgaggtcaatcacgaggggctcgacatcctcatcctcgacgcgcccgcctattacgaccgctccggcggcccctatctcgacgcaacaggcaaggactaccacgacaactggcgccgcttcgccgccctgtcgctcgccggtgccgaaatcgccgccggcctgatgcccggctggcgccccgacgtcgtgcacgcgcatgactggcaggcggcgatgacgcccgtctacatgcgcttttacccgacgcccgaactccccagcatcctcaccatccacaacatcgccttccagggccagttcagcgccgatatcttttccggcctgcgccttcccccgcaggcattctcggtggaagcgctggaatattacggcaatatcggcttcctcaaggggggcctgaagaccgcgcacgcgatcaccaccgtcagcccgtcctatgccggcgagatcctgacctcggagttcggcatgggcctcgagggtgtcatcgccagccgcatcgaggcgctgcatggcatcgtcaacggcatcgaccacgaggtctgggaccccgccaccgacgccgtgctgcagacccattacaccggcgccacgctgaagaaccgcgccgccaaccgcgccgccgtccaggaattcttcggcctgcacgacgacaacgcgccgatcttctgcatcatcagccgcctcacctggcaaaagggcatggacctgatcgccgcctgcgccgacgagatcgtcgccatgggcggcaagcttgccatcctgggttccggcgatccggcgctcgagggctcgctgctcgccgcctccgcccgccatcccggccgtatcggcgtctcgatcggctacaacgagccgatgtcgcacctgatgcaggccggctccgacgccatcatcattccctcccgcttcgagccctgcggcctgacgcagctctacggcctgcgctatggttgcgtgcccatcgtcgcccacaccggcggcctagccgacaccgtcatcgatgccaatcacgccgcacttgcggccaaggtggcaaccgggatacaattttctccggtgaccgcttccggtctgttgcaggcaatccgccgcgcgctacatctctataccgatcaaaaggtctggacccaattgcaaaagcagggcatgaaatcggatgtctcgtgggagaaaagcgccgagcgctatgctgccctctattcaagcctcgccccgaaaggcaagtgacagaaaatgaacaagtccgtatccaccaccccctatcaggatcagaagcccggcacctcgggcctgcgcaagaaggtcccggtattccagcagccgaactacgccgagaacttcatccagtcgatcttcgattcgcttgaaggcttccagggcaagaccctcgtcatcggcggcgacggacgctactacaacaaggaagtcatccagaaggcgatcaagatggccgccgccaatggcttcggcaagatcatcgtcggcaagggcggcatcctgtcgacgccggccgcatcgcatgtgatccgcaaatacaaggccttcggcggcatcattttatcggccagccataatcccggcggccccaccgaagacttcggcatcaagtacaacatcggcaatggcggcccggcgccggaaaagatcaccgacgcgatattcgcgcgcaccaaggtgatcgacacctacaagatcgccgacttcgccgacgtgaatctcgaccgcatcggcaaggacgagctgcccggcggcacggtgctttcggttctggattccgtcgaggactacacggcgctgatggaagagctgttcgacttcggcgccatccgcaacctgatcagcctcggcttccgcatcgccttcgatgcgatgagcgcagtcaccggcccctacgccaaggaaatcttcgaaaaccgtctcggcgcgccctccggctcggtccgcaacttcatgccgctgcccgatttcggcggccaccatccggacccgaacccggttcactgcaaggaactcttcgacgagatgatgggcgacgacgcgcccgatttcggcgcggcctccgatggtgacggcgaccgcaacctcattgtcggccgtggcatcttcgtcaccccgtccgacagcctcgcgatcatcgccgccaacgccaatctggcgcccggctattccggcggcctcgccggcatcgcccgttccatgccgacctcgggcgccgccgaccgcgtcgccgaaaagcgcggcatcggcatgtacgagacgccgaccggctggaagttcttcggcaacctgctcgacgccaacatggcgaccatctgcggtgaggaaagcgccggcaccggctccaaccacgttcgcgagaaggatggtctctgggcggttctgatgtggctgaacatcctggccgttcgcggcgagagcgttcaggacatcgtcacccagcactggcagacctacggccgcaactactattcgcgccacgactatgaaggcgtcgacactgaagccgccaacggcctggtcgccaacctgcgcgcccagcttccgagccttccgggcaagacgtttggtccgctcaaggtcgagaaggccgacgatttcgcctatcacgacccggtcgacaagtcggtgagcgagcaccagggcatccgcatcatgttcgagggcggctcccgcgtggtcttccgcctgtcgggcaccggcacctcgggcgccacgctgcgcgtctacatcgagcgatacgaggccaattccagccgtcacaatatcgagacacaggaagcgctcgccgacctcatcgccgccgccgagaccatcgccgagatcaagtcccgcaccggccgcgacgccccttcggtgatcacctgagatagtctctacatgcccgatcgggagcagcggatgcctctacccccctctgccctgccgggcatctcccccacaaggggggagatcggctgggagcaccgatcggtatccttgctcgaacttagcgtttccgccgaacccaagttgcaggctggtcgagcgttagccgcttgcgatctccccccttgtgggggagatgcccggcagggcagaggggggtaacaccgcatgccgacctccctatttgccaaaaaacacggcgcaaccctagctaacttccacctcttgcctcctaccgtgcagccccctcatccggctgccgccaccttctccccgttggggagaagagactcgaggcgggccgctcgctcagcctccccttcgccccataggggagaaggtggcccgaagggtcggatgagggggccacacggcaccacgtcgaccatatcaaacatccccccggaacaaggacctagcaccccatgccgttcgcttccggcgtaaccctcaccgccaccggcgccaccttcgtcgtccgctcgagcgaggctacgaaactccacctctgcctcttcgaccagaccggccgcgagaccgaccgcctgccgatgacgcgaggcgaagacgacctccaccatctcttcgtcgaaggcatcgcgccgggcgcccgctacggctaccgcgccgaaggcgcctatgcccccgacgacggcctctggttcgatccctcgaaactcctggtcgatccctacgcgaccgagctcgaccgccctttccgctacgatccgctgctgtcgaaattcggcgccgacacgcagcacctcgtcccgcgcgcgatcgtcacccgcgacatcgacataacgcaagcgccccccgtattccgcgccggcggcttcatctacgaagtggcggtccgccccttcaccatgctgcaccccgatgtgccggaagcacagcgcggcaccatcgcggcgcttgcccatccctcggtcatcgcccacctcaagcgcatcggcgtcgacgccatcgagctgatgcccatcaccgcctggatcgacgaacgccaccttccgccgctcggcctcaccaacggctggggctacaatcccgtcgccttcatggcgctcgatccgcgccttgccccgggcggcgtggccgagctgcgcgataccgtcgccaggctccacgaggaaggcatcggcgtcatcctcgacctcgtcttcaaccataccggcgaaagcgaccgcttcggcccgacactctccatgcgcggcctcgacaaccgcgtggctctgcgccacgtccccggccagcccggcacgctggtcaacgacaccggcaccggcaacacggtcgcctgcgaccatccctatgtcaggcagctgatcgtcgacacgctccgccatttcgtgctcaaggccggcatcgacggcttccgcttcgaccttgcgccgatcatcggccgcaccgccaccggcttcgaggcaggcggcgagacactgaaggcgatgctggaggacgaggtgctcgccgaccgcgtcatgatcgcggaaccctgggacatcggccccggcggctatcagctcggcaacttccccgctcccttcctcgaatggaacgaccgtgtgcgcgacgacgtcagatgctactggcgcggcgaccacgacaagaccggcgcgctggcgtctgctctcgcgggctcctccgacatcttcgcccgcggcggcgccaccgccacccgcagcgtcaatttcctcgccgcccatgacggcttcaccctgaaggacctcgtctcctacaacggcaagcacaacgaggcgaacggcgaggacaaccgcgacggccacaacgagaaccattcctggaacaacggcgttgaaggcgagaccgacgatccctcgatcgtcgcccgccgccgcgccgacctgaaggcgctgatttccaccctcttcgcgacgcgcggcaccgtcatgctgacggcgggcgacgaaggcggccgcagccagcgcggcaacaacaacgcctattgccaggacaacgagatcacctgggtcgactgggcggcactcgacgaagagctgatcgcccataccgccttcgtctccggcttgcgcaagcgcttcggcgtcttctcgcaattctccttcttcaagggcgacggcgacgtcagctggattaagccttcaggccagccgatggccgtgtcggattgggagacgcccgatttcgccacgctcggcatgatcctccgaaccgacgatgccggcaccggcaggcggctcaggctggccgtgctcttcaaccgcgcgcaatccgaacatctgttctcgctcccggccgacgcggcctggtgccggatcggcggcgatgaaaacctgaaaccggagaaacaagtgcgcataccggggcggtccgtcactttcctgcttgaaaattgacgcgcccgtgagttgtattagaatccttgtcgtaatcgtcacgaacgcactgtaagccttttagaaacagctttttcaagaggaattgatggtcaaggaaatttcgcttgcggacgttcgcgggctggtcggcacggaaaccggcctttcggactggatcgtcgtcgaccagacgatgatcgacgcctttgccgacgccacccacgaccatcagttcatccacaccgatccggtgcgcgccgccgagagccccttcggcggcacgatcgctcatggtttcctgacgctctcgctgctgtcgacgatgaactacaactgcctgcccaaggtgcgcgagcagaccatgggcatcaattacggcttcgacgccgtccgcttcgccgccccggtcaagtcgggcgcccgcatccgcggccgcttcgtcctcgccgaagcccgcttccgcggcgccggcatgctgatgaccacctacgaggtcaccatcgagatcgaaaacgaacgcaagccggcactcaccgcacgctggacgaccatcatccagttcgacccgaaggatcggccggaggacgtttaggccagtccatgaagggcgcggaggacgctgatgagtttggcatataatgagcagacaaagcttttcgccaacgccctggaccgcgcctcgacggcctgcttcaccgtcggcatcgtcacgccgatcgccggcgcgctttacggcatcggcaatttcgctcagctgtcgcgcttctggcttgcaggctacctctgcgcttggctttccgtggcggtgctattacattacatagcgagattgacgctcaggagactgatcccatgagctttggttcactatttttcatctcattcggcctgcccgcgatcatcgcggccctcgcctatattgctttcctgctgcatgagcgcgaatggcgcaagcatcgcaatcagccaggcgagtaaacggcctcccgcaaccacacacgcgacgtcatgctcggccttgtgccgagcatctgccttgggtcaatcagcactggacgtgaattgccgtgacgcgacgcaggactgacaccgcagcccacggagccttgcgctacgaccgtcgccccccagagacgtgctttggccctcgggaaaaacccgaggaagacgtcgcgcaaggggaaaaagcatcggggacggcgctctggcaccgtccccgatctcatgatcacaacacgagggcgttagtgccccgcatcctccgcgccctcggcgagcaggccgaagacgaaatccgcgaaggaccgccagcattccacccggaacgtatcctcctcggtgcggaagagcacgatctcggccttgccgaacagcgtgcgcgagcaggcgccgacggggaaggcttcgagcgacaggtcctgcgggcagcccgtggagatcgtggtcccggcgccgggaccggagacgatgaccgcgacgttgcggtgcgagacgtcggtcgcggaatgcgcgacgcccacgtccttcagcgccgccatcaggtcggcgccgctttcgtcgatgaccagccattcgtcgggcccgagccagagcgcggcgcggccgcccttgcggccggaggtcttcggcgcgtccggaacggtcaccccgagcgctgacgagatagccgaaagcgattccgccggcgcgcgcagcgccacgcgcgtcgcgttgggcgccgccgtcagcctgacgctggccgagccgccctgcttgtttgcgagaacggatgtgcgaactgccgtatcagccattgatgcggcctccttccttgtcaaagaacaccatgtccgtcacctcgacagcgatcgtcttgtccggcatcggcacgtagagcgtctcgcccatgcggctgcgaccaccggcgacgagcgcgaacgcgatcgactttccgaggttttccgaccagtaggacgaggtgacgtggccaagcatcgtcatcggcttcggctcgttcgggttggcgacgatctgcgcaccttcctcgagcaccagcgtcggatccttggtgacgaggccgaccaactgcttgcggccttccttgacgagatccaggcgcttcaggccgcgaatgccgacgaagtcggtcttcttcttcgatacagcccagttgaggccggcatcatcgggcgtcacggtgccatccgtgtcctggccgacgatgatgtagcccttctcggcgcgcaggacgtgcatcgtctcggtgccgtagacgcaggcgccgagcggctcggcattggcccagacggcttcgagaaccgactggccgtaatcggccggcacgttgatttcgaagccggtttcaccggtgaacgacacgcggaagaggcgcgccggaacgcccatgaccgtgcactcggcaacgctcatatgcgggaaggcctcgttggaaatatcgacgccgtcgaccagcggtgcgatgatctcgcgcgccttcggcccctgcacggcgatgaccgcccactgctcggtcaccgacgtcagccacaccttcagatgcgggaattcggtctgcagatagtcttccatgtggttcaacacgcgcggcgcgccgcccgtcgtcgtcgtcacgtggaagcgatcggcggccagacgcccgacgacaccgtcgtcatagacgaagccgtcgtcgcgggtcatgatgccgtagcggcacttgccgggcttcagcgtgtcccaggcgttggtgtacatcaggttcatgaactcggcggcatcggggccgacgacctcgatcttgccgagcgtcgaggcatcgaacacgccggccacatcgcgcgccgtcttgcattcgcgcgagaccgcctggtgcatggtttcgccggcgcgcggataaaaccacgcacgcttccagttgccgacatcctcgaacaccgcgccctgggcttcttcccactgatgcagcggcgtcttgcgcgtcgggtcgaacagctcgccacgcgaatgcgcgatcagcgtgccgtaggtcaccggcgtatagggcgcgcggaaggtggtgaggccgacctgcgggatctccttgcccagcatctcggcggcgatcgccaggccgtgcatgttggagagcttgccctggtccgacgccatgccgttcgtcgtgaagcgcttgatatgctcgatcgagtgcatcccctcgcgcacggcaaggcggatatccttggcgcagacgtcgtgctggaaatcgatgaacgccttggcgctggtctccggacctgccccttcggccgcaccgatcatcccgccggtccactgatgcgcctgctcggacgaaatgctgatcttgccggtgggcgccttgccggcggcctgcgccatcagctcgcccgctgccagcgattcctcgatcgtgcgctgcaggtcgtcggtgccgttgcaggcgccgacggagaggcaatcctgggcataggtaccgggcaggaagcgctgcgtctcgggctcgaacttcaccttgccacgcgactgcgagaacaggtggaccgaaggcgtccatccggccgagaccagcagcgcgtcgaccgcgatcttgcgcggcgagccgccgccgttgcgggcaacggtcatcgatgcgatgcgcagcttgcccgaggtgttgacgaccgactggccggtgagaacgtcgatacccagcgaacgggcctcggccagaacatcggcgcccggcgtctgcctgctatccacgatcgccgcgatctcgacgccggcgcgcttcaggtcgaaggctgcttcataagccgagtcgtgcgccgtatagacgccgaccttctggccgacggcaacgccatactggttgagatacatgcgcgcggccgatgccagcatgatgccgggacggtcgttgttcgggaacaccatgtggcgttcgatggcgccattggcgaggatcacgcgcttggcgcgcagctgccacagacgctcgcgcggcagatggcggctggggttggcgatatggtcggtgacgcgctcggcgaggccgacgaaattgtggttgtagtaaccgaaagcggtggtgcgggtcaggacctgcacattgtccattgccttcagagccgcaaccgtcttctgcgcccactcgtaaccggaaaggccgtcgatcttgacgccactgtcatagcgcagcgcgccgccgacctcggcctgctcgtcgcagaggatgaccttggcgccggtctgcgccgcggcgagagccgccgaaagaccagccacgccggcaccgacgacgagcacgtcgcaatgcgcgtaacggccggcatagtgatccggatcggcttccttcggcgcgacaccgaggccggccgcgcggcggatgatcggctcgtagaggctcttccaggcagccttcggccacatgaaggtcttgtagtagaagccggccgcgaagaacggcgagagcatgttgttgatgccgccgatatcgaaggcgagcgacgggaagcggttctgcgattcgacgatcatgccgtcgaacacttcctgcaccgtggcgcgcacgttcggctgcttgcgggcggcatcgcgcgacacgtcgatcagcgcgttcggctcctcggcgccggccgacaaaatgccgcgcgggcggtgatacttgaacgagcggccgaccagatggatgttgttggcgatcagcgccgaggcgaccgtgtcaccctcgagcgcggtataggtcttgccgtcgaaggtgaagcgcgcggtcttggcgggcgtcaggcggcccttgcctgatatgcggttcgcagcactcatttcgcttctccttcgagctgctcataggtctcgacgggagcatggggcgcggcggcggcaccgatatcgggcttcggctcgccggccttgtacgtcatgatgaacttgtcgctgatcgtgtcgcgcgccgcgttgaagaaacggccgcatccatgctggtggcgccagcgttcgaagatcagtcccttcgggttgtcgcgcaggaagaaatactcctcgaactgttcgtcggagatttcggcgatattggtcgggcgggcgatatgcgcatcgccggcgccgcggaattcgagctcggagcgctcttcctgacagtatgggcaatagataagaagcatgatgtcctcgtgtcagtgcgcgacggctgcggcggcggcttcgtcgatcagacggccggtgcggaagcggtccagcgtcaggccggcattgaacttgtgcgcctcgtcgcgggcgatgaggtgcgcgaagagattggccgagcccggcgtcgccttgaagccgccggtgccccagccgcagttgacgtagagccccggaaccggcgtcttcgactggatggccgaacgatccggcgtgttgtcgacgataccgccccactggcgcatcatcttgacgcggcggaacatcgggaagagctcgcagatggcatcgagcgtatgcgtgatgatctgcaggccgccggtctggctgtaggaattgtactggtcggtgccggcgccgatgacgagctcgcccttgtcggactgcgagatataggcatgcaccgtgttggacatgaccacgcaggggaagatcggcttcagaggttccgataccagcgcctgcagcgggctcgattgcagcggcacgcgcacatcggccatcttcatgatcgtggtcgtgtggccggcggccgaaacgcccaccttcttggcgccgatgaaaccgcgcgatgtctcgacaccggtgacgcgcccgtcggggccgcggcggatgccggtcacttcgcagttctggatgatgtggacgccgcggtcggacgccgcgcgcgcatagccccaggcaaccgcatcgtgtcgcgccgtgccgccgcgacgctgcagagccgcaccattgatcggatagcgggcactggcggaaatatcgagcggcggacaataagccttggcctgctccggcgtcagccattcattgtcgatgccgtagaggcggttggcatggatatggcgcttgaaggactgctggtcgtgcacattgtgcgacagcatcatcacgccgcgcggcgaatacatgacattgtagttgagatcctgcgagaggttctcccagagcttcatcgaatgctcgtagatgtgcatgctctcttcatagagatagttcgagcggatgatggtcgtgttgcggccggtattgccgccgccgagccagcccttttcgagcaccgcgacattggtgatgccgtgctccttggccagatagtaagccgcgcccaggccgtgcccgccgccaccgatgatgatgacgtcgtattcggcgcgcggttccggcgaagtccactgcttgtcccagcccttgtgccccctgagagcctcacgtgccacggcaaaaaccgaatatctgcgcatccgccttgatctccttgcggggaaaatcccctgtcgctggccatacaaatcgcaaatccaaaagcggcacaacgtttcttttgcgacgccgacacgcttttgttttgacacggcgcaagattgcttgggatgcggcagaaaataaggcgaagaacgccctggcgatgcccgccggacgtcgtggatcgccaggactggcgatgtcgcagattgcaatcgccgccccctcgcctagctttcccatgaagtcacgcgccgccaccgtgcggcaatggcgagaaagggaggcaaggcatgtgccggaatatcaaacccctgttcaatttcgacccgccggcaacggatgcggaaatccatgatgcggcgctgcagttcgtgcgcaagctgagcggcacaaacaagccgtcgaagcgcaacgagcaagccttcgaggccgccgtcgcgtcgatcgcggcctgcgcccgcgagttgctcgacacgctggagacctcgcagccgccccgcgaccgcgaggaggtcgccgccagggcgcgcgcgaaatcggcgcttcggttcgcatcgtaagggagttcgcgcgcatgaccgtcagacgcatggacaatgtcggcattgtcgtcgacgacctcgacgagacgatcgatttctttacggaactcggcctcgaactcgagggccggacgacggtcgagggagaatgggccggacgcatcaccgggctcggcgaccagcgcgtcgagatcgccatgatgcgcacgcccgatggccacagccgcctcgaactttcccgcttcatctctcctgaaatcgtcgccgaccaccgcgacgccccggtcaacgcgctgggctatctgcgcgtcatgttcgcggtggaggatatagacgacacgctcgaacggctcttcaatcgcggcgccagcctcgaaggcgagctggtgcaatacaaggatgcctatcggctctgctacatcagaggccccggagggctgctgatcggccttgcgcaggagctggactaggcgcccgtcgtctcaattcgtcagccggctcgtcgacttggtcgcggcctctccgatcgagctgaaggccgatgtcagcgcgtccatcgtattcggttcgtagtagttgctgtcggatgaggcgcagaatttcagtagcgccttgcccttgtccggcgccatgaaggccaccgtgtagatcttgatgccggccgccttggcgttggagcattcgtcgcgcaccgactggtcgagcttgctcacccaactgctggtatcgcccctcatgtcgccgtcggtcatcagcacgatgatgcggtccgaactggtgttgagcttcttcgcctgctcgacgctttccgtgtcggtgccgtagaggttcttggcgatgttggcattcgccgctttcatcgcggccgtcgcgtcggtaccgttgtttgccgcgatgacgatgttcttcacgtggtcgcgggcgttcgtcgtgccccaggccatcggcgactgccccttgatgctgctggtataggaaatcgcgccgctgcggacatagcgcgtattcgggtcatacttgtcgagcgaatcgaacagcttggccgcggcgatcttcagcgcgtcgatcttgctgtaataggccggctgcgtgccgatgcagatgccgagcagatagatcgcgcatttcgtaccgttctgcgtggtcgtatcttcggccatcgaggtggacgcgtcgagcaccagctcgatcgagatgccgttcttcgtcgtccccgagccgcttgtggtcttgctggcggccgcgaccgtcatcgtattgccggcgatcagcgcgctgagcggcgtcagcgtcaccggcatcgaggaaaccacgttcaccacgaaactcttgccggacgaggtggtcgtggtcgtgatcgacaccgtggccgccttcttcgcggcagccgcggccgtgctgcccgatatgcccgcgatctggccggacaggaagtcgagccccagcgccttgccggatgtctcgtcggccaccccgttggcaagcgccgtcgagacggcaagggccgacgcatccgtcgcttcctgcagctggcgctgcgacaaggagaggttggcggtatcgaccgccagcccggcgacgccgaccaggataggcagcacgagcgcggtggtgatgccgaagtttccatcccggcgcccaagaagacgctttatgtcctgaacgtacagcatgcctgaaaacgggcaggcggcgcgaaagtgccatcggacgttgaatcgcgtttaaccggaggtaagccgatcgagacgcgcgggtcattttagaacaatggaatagattgcggcggccgtggacagaccggatagcggccctatcccgatatgcatggtctgatgattgccggaaggaatgacgagatcaggcccgggacgcggtcttcggcgttgcccgcttcttcttggcgggctcgacctcaggcggggcctcggcagcgcgctgcaggcggagagccttgagcttctccgtcttcaattcgcgagcctgggcctcggctgaaatgatcgccctggccgtcgtgtcggtcacgacagccttgtcgcgagacgagagcttggcctgattgaagatttcattgtctgaagtcatctgcgctctctatctcttcgttgggccggctcttagcgcgccggacgcacggccttcttcggcgcgggcagcaggccttcgcgctgaagcttcttgcgggtcagcttgcgctggcggcgaacggcttcggccttttcgcgcacgcgcttttccgacggcttttcataggcgctgcgcgccttgaattcgcggaagagaccttcgcgctgcatcttcttcttcaggacgcggagcgcctggtcgacattgttatccctgacgagaacctgcaaattatattcctttcctgcggcaacggattgccggttgttgacgagccgaaagctgtttcccgcccttggcgcccttggcgaggccgggatgacttgagcggcaatcgtcgcggtttcgtgtctggcatcgaggatgccggctaagtggtgtcgaaaacgcctgcgcgatttcgcgatcgcctgagcgaccctgatatcgggacccagggccccgaaacggactgaactgctacgcccgggatcgagatcccgaggcggccggcaaaaagccgatcctcgcagcgataccgaagatcacttccaatgcgaggcatttcccggcagttacgtgccggatatgatcgattttgagaggagatctgacggagcccgataggctctttgacaaaggtcacaagcaatggtcgatggctggattatagtgcaaaaggcggccgatgcaaggaacgaacccgaattagccgcgacaccctggctttacggggcttcaggcggcctaacggcgcgccacgagggtgaaaataccttttgcgcggatacgagcctggattgcagggttttttcggctgaaacccgctgatccatatggacttcgcccaagcgatctgctatcccgcacaccaatcgcgaggcgctgccgcgcggaatgaacattttttgcctctgccatcgggatgatcaggggcatcaaccgaaccaaaggaacgtgattctcgtgcaggtactcgtccgcgacaacaatgttgaccaggctctccgcgccctcaagaagaagatgcagcgcgaaggtattttccgcgaaatgaagatgcgcgactactacgagaagccttcggaaaagcgcgcccgcgaaaaggccgaagctgttcgtcgcgttcgcaagctggcccgcaagcgtcttcagcgcgaaggcggagttgccgcacgctaaggcgttccgtcgttatttcgacgttttcagatgcatgttggcgggggcgatctggtcgccaccgccttttttgtttgctgcttcgcccgcccgtctgagattggccggccgtaatggggaaaacgagcccgcatggctgatacgatgttgaacacccgatccttgcgttcgtcgaagaaaatgatcgccctgcccgtgatggcggtggtttcggtccttgccctcgccggctgcaacacgaacagcacctccgatgccgtcatccgcatcgacaaggctcagggctcgcaggaaaacatcgcatcgctgacctccgtcatcaacgcaaatccgcgtgaccccgagggctacaacgttcgcggctccgcctatggtcgcggcggcgatttccgcgcggcgctgaacgacttcaacaccgccttgcagatcaacccgaaattctaccaggcctacgccaaccgcgccctcgtctaccgcaacatgggacagcagcagcaggcgatccaggattacaattcggcgctccagatcaacccgaactacgacgtggccctgatcggccgcggcaacgtctaccgcaccgccggccaggacgacgccgccttcaacgatttcaacaaggcgatccagaacggcaccaccgacggccgcgcctatcacaatcgcggcctgatcttccagaagcgcaatcagcaggacaaggcgatcgaggatttctccaaggcgatctcgctgtctccgaattcgccggaaccctacaacggccgcggcatctcctacatcgccaccaatgacgacgacaacgccttcgccgatttcaaccacgcgatcgagttgaacggcaacctcgccgagagctgggccaaccaggcgctggtctacgagcgcaagggcgacaagcagaaggcggcgcgctcctatcgccacgccatcagcctcgacccgaaatatcagccggccaaggatggtctcggccgcgtcagcggcgcctgatccgccgaagcgggagcgatccgatcgctcgctcccttccggccgcgcggcgtcagttgacgtcgcaaaggacgatttccgacaaatggccgcgggcatgctttagtgtgttgcaagcgatcccccctgcccctaacatgcgacgggttcgatagcaggctatcgggagcgtgatggcgcgttgagggcggatgtcgtggttgaagtctctgctgttacctgttggaaacccgcgcccgcggctgccggcctacccttcgagcggtgcccgtgccgatgaagcgtagctttcgtttcttccccaaggcctcgatcggcacctacctgatcgcgatggcggtggccgtggcgctgccgatcttcgcgctggtggcgctgctgctcggccagctggaagacagccagcgttcgatcctgaagcgcgagaccgcgcaggacgccaccgcccttgcccgcaccgtcgatcgccagctgcaggacatggcgacgacgctgcgcttgctggcgacctcgcccgagctcgagagcggcgatttcgaggcctttcacaatcgtaccgaaacggcgatgcgcgccaacaccctgtatgtgctcgcaaccgacaagaccggccagcttctgttgaacacccgtgtcgactacggcaccccgctcggcaaggtggcgaacctgccatccgtcgaggcggtcatgcgatccgggcgcatcgaggcctccgacgtcttcatgggccgcaccagcggcgaatgggtctacaacgtcgccatgccggtcgatgtcggcgatgtcgcggcgctgatcatcacccagaacgccagggatctcgccaagctggtatcgacagagggcctgtcggccgattggtcggcggcgatcctggaccagagcggccaggtggtcgcctcggccggcgccaccagtctcgatttcggcaagcctttcgacccccgcatccttccgtccctgatcaattccagcggcgtctacgaggaccgcgtcgtcatgccgaatgctctcctcggttatgcgcagatccccggctggtcgtggaaggccgtggtctgggggccggtcgccaccgcccaggcctcgatcctcacgacatggcgcttcctgatcatcggcggcatcgcgctgtttctggtcgccatcctcggcgcctatgtcgtcgcccggcaggttcgctccaccatccgcgccatcgccgacatggccaaccgcatgggcgaaggccatatcgtctcgccgatcgaaaccagcgtgatcgaggccaaccgcgtcgccgtggccctctccaacgcttccttcgaccgcagccagacggaagaccggctgcatttcgtcatgaacgaactcgtccaccgcaccaagaacctgcttgcgctcgcccaggcgatgatgcgccagatcgcccggcaggccggatcggtggaggagtaccaggccgccgtcgccgatcgcctggaaggactggcgcgttcgatccagcttctgaccagcgagcaatgggccggcgcgtcgctgcgccgcgtcatcgacattcacctcgaagccttcccgcacgccctgcagcagatcgaggtgaccggcaccgatttcatgctgaagccggaggccgtgcagaacctcggcctcaccttgcatgagctcgccaccaattcgatcaagtacggcgcgctctcggtccctcagggccgcgtcaggctctactggcagagcattcaggaaaacgaccacgccgaggagatgctgcgcgtcgtctgggacgagcgaaacggcccgccggtgaccgccccggagcgctccggcttcggcacgaccgtcatcaagaaccacgccgccgcagccttcagcggcagcgtccatgtcgacttccggccggaaggcctgcgctgggaactgacggcgccacgccgcgtccttcaacgcgactgagaccctcacccgcccctgagtaacaggcacgaacgaaaaccgggcggccatccacccggctcaatcatgtcgaactatcgtgaaaaatcgcccgtcgccgatcgccgcttagcgcagcagcacgaggccggcgatgaagacgatcagcatcaccacgatgccgccgagcaggcccgcgccggcgaagaagccggcggtcatgccgagcagaagcgcgacgaggaacagcgtgccgaacttcgcggccgccaagaacatgctgtaggtctgctcgtgcgccggatagtccatcggcgcaccgacttcggcgggtccgctattgtgctcggccatgattgtcatctccctgaaaccccggccggcatcatgatgcggccacatgactttctagttcgcgcgctcccatgcgcgaacgtcccgttagagaaattgcacaaagcccacgaaagcgcaatgcatgagaatgccgcgggcgagcggctttcccatgcatcgtgctggattgttcagagcggcagatcggtaccgaactggccctcgggcacgaagcgcgccgtcggaatgatcgtcagcggcggcagcgtgtcgttggggttgcgcgagaacatcatgcgctgttcgctggcgctggagatgaagaagggatagcgcgtcaacagcttgcgcccgacctcgatgacattggtcgccatcagcgtcatgtcgatcccgtaattcttcgccagctggccgggcacgatggtgtcggcgtagaagacgcgcttgtagaacgcggcatgcggcggccggcagaactgcagcacccggctggcgcggaaataggccgcggcgacgatcgatggccgcagcgtcagatagggtatccaggagagatcggcggtcatttccgggtcggcggcgaagcgtgccggatcgatcagcgtcaggccggcgtcgagcatcgcgtccatcgcccaggggaatgccccgcccgattggctgagccgatggtcgggtgtcacataatggatccggaccgtgctgaccatttccccataatagtacaggccgaaaacataggcgtggctgtcgaaatcgctgtcgtcgagcagccccttgggggccagcgccagcacgtcgtgcgccttgtaggccttgtagcgcaggcgttctacctgtgccaggtcctcgttgctttcaacgcggcggtattcgacattatcgagaacttcaagaatcttgcggctgaaatcacttgcgttggaatgtgatcctgacattgtgcccgtccgttcgttaacgggttattaatcatccgaacacgagccgaaacgcaagattttaacgtaaatttaatcgtatttaagttgttaaggttaacgcgccgcaatcatcgcgcaacggtgaaagccagcggttgcgatggcggcggcatcagcgatgatcagaagtggaaacgctcaggcgacgttgttgcgccggcgcggcaccggcgtgcggcggccgatcgcctcctgcagcagcgcgacgttctgcgctggcaccggcggcgagaagacgtaaccctggacgagatcagtcgcccggtacttgttgagcagcgccagctgctcggcggtttccacgccttcggtgacgatcttgagcccgagctcgcgggcaagattgaccgtgccgcgcagaagcttcagccggcgcccgtcctccacgatgttgcgcaggaacgagcggtcgatcttgatgatgtcgagcggcagcgtatccagatagctcaggctggagaagccggtgccgaaatcgtcgatggcgatggtgatgccgctgttgcgcagctccgccaggatggcgcgcaccgccgccggctcgtcgatgaggcagctttcggtgatttccagatgcagccgcgcggggctcagcccggagtttttcagcgcttccgaaaccacggcgagaatgtcgttgtcgcgcaggtcgcgcgccgaaaggttcacggagaccgcgatgtgatccggccaggtcatgcagtccacgcaggccttcatcaggatgaagcgcgtgatgtcggagatgatgcccatgtcctcggcaagacggatgaacacatccggcgggatggcccccttctccgggtgcacccagcgcgccagcgcctcggcgcattcgatgcgcgagccgtccgccttgaacatcggctggtaggcgatgttgagaccgttggaggccaccgcctcgcgcaggtcggccttcagcttctgcttttcgatatagcggccgtccatctcgcgctcgaagccggaaatgccgccgcgctccttggacttgctctcgaacagcgccagatccgccttgatgctccattcgtccatcgcgaaggcatcgctttcgaggatggcgaagccggccgagagcgacaccaggaaggtgacgtcgtcggcctcgtaattgccctggatctcggcatgcacgcggcggatctcggcgtccatcgcttccgcgtccttggcgtgcgggaagaacaggatgaactggtcgcccatcaggcggccgacgatcgccttgcgcgagcgctcctcgatgcggttggcgatggcgcagagcagccggtcgccggtgatgtggccgcgcatgtcgttgacatgcttgaactcgtcgatatcgagcaccatgaagccgagcgggccgcgcttgcgcggatggcggttcaggtaatcctgcacgagatggctgaaatattcgcggttcggcaggcccgtcagcgcgtcgtagcgcaccatgtgcaggatcttctgctcggccttcacgcggctcgacacgtcctcgaagatcagcacggcgccgccatcggcgcggcggctggcggagaattcgagcgacaggtcctcggggaaatggatgagcatgcgcgacagcttgccctccgcgacatgtgtcatctgccgcaggatgagttccggctgcgaggaatccatgaaattgtagcgcgcgccgtagcgcaggacggcgccgagatcgcggtccttcagccgctcaggcgccccgatcttcagcagttcgcaggccttgcggttcaccacctggatgcggttttccgcgtccaccatgacaagcccgtgcggcatgttgttcagcgccgtgtcgaaccggtcggcgatagaggtgatctcgcgccgcgcgatgacgttctcgtagaggaactcgcgcacgccgttggccatcgcccgggtggtcagccagaagggaatgaggaagacggacaggatgccgcgatagaaatccatcgccatcaggctgcagatgatcatcggcaggcagcaggagaaggtctgcaggtcgacggccatgcgcgaaccgtaattgcgcccgaccaccgaaaccatggtcgccatcgtcaccgagatgctggcgagctcggagaagctgtcgtgcagcatgaagatcgcatagccgctgcagatgccgagcaatgtcgtcgtgcaggcggcgcccgccaccagtatccgctcccagcgctcgatgtcggcacgcgacatcgtgtccttgtcgacacggtcgaactggcggaaggtgatcatgcgggcgcagaagacgaggaagaagccgccggccagccagaggtagacgctggagccggtcttgaatgcaatggccaggcaggtcgccatgtgaacgatgacgccggcgagcaacgtcatgcggtttcccgagagggaactcacaaacgagagatatacatccgtagggaccctgctcgggctatctggcttcatccaatattttccctgtaccgcagcaccctaccgccaaccctttaaaaattgatttctggtcacccgcacatttggttgatttttctacaatcctggggagagtagaactgaaaaattgctgtttttgcagcctgacggggatgtttcacaataaggcggtccacctagaggttgtcgctacccgcaccggcaagcgcaactggcggttcgccggccatataagactataatccaacatcggggctttccgctttcaattcccatgcccctgatctacgaatcggggcgggagaacatgggataaaacccgtgaaataagaggggggaaggcatgccggtttttctagccgtcagccggctgatcgatgctgtcagccagttcatgggcaagctgtccgaatacatggtgctgctctgctgtctcatcagcgccgccaacgcgctgatccgctacaccttcaactacagctccaacggctggctcgagatccagtggtatctcttcgccttcgtcgtcgttctcggcgccgcccacacgctgcgcatgaacgagcatgtccgcgtcgacctgatctacggctcggtgtcggaccgggcgcgtctgtggatcgatacgatcgggctgatcgtcttcctgctcccggcctgcatcttcctcacctggctgtgctggcccttcttctggctctcctacatgcagaacgaggtctcctccaacgccggcgggctgatccgctggccggtcaagctcatcctggtggcgggcttcggccttctgacgctgcagggcttctccgagctgatcaagcgcatcgccgcgctgacgggtcacctcgtcgtcgagaccaagtacgaaaagccgctgcagtaaccgcgaccgggaggaaagcctttgttcgatttcggcatcattccgccggccatgttcgtgggcatggtcctgttcatgctctacggtttcccggtcgccttctcgctggccgccgtcggcctgttcttcggcatcatcggcatcgccaccgggcatttcagcgaggccttcctgcaggcgctccccctgcgcttcttcggcatcgtctccaacgacctcctgctcgccatccccttcttcaccttcatgggcgccatattggagcgctgcggcctggcggaggatctgctcgagggcatgggcaagcttttcggccgcgtgcccggcggccttgcctacgcggtcatcctcgtcggcgcggtgcttggcgccatcacgggcacggtcgccgcctcggtcatcaccatgggcgtcatctcgctgccgatcatgctgcgctacggctatagccccaggctcgccaccggcgtcatcgccgcatcgggcaccatcacgcaggtcatcccgccctccctcgtcctcgtcgtgctcgccgaccaactcggcaagtcggtgggcgacatgtatctcggcgccatcggcccctcgatcctgcaggtttcgatcttcatgatctacatcctgatcctgtcgatcgtgaagcccgcctccgtgccaccgcttcccaaggaggtgcgcggcgatttcacctgggcgctggtcttcaaggtgctgtcgggcatggtaccctcgatcgtgctgatcttcctcgtcctcggcaccatcttcatggggctcgcgaccccgaccgaggccggcgcgctcggcgtcgtcggcgccatggtgcttgccgccatgcaccgccgcctgacctggccgctgatgcaggaggcgatgcgctccaccatgcacatcacgtcgatggtggtgatgatcctgatcggctccacctgcttcagtctcgtcttccagggcatggatggctcgcgctggatcgagcacatgctgtcgggcatccccggcggcccggtgggcttcctgatcttcgtcaacatcttcatcttcgtgctggccttcttcctcgatttcttcgagatcgccttcatcgtcatcccgatgctggcccctgtcgcctccgcgctcggcatcgacctgatctggttcggcgtgctgatctgcgtcaacatgcagaccagcttcatgcacccgcccttcggcttcgcgctcttctatctgcgctcgatcgccgaccgcggcgtcaagacctcggacatctacatgggcgccctgccctgggtcggcatgcagctcatcctcgtcgccatcgtgatcttctggccgcaatcggtgacctactggctgaagaagggcccggaggtggatctgaacacgatcaagatcgaggtccccggcttcaacggcaacgggcttggctccccacctggcatgccgggcctgtcgctgccgccgatgaacggtttgcccggacaaccgccggcgcaggtgaagccggcgcagccggatctgagccagccgccggtgattaagtagggatttcagttggtaggggatggagaacttggagcccggagccccctcatccgacccttcgggccaccttctccccgctggggcgaagggaagatggagcaagcggctcgccacgagtctcttctccccagcggggagaaggtgccggcaggcggatgagggggccacacggcacaccgccagccccctcaaattcacagcgaaacctcagatcttcccggcccgctgctggatcatcatgaacgtatcgaacgtatattccgacagctgcatccacagatacgcatcgcgcttgaacgccgtctgatcctcgtagatcttcttgaagtagggattggacgccgaaatctcgccgtagatgccgatcgaggcctggaagcaggcttccatgatctcctggctgaagggccgaagcgtcgcgccctcggagaccagctgcttcagcgccggcgggttcttcatgtcgtacttcgccatcatgttggtattggcgaaggcgcaggcgtcggtcagcgccgcctggtagtgcttgggcaggctgttccacttttccaggttgaagaaggcatgcaccgtcgggccgccctcccaccagccgggatagtagtaatatttcgcgaccttgtgcaggccgagcttcaggtcgtcataggggccgacgaattccgaagcgtcgatcgtgcccttttcgagagccggatagatgtcgccgccggcaatctgctgcgggatgacgccgagcttgctgatcacctggccggcgagcccggctatgcgcatcttcacgcccttgagatcgtccagcgtattgatttccttgcggaaccagccgcccatctgggcgccggtattgcccgccggcaggccgtaaatgccctgcgtggcatagaattcgttcatcagcttgttgccgttgccctcgtagaaccaggcgttggtcaggcgcccgttgaggccgaagggaatggcggtgccgatcgcgtaggtcgggtccttgccgacgaaataataggagcaggtgtgcgccgcttccaccgttccggcgctgaccgcatcggccgcctgcaggccgggaatgatctcgccggcggcgaatggctggatggtgaagttgccgttggtggatgcggccagatgcttggaaatatcgtcggcagcgccatagatcgtgtccaggctctttggaaacgacgaggtcatgcgccaggcgatcttgggattttcctgggcgatcgcgggcgccgccagagccgaggcggcaacggcgccgacgcccgctgttcctgccttcttgaagaatgaacgacgatccatcaaaaacctcccatggttggttctgcgaggccaaactctccccacccgcagcacgacgggaagctaagcatgcggacgcaggcgattcaagcgccggctcattagtctttgggatcacgacaccaatatggcgagtggcgcatttcgatcggaatcagcgacttagtcggatgataagcgccaccccgccaccctgccgcaatttcgccgggcgtatcgcgcaatcctgctttctggaaaccctgcctttctggaagccccgcctttttaggaaacgttgacttccgccccgttctggtttctcaaatgagccacacaggatcgtcctcaggatagacaatgaccaagcccatcgtcgccgttcccgccgatatccgcagctttgacggcgccacctggcatgccgtgcagcaccaatatgtccgcgccgcgctgaacgcatcaggggtgatggccttcatcatcccggccttcgaggaaggatacgacatcgacgccattctcgatcgcgtcgacggcgtcctggtctcgggctcggcgagcaatgtccacccggcgcgctacggcaggcaggcgaccgacgccgacggccccttcgacccagcccgcgacgccacctcgctgccgctcatccgccgcgccatcgaccgcgccattccgctgctcgccatctgccgcggcatccaggaattgaacgtcgcgctcggcggcacgctggcgagcgaaatccaggaccagcccggcatctgggaccaccgcaagcccgctgacgtcgaccgcgacggcatgtacgccatccgccagaacgtcatcgtccgcgagggcacctgcattgcaggcatcgtcggctccggcgagatcaaggtgaactcgctgcaccgccaggcaatcgccgagatcgccccccgccttgccgtggaagccgtggccgaggacggcacggtcgaggccgtctccgtcatcgacgccagggcttttgccgtcggcgtgcaatggcatcccgaatactgggccgaaaccgacaagccctccaaccagctcttcaccgccttcggcgacgccgtccgcgactacgcggccggcaagctgcctgtgacggccgcgaaggtggttgcataaggggagagccgtttccttgttttatcgcatgtcggcgccgcaaaaccgctgcgctgcgtctcacgcgaacgatccgccacctcgcctccccctcgcatgaccgcaccgcatcctagcgccaagtggccataaaagtcgagcaagtcggaccgtgcttagatcctcgggacgagcccgaggatgacgcggaaaggatgtttgcctcggtgtttcaataggttacggagagacgcaatttgctcagccgtcatcctcgggctcgtcccaaggatctgagcacgcatccaggaatgcaacgggagtggatcgaagcaagagcgcagccacggggcaaagcgccaccccaaagaaacccatcaccccttgacgggcgtctccgccaccggcgtcagcggcttgcgcgcgtcgaaccacccaaccagattgtcgaccaccagatcggccatcgcattgcgggtcggtaccgagccggaggcgagatgtggcaggaggacggcgttgggcagcgccatcagggcggccggcacgttcggttcgtcgtagaagacgtcgagaccggcggcaccgagcgcgcccgaggacagcgcctcgatgagcgcatcctcgtcgacagtccagccgcgcccgacattgacgaacacgccatccggcccgagcgccttcaagataccggcattgacggtcttgtgcgtctgcggcgtcttggggacgatcgcgatcatcgtatcgacggcgtccgccaggccctccagcgtcggatagtagtcatagggcagcgcgtcgttgcgcgtgcgggtgtggtagctgatcttcaccttgaacggctccagccgcttggcgatttcctgtccgatgcggccgaggccgtagaagccgacatggcggcccttcagcgaaaaccgcgacagcggatagttctgccccggcttccagttgccggcccgcagccagttttcggcgcgtggaaactcgcggatggtgttgatgagcagcccgatcgccgtatcggccacttcgtcgttgaggacatcgggcgtgttcgtgacgacaacacccctggtcgcggcatgcttggcatcgacattgtcgtagccgacgccgaagctcgagatcagttccagattgggcagcgcgtcgatatcggccgccgcgaaggtgccggagacggcgacgccgcgaatgcggctggcggtctctgcatcaagcgaaccggcgtccgcctcgatgacctcgaaaccttccttcaggcgcgccagaacgcgctcatgcattttccccggaacgagaacagcggtacgggacattgcttttcctcttcgattgtcgcgcgcccttgatgaagtgggataaagggcggggattatgaccggggccggaaggggctggtcgattggcggatgcgcatctccggcttgatgagatggatgccgtcgggttcgtggctgccggagaggcgatcgagcagcgcgcgcgcggcgagccggccgacttcggcctggccgttccacacggtggtcaacgccggcatcgaaatcgacgcctcctcgagatcgtcgtagccggtcacggaaatatcggcgcctggcaccaggccggcgcgggcgatgccgttcatcaggccaatggcgacgaggtcgttccagcagacggccgccgtcggcttctgcggcagggacaggaagtgcaccgccgcctcgaagccgccctgcatcgagcgggggcccggaatgcgcaggccgggatcgacctcgatctccgccttgcgcagcgcgttgacatagccctggtagcggtcgcggccggtggacgtctggtcggtgccgccgatcatcgcgatcgaacggtggccgaggccgatcagatggttggtggccagcgagatgccgtagctgtcgtcgccgcgataggtcggcagatccgacccctccatcgagcgggcgacgagaatggccggcatgccgttatcctcggcaagctgcatgtcctccggcggcgtgccgatcgccggcgacatgatgacgccatcgccgccgagctgcagcagcgtctcgatgaaggtgcgctgcttttcgaccgaatcgtagtggttggacagaatgaaggtctgtcggctgcggtcgagctcgctttcgatcgccttcaggatttccccgtagaacgggttcatgatgtcgtgcacgacgacgccgatgatgcccgagcgcgaggtacgcaggctggccgcgcggcgattgtagatatagccgagcgcgcgcgcctgttccttgatcttgtcgcgggtggcgccggcgaccagcgggctgtcacgaagtgccagcgatacggttgctgtggaaatgccgagcgtttcggcgatcgtcgaaagcttgatcttctgcgccactatgcctcccggttcgcgcggaaagacgaagacgcgcgacgattacatgcgcccgaccgacgatgggtcgagcgtccttaaaatatttaattaaaagattaaaccggatcgggcaatttctaatttcacgaaaccgtcagatttcatcgggctcgtcgaggacgatggcgtccgcctgcagattgccgtcgatcgccttcaggagccgcaccagattgcggatttccttctcggagaaatcgagcgtcgccagccggtcgcaggccgacgcggcctgctcgatggcatcgacgctgccacggccgagatcggtgagatagaccttggtgaggcgcgcgtcgtcggcatcggccttgcgctcgagaaagccctgcgcctccatgcggccgatggtgcgcgtcatggtcggcgccttgacgccgagcttttgcgccagcgcgcccgccgtcatgccatcggtttcggcgagcgacgtgatgacgccatcctgcccggcataaagcccgctctccagaaggttgcgggacagaacggtacgcatcgaccgggcggcctgcgtcaaagccggcgaaagatcgaccaccgtatactcggtctggtccttcttcttcgacttctgcttcttgccgtccttgtgcttcttacccatcgccgtccctttgatcttgccgctccccgcgcccgtttgaggtcggaggggacggcaacagtttcgtttggcgcctaagccttcccccaaatccattttgatttaaaggcttatgcattaagcattgagatcgttgcgctatgacattgcgcatgatctcgtcataaacaagaggccttagccggatgaacgcgcaagcgaccgagttcgacgacagcgatccgcaattttctcgcgcaggacgcgatcggcagatcgtcgttctgccgcttggcgcccacgagcagcacggcccccaccttcccttcgagaccgacacgctgatcgccgatggcatcgttagcaggctcaaggacgcgcttcccgaaagtctcgatgtcaccttcctgccgacggaatcagtcggctactcaatcgagcatatggatgtgacaggaacgcaaacgctcacctacggcgaagcgatcgaacgctggctcgccatcgcggcaaaactgtccgggcagggcattcgcaagttcgtcatgctcaacgcccatggcggcaactcgccactgatgacggtcgttgccaccgaatcccgcgtgcgcttcaacatgctggccgtcgtcaccagctggacccgcttcggcctgcctgatggtgtgatctcgccggaggagaaggcgatcgacatccatggcggcgacatcgagacctcggtgatgctggcgctgcatcccgacagggtggacatggccaaggccgggaacttcccctcccgccaggccgatttcatcacccgctacaaccacctgcgcgcctatggcccccacgccttcggctggaagatgtccgacctcaacgataggggcgtcgccggcaacgccaccaaggcgaccgccgcaaagggcgaggcgctgatcgctcatgcggtgaggggcctggtggaattgctggaggatgtggatgccttcgacgtgggcacgctgagatagcgggccgcttgtatcggcccgggcttttgatcatattgattgtgatcgcagtggctgacacaggaggcccgcatgcgcatttccgtgaaagaggctgaagggcagctgaccgaactggtccgccttgccaatcagggcgaagagatcgtgttgacgcaggatggccaacccgccgtccggctcgagccggttaccggcttcatcaaggatccagtcaaaaggggcgagcttattcggcgcctgcaggaggaagtcaggagaaagaacttgccgcctggtcccgacgccgcccacagccaggattttctctacgacgaggacgggcttcccaagtgatcgtcgtcgacacctcggccttgatgtcgatactaaatcgtgaagcgatggccgcgcagtgtgaacgcgtgcttcaaggtgccgatcggatattgatatctgcggcgacgatcacagaggcaaaaattgttgcggcaagaaggggcttgagcgacgccatggagacgctactccagcagagcatttccgacgtagtagtcttgacccccgcccgcgctgaactcgccgcaaccgcctacacgcactggggcagaaacttccacactgcctcgctgaacttcggcgattgcttcgcctacgccaccgccaaggaattcaattgccccctgcttttcatcggcaacgacttcgcccagaccgatatcccatcggcgatcgcgacctccacgccgtaatgtgatcttataacatacgaatccctttgaactgccgcgccgcaccccttatatgagacgacgaatttgaaaggcccgggagaaaaccccgagcaagcccctacctatcgaggttctcatgaccgacgccgttccgacgcaacccaagcccatccccgtcaccgttctcaccggctacctcggcgccggcaagacgacgctgttgaaccgtatcctgacggaagcgcatggcaagaagtatgccgtcatcgtcaacgagttcggcgagatcggcatcgacaatgatctgatcgtcgaatccgacgaagagatctacgaaatgaacaatggctgcgtatgctgcacggtacgcggcgacctgatccgcgtcgtcgaaggcctgatgcgccgccccggccgcttcgacggcatcatcgtcgagactacgggccttgccgatccggtcccggtcgcccagaccttcttcatggatgacgacgtccgcgccaagaccgagctcgatgccgtcgtggcgctggtcgatgccaagcacctgccgctgcgcctgaaggacagccgtgaggccgaggaccagatcgcgtttgccgacgtcgtgctgatcaacaagaccgacctcgtcaccccgcaagaactggcgcagatcgaggatgtcgtgcgcgccatcaacccctcggcccgcgtctacaagaccagccgctccggcgtcgatctcgcccgcgtgctcgaccagggcgccttcaacctggaacgcgcgctggaaaacgacccgcacttcctcgaccacgatcatgatgaccatgtctgcggcccggattgcggccacgaccatggccaccatcaccatgcgcatgatcatgatcacgatcatcatgatcatcatgatcatgaccacgggcacgaccatcaccaccacgatcacgggcatgaccaccatcaccaccatggcgccgtctccccgatacatgacgtgacggtgcagtcggtttcgctgcgcggcggcgagatgaacgcggaccgctttttcccctggatccagaagattacccagacgcaaggcccgaacatcctgcgtctcaagggcatcatcgccttcaagggcgatccggagcgctatgtcgttcagggcgtgcacatgatcatcgagggcgaccaccagcgcccctggaaggacggcgagaagcatgagacccgtctcgtcttcatcggccgcgaactcgaccgcgaaaagctcgaagcctccttcaaggcgtgcgaggccactgcctgatgccgactgttgctccgttcgatctcgacggccatatcctggccgtcgaatttttgggtgatacccccttcttcgccagcgccaccggcacgtttcaccggctggacggctcggaaaaggtcaccgaagcccatcagggcatgctgacctgcattcgcgatccctatagcgaaagcctgatttcaggcggcgaggacggcaaggtgctgcggatcgcggccgatggcggcgttaccgagctcgcgcatgcgccgcgcaagtggatcgcgcagcttgccgccggcccgcagggcgccatcgcctattcccacggcaagagcgcgatcgtgcggctcgccgatggcaccacccgcgaattcaccgaggaacgcaccgtcgaaggcctcgccttcgcgcccaagggcatgcgcgtcgccgccgcccgctataatggcgtgtcgctgcattgggtggcgggcgatgcaaaacccgtcgatctcgaatggaagggcgcccataccggcgtcaccttctcgccggatggcaacttcctcgtcacgacaatgcaggaaaacgccctgcacggctggaagctcgacagcaagcccggctcggacgcccgccacatgcgcatgaccggctaccccgccaaggtcaagtcgctctcctggtcggccaagggcaagtggctggcatcttccggcgcccccgccgccatcgtctggcccttccagggcaaggacggcccgatgggcaaggcgccgctcgaactcggcacccgcgccaacatcatggccacctcggtcaaattccacccggccgaggatatcctcgccatcggcttcattgacggcatgatcctggccgttcgcctcaacgacagcaaggaagcgctgctgcgccgccccggcaagggcgccatcacggcgatgagctggagcaggaacggcaagctgctggccttcgcctccgaagccggcgattgcggcgtggtcgatatcgccgcgtaaggcatagctcccggaaccggtcacgagtttcgggagaacagacttgaagacaaagggcttgaagccggacggaccgcgccgccgccggctatctgaagagcttgctcagacagggcgcgaggccgcgatgatctcggacagaaaaccgtgcagggcatcgcggtagcctgttctcgccgaggggccgttttcgtcggatatcatcacgacggtcagcttcagcgacggcacgatgtagagcatctggccgccgtacccccagccgaaatgcacctgctcgccgccgatctgccgcgagaaccagccataaccgtaatcatcgcccgagaaatgcgaattggttcggcgctgccatgactggacgacccagtcggcgggaacgacctgcgtgccatccttggtcctgccttcgttgcggtagagttcgccgaaggcaagcagcgagcgggcagtcatcgccatctgattgccgccgagatagatcccctgcggatcgcgctcccatgcgccgatgcgaaagccatcgacgggcgccagccactcacgcgccagggcgagcgtcgatttgcccccgaccttggtcaggatcgccgacagaagatgtgtcgaggcggtggaatagagcatctgtccgcccggctcggcggcgaatggctgcgaaagcgcgaaccgcacccagttgcgtgacgacacgaagcgcccgtaatcagggccggacagccttcctagcccggcctgcatcgacagcaggttgccgatcgtgatctgcgcgagcctcggatcggcattgtcaggcagatcggccttcaggatcggcgcgatcttctggtccggtccttcgagcagccccttgccgatggcgatgccgacgagagccgagacaatcgacttggaggccgacttgatattgaccgattcccccggcgaatggtcgcgatagccgcgctccgcgatgatctcgccgtccctggcaacgatcacggccttcagcggccgcaaatcctcgcgcgacgaaccggcatcgagaagcgtggcaaccgggttcgcctgctgcgcgacggcgacaacgggcaagagcgacaggatggcgaggagtgcgcggcgcttgatcatgcgccattatctatgacgggcggccgaccaaatcagcgaccatccgatcggtatcacgtggatgtgaagccatatgatcgccttgagccacgatcacggcttcacgcactcgcgcttcagctggtttcgccgctgcggcttcgagtatttggcgatcatgccggccccgcatttcttgtcgtcgaaatagacggatgtgccgggtggcaggttctccagcgtcggcttcgtcgtcacggtctgcgttgcagccatggagccggacgcgcttgaaagcaccagcaggcaggcgccggagaggcataggaatagagaccgcatcatatgttcgccctcacattttaggtacacctaaaatacaattccacggaatcgtttccccggcaagtcatccgatcggcgggcagcacgaagggccgcgcgcggtttgtccgcgacggtgaaaaggggagaaggcaggcggtcgaggtatggatagtgagtgtcaggctggtccgcctgcccgatcgcttgaggctttccggcttcatcagaccgacaggagcgtctctcgatctggcgtccccggacgaatcatctgccctgacggcatctgatccaacccttcgcaaccgtcaccgagcgccgaattatgaacggagaccgaaccggttcatgaacccggctccctgcccgatgacgcgttcatgatgcgccgaccctacgccatggggatgattctcgcctatattttcatccatatgattgttttttctgcgttttattagaacgaaaagtgaatttcttccccacaaaggcgaagctgcggtgttgctaaaatatcgttaaaatttaccgtcacagatttttgttcatctggcgttcagaaaactcttgggaaaggcgacttttgcgctcacattacacctctaggaactaggagtgcatgaatgattcttaaggccacagccgcagcgaccatattcgcggtctatgctttcacgatgtttttcatcgccgccataccggataatatcgttcagactgccgggacacagttggtcgacgccagcgtcgtgaagtaagcgtcgtcaagcaatcgccgttagaaacgggcgaagcgaatacagagggacaatagtccgccggctcttccggcgccccttcaaactgatttcctgaaactggaaatgaaaaagcccctcccctgacccatggggagaggctctgctggacaaggccccggacaaggcttgtgtcaagccgccctgcgaaccggcgcgctggtcagcatccgccccgtgggcacgatcatgccggccgcgccgtcaagccagccttcgacaagctcgagcgccagaaagcgcgagcgttcgaacgggccgggcatgacgagatgctgagccttcgcggcgaagaagccgaaacgctcgtaatagggggcatcgcccacaagcaggatcgcgccgtgaccgcgggtcttggcttccagcatggcggcgcgcatcagcgccgagccgacacccttgccctcgaagctggcatcgaccgccagcggtccgagcagcagcgcgtcgatggccgtgccatcggcattgacgccggcttcgatgttccacaggcgcacggtgccgatcacgtgaccgtcgcgatcacgcgcaaccagcgccaggccttcggccggcacgcggccgcgacggatcttttccgacgacttgcggcggcggttcgggcccatggcgcgatcgagcagggtctcgcgcgcaacgacatcgccggcattttcggcgtcgatggtgaaaatggagtgcgcaaagaatgcgcggacagaatcaagaacagcggccatcttggcctcccgtacccaaaaccgttatcagcggcggtgaatatgaattgtgaaggtgccgccccggctggctacggggcaagcgtggtctttactggcacataagcctttctcggatctgcgatccgagggtcatgtgctagataatgtaggccttcagcggctcgaagccgttgaacgcgaccgccgagtaggtggtcgtgtaggcgccggtgccttcgatcaggatctcgtcgccgatcgagagagtgagcggcagcgggtagagattcttctcatagagcacgtcggcagagtcgcaggtcgggccggcgatgacgcagggctccatttcgtcgccgtcgcgctcggtgcggatcgggtaacgaatggcttcgtccatcgtttcggccagaccgccgaacttgccgatgtcaaggaacacccagcgagcggcgtcgttgtccgacttcttcgagatcagcacgacttccgtcttgatgacgccggcgttgccgaccatgccgcggcccggctcgatgatcgtcttcggcaggttgttgccgaagtggtcacgaaggctctggtagatcgcacgaccgtaagcttcagccgacggaacgtcgcgcaggtacttggtcgggaagccgccgcccatgttgaccatctgcaggtggatgccctgcttggccagctggacgaagacgcgcttggcatcggcaagagccgaatcccaggcatcgaccttggtcatctgcgaaccgacgtggaacgacacgccataggattcgaggccgagctgatgcgcgtagacgagaacgtcgacggccatctgcggcacgcagccgaacttgcgcgacagcggccattcggcaccttcgccatcggtcagaacgcggcagaacacgcgggcaccgggagcggcacgcgcgatcttctcgacttcctcgtggctgtcgaccgcgaacaggctgacgccgagcgcatgcgcacgggcaacgtcgcgttccttcttgatcgtgttgccgtaggagatacgggcagcggtcgcaccggcgttgagcgccatttcgatttcggcgacggacgcgcaatcgaagttggagcccatgtcggcgagcagcttcaggacctcaggagccgggtttgccttgacggcgtaatagatggcgctgtcaggcatggcgtgacggaaagcggagaaattgtcgcgcacgacgtcgaggtcgaccacgaggcagggaccgtcgggacgtcgggttgcgagaaagtcgcggatgcgctgagtggtcatatcgattcccttttcaattccagagctccggaaaaaccggaggacaaagggcagccgatcactcgcataggaaccagccggtggagaccccggaaccttagcaagcgctcgaatgcgcgaatgatgaatcaacgccgcgaaagcgacatggatccggctttgtctgccatggattggagggagttccctaccgcacttccggcaatgaaggtgtgcctcttcagtaacccccgctgatggaaagcagggagagaacaaaaaggcccgcaccgtcgttgcttcaggcgtcctcgcattttccggttggccggaatagcgactggaggggttaattccaggtaccttaccgatttcctcaccaattcgagggttcggcggacacccatgggcacgtgcgactttgggctgaggtcgagataagaatattcgccgtcataatcaagagtttttttgaccccggccaaaaaacttggtccaccgggaaaatcagcgaatcttgcgggtagaaccgtaacgcgttacactttcgtggtcatcaaggaggatgccgtgacggccgccgcagaacgaatgagggcattgagggaacgcaggaaggcgaaccacttgcgcgaggtgcgcatcgtggccctcgacgcgcgctcgccggaagttcgcaagcaaatcgccgaacaggtggcggctctcaacaaggacgaggaacgcgaaatcctcgaatggatggaagaggttgccgatctgagcggctggacctggccggaatgaggcgtggtgacgtggttgtcgttgccatgccaggcgactatggaaaaccaagaccggcgatcgttgtgcagaccgatgccctagcccaagactacccctccgccgtcgtctgtccgatcacttcaacaatcatagatttgaaattccgaccagttctcgaagcaagccagggaaccggcctgcgcattcgctcccaaatcatgacagacaaaatcattggagtgcctcgcgagaaggtcggcaagattatcggacgactcgccgagagcgaaatgcgggaactggacgccgcgctttcattcgttctcggcctagtggattgaccccttacaattggattcttttatctcatggacaccctcacccgcatccgcgccttcatcgacgtcgtcgaagccgagggtttttccgccgccgcccgcaagaccggccggtccaaggcgctgttgtccaaatatgtccgcgagctcgaggatgagctcggcgcgctgctgttgaaccgcaccacccgccagttctcgatgaccgaggccggccacacctattatcgcaccgcgtccgacatcctgaaggagatcgacaacctcgccgatctcgtgcgcgagaacaacgcgcagctgaagggcaaattgaagatctcggtgccgcgcacctatgtcgatgccgatgtcggccagtcactgatcgatttcgcccgcgagaacccggatctgcagctggagatcgccgccgacgaccgcttcgtcgacctgatcgaggagggcttcgacgtcgcgatccgcgtcaccaagctcgaggattcgggcatgatcgcccgcaagatctcggatttccgcatccatctctgtgccacgccggagttcctggagcgtcacccgcagttgcagaacccggccgatctctccaacgtgcccttcatcatcgataccaattcgcgaacccagggcagcatccgcttccagaacccggacggcacctcgttcgccgtcgcggtctccggcccgatcgaggtcaacagcccccatgcgacgctgcgcgcggcgctgtcgggcatcggcatcgccttcattcccgatttcatcgcccgcaagccgatcgagagcggcgaactggtgacgctcttcaacgactatatcgccaccgatcgcggcatctacgcggtctatccgcatcgccgctatctgccggccaaggtgcgcattttcgtcgactatctctataattggttcaagaagcacccgtgagccggcgccgggggagttgaggtcccaattcggtcccatttgccggcaagatcgcatcatctgatttgggccgccctatcaggatttatcgcctcccgagactggaattctggcccgaaccctggacacgaagttagcgacccatgaagatatcgatgttcctggcatcaggctttctgacgctcgtccccgccacggccttcgcgcatccgcacatcttcgtcgaggctcgcctcgaggtggtcgccggcgatgacggcaacgtcgccgaattccgcaacgtctggcgcttcgacgaggtcttcacctcctcggtcgtcatggatttcgacaagaacaccgacctgaagctcgatccgaacgagctcgccgaagtcggcaagacggtccgcgattcactcgtcgactatgactactacatgaacctgacgatgaacgggaagaacatgacggttcagaagcccgacatcatccatgtcgactaccgcaacggccagttgctgatgttcttcgccgtcaagcccgccgagacgatgccgctcaagggcgatcttgccttcggcgtctacgatccgacgctctacacctctatcgattttccgaccgacgacgagctggtcctcgtcggcgacgcgttcaagacctgcaagcaccatgtggtcaggcccgatgccgaccaggtgatctcgcagaacaagcagtcgctgaccgccgccttcttcaacgatccgaccggcaccaacatggcgaagctcttcgccaccaagctggaggtcacatgctgaggcgcaagccggcgcgcgtcctttgggcggccggcctgcttgtcctgaccggcctcgccgccgcccatgcgcagtctccgctcggcatcggcaccgccgagccgagcttccagccctccggcggcccgctggcgccgctgtttctctacgtcaaccaggagcagcagggcttctaccgcgcactcaccggcgcgctgaaggcgatgcgcgaggacccctggcagctgacgacgctgatcggcttgtcctttgcttacggtgttttccacgccgccggccctggccacggcaaggctgtcatctcctcctacatgatcgccaacgagatcgagctgaagcgcggcgtcgccatttccttcatctcggctttcgttcaggggctggtggcgatcctgctggtcggctgcgccttcctgctgctgcgcggctcgggcatcacgctcaccatggccacccaggcgatggagatcgcaagcttcgtcatggtcattctcttcggcctgtggctgctgctgcgcaagctgcgcgccatcgcgccggccttccggccggggcggaaagcgctggcctccggccccgtcggcatgatgctcgactggcaggacgcgggagcaagaggcgagaacacctcctacgcctttggcgaggcccaggctgcgaaggccgggcacacgttcatctcgggcatggcctgcgagacctgcggccagtcgcacatgcccgatccggcgatgctcagcgcggaaaccttcagcatccgcgaggcatggtcggcgatcgtggccgtcggcctgcgcccctgctccggcgcgctgctggtcttgaccttctctctgctgaacggcctctatctcggcggcgtgctctcggtcttcgccatgtcgctcggcaccgccatcaccgtcgccatcctcgcaacccttgccgtcaccgccaagggtaccgccatgcgccttgccggccctggctcgcgcctcgcgaaccgggtgggccacggtatcgaactcctgggcgcgctgcttgtcatcgtgatgggcgcgctgttgctcggcgcgtcgctgcagggcgtggggtttggtgggtaggtttgattggtgagggggccacgcggcacaacccaaatgaaggctaccctaaccctcacccaccccgtcgccgctgataccgcgcccgtagccagaacaccgcgaagaacgccatcaccaggcaaccgccgacagcggtcgccaggaccggcgaataattgccgatccacagcacgatcgatggcaggaaatagatgacgagaccggcgcagacgaggatgatcgcagcggcgatcgccggcgagcggtgtgagggttgcggatcggccatgcgtctgtctcctgcgggtcaggacaaacggcttaggccagccgcccgcgaaaggcaactggccgcgatacggcgcaccggcacggccgtcagatagcgatcaccgccggcgtcaggccgtgactttggccgacgacacggtggcgtcgatatgatcgagcagcgcgtccggaaggccgagacgaccggccagcaggtcgagatagccgcgttcggcgcgggtatcgggattgatcgtcaggcgcgtcgcggtatagagctcgaccttctgctcctcggtgcgcgcggcggccacgagatcgtcgatatcgacggggttggcgagttcgttgcgcaggaatgcctcggcttcagagccgagatcgacctccttcaccttttccatgatgttggcgcgctcggcatcgtcgatatggccatcggccttggcggcggcgatcatcgcgcggatcagcgtcagggcgaaatcgttggagagctgcggcccttccaggctgaaggccgaatccggcggcggaagcgctatgggctggcccatggcggcgccgggctgcggcgcgacatcgggcgatttgcccgactgataattcttgtaggcaagatagccgagccccgcgatggcggcgagcccgccgatcgtcgcgacgttgcccgcaagcttgcgtccggtcttggtgccaaggaccgccgtcgccagcgctccggccttccatggattgttcctggccatctcgatcgcgccacccgcccggccgcgaacgctgccgcccatgcccgggatctgcgatcccagaaactgctcgagaagtttcttcgcgtcgaacatgcctgatcatctcctttttccgttcctggggagataggggcgaccaagcctgaattcaaataacggttgcgttagggcagacctcttccggcctactacggtgcgtgcggcaaagccccttccggcctgccggccaccttccccacaagggggaaggagactcgtggcggcgccgcgattaagcccctcccccttgtggggaggggttggggaggggttttcctcccggacgcagaaagccgcctcagcccttcagcgcagccgcctcggcggccagcttggtgatgccgacccaatcgcccgaagcgatcagttccttcggcgcaacccaggagccgccgacgcagatgacgttgggtagcgacaggtaatcgcgagcgttcttcagcgagatgccgccggtcgggcaaaacagcgtgccggcgagcggggaggagaacgccttgagcatggccgcaccaccggcctgctcggccgggaagaatttcagcacctgatagccttcttcgcgcagcgccatgacttcgctggcggtcgccgcacccggcagtagcggcacggcggaatcgcgcgccgcgtcgagcagctcctgcgtcgtgccggggctgacgatgaacttggagccggcggcaaccgccgcttcccaatgcttggcgttgagaatggtgccggcgccgacctcggcaccctcgacctcgtcggccacggcgcgaaccgtatcgagggcagcaggcgtgcgcatggtgatttcgatggccttcagaccacccgcgacgagcgcccgcgccagcgacacgcccgacttgacgtcgtcgacgatcagaacaggcacgacgggctgcagtttcaggatggaaaggagtttctctgtcttttcgcccatggccgtggttcctttgaaacgatttaattccggccaccggaatagacctaccgctaaagtttgtcgagaccgcaaccatctttggaacggaatgggtatcaacctcagccaatttgcgctagcgtacctgccgtcgtcaaagaggttcatcggtcatggcaaaagagatcgagcggaaattcctggtacgcagcgatggctggcgctcgggcgccaaggccaagtctgtcctcagacagggctacatcgcgtccatggatgatcgctcggtgcgggtgcgcatcatcgacaggaagagcgcccggctgaccaccaagatcggccgcagcaagatgacccgcgacgaattcgaatacgagatcccggtcagcgacgccgaagaactgctcgatgcggcgatcggcatcgtcatcgaaaagacccgctaccgcgtgccctatgagggctacgtctgggaggtcgacgttttcaccggccagcatcgcggcctcgtcatcgccgaggtcgagatggggtcggaagccgaacggccggcgcttcccgcctggctcggccgcgaggtcaccggcgacttcagatactcaaatcaggcattggcaaccgaatttgagcacgaccggcatgcccttcagcatacggcctgaccggtccttcaaatcacagttccgcaagctcgcccggcgccagttgcgccatgcgatcgacgtgctcgaaacacgccccgagggcaccgaccacgcgatccatgaaacacgcaagcggctgaagcgggtgcgctcgctctaccgcctggtcgcgagtgccgtgccgaagttttccgcccgcgagaacataaggctgcgcggcatcgcgcgatccttgtcatccctgcgggatgcggcggccctggtcgagaccgccacctatctccacgagcgcgcccgcgacagcgacgaggccgaggcgctcggccgcatcgtcgtggcgctcaccgcccggcgcgaccggctgatcgccgcaaggcgggatcccgaaacggtcgtctcggacaccatcgcggcgctgaaacgcgcgatcgcggcactcgacgacgtcagcctcaagggcgggcaccgcaggcatggccggcttctggcgcatgggtgggataccacggtacgcaaggcgcgcaaggcgctggccgcctgcgaaggacatgtctcggccgaggcctttcatacgctgcgcaagcgcacgcaggattaccgcgcctatcacaagctgctcaatccgctctggccgaccgccatgaacgccaaatacgaggcggcaagcgcgctggtggacatgctcggccgcatcaacgatctcgaactcttgtgcgagctggtcgagaccgagcatcaccatttcgagaatgccgacgacctcgcgcatctgctctacgccatcatcttccaccagcagcagggccgccacgatgcgctggatcgcgccgagcgcatctttggcgacgatgcggatgacgaggcgatgcgtatcgagatgctctggatcgccttcggcggctgaatatcagagcctttcctggttagattgaagcattctgttggctcaaacggagtcggatggtcgtccggccggcgcgcgtcgtagccaacgcatacggccaagccggccgaacgatcaggcggcccgtttcagccaacccccgctggcttgcttcgcaaaccggctggggccgggcatctttccgccaggatcaaaggcgatcggctcgaccgtacccggggtatgcccttcgccaatcgcctttgccctgacgaaaacctgctccggcagaatgcttcaagctaaccaggaaaggctctcgccgcacccgcgggcgattgcgcttgagcaccgaaagctgtatttccagccgcatgaccgacacatcgacccatcaggcgacgagccctttcctcgtcgcggccctttatcatttcgtttccgtgccgcacttcgaaagcctgcgcgcgccgctgcagcagctgtgcgaggataatggcgtcaagggcacgctgctgctcgcccatgaaggcatcaacggcaccatcgccgggccggatgcgggcattgccgcggtgctggcccatctgcacgccatgccggaattcgcccgcctcgagcacaaggaaagccgcgcgtcgaaaatgcccttcgtgcgcatgaaggtgaagctgaagaaagagatcgtgacgatgggcgtcgacaacatcgaccccaacaagatcgtcggcacctatgtcgcgccgaaggattggaacgcgctgatctccgatcccgatacgatcgtcatcgacacccgcaacgattacgagacggcgatcggcatcttcaagggcgccgtcgacccgaacaccaagaccttccgcgaatttcctgattgggtgaagaacaataccggcctgcacaacaagccgaagatcgccatgtactgcaccggcggcatacgctgcgagaaggccaccgccttcatgaaggagcagggcttcgacgaggtctaccacctcaagggtggcatcctgaaatatctggaggaagtgccgcaggaagaaagcctctgggaaggcgcctgcttcgtcttcgacgagcgcgtttcggtcgagcatggcttgaaggagggcggccacaagctctgccatgcctgccgcaatccgatcaccgcggaagagatcacctcggacaagtacgaggaaggcgtgtcctgcagccagtgctacgacagccgcaccgaggaagaccggctgcgctttcgccagcgccagctgcaggtcgcgctcgcgaggaagcgcggccagaagcacatcggcacctgacagggtcggcttagtttctgggtaacggcccgatcaggcggcgttgacgcgtcgcccgccggcctttcgcgcacgcgcttccatcagccgcgcggtgatgtcgtcggcggagaccggcttgctgaagaagaagccctgcagcgtatcgcaaccgaactgcgaggcgatatcggcctgctccggcgtctcgatgccttcggcggtgacgggaatatcgagcgagctggcgagcgccacggtcgccttcagcatttcgcgctggctctcgctgtgctcgatatccatgatcagcgaacggtcgatcttgatacggtcgaaaccgaactgccggagatagccgatcgacgaaaagcccgagccgaagtcgtcgagcgcgatcttgacgccaagcgtcttcagctgctcgatggattggcgcgtccgcttcgggttctggatcatgtaaccctcggtcacctcgagcgtcacccgtttggcctcgatctccgtctgccgcagcacgtaacgcacgtaatcggtgaaggccggattgcggaactggccgggcgagacgttgacggcgatcttcagttccggccattgcttggccgtctcgcaggccttgcgcagcacgaacagtccgagcgcctcgatcaacccgctggtctcggcgaccggaatgaacacatcgggcgacaccggcccgtgaccggggcggttccagcgcaccagggcctcgacgccgaccatctcgttgctgtcggcgccgatcagcggctggtaggcaagcgtcaggtccccgccctcgatcgcctggcgcaggtcgagttccagcgcgttgcgttcctcgcgatcggcatccatggcgggatcgtagagcgtcatgcgggcgcggccggcttccttggccttgtacatggcgagatcggcgcgccgcaccagctcctcgcgatcgaccttgccgccgggcgaaaccgcgatcccgatgctggcaccgatgacgaccacccgccgaccgatttccagcggctcggcaaggaagtcgagaatatgctcggaaagctgcaacgccgccgcatcggcgcgcggcgaggcgaagacgatggcgaattcgtcgccgccgatgcgggcgagcacggcgccctcggggatcagcactttcaggcccgccgccaccgcccggatcagctgatcgccggtgccgtggccgtaggaatcgttgacctccttgaagccgtcgaggtcgaggtaaagaagctggacattgtcctcggtctgccgggccgatgccaccatcgcatcgacggagacgcgcaggccgtcgcggttcaagagcccgctcagccggtcgcgaagcgcttcctcgcgggcgacgatctcctcgctcttcagccgccgcccggcaagccagccgatgatcagcagcacgacgaagaacaggccgacgaggcagagcgcctgcaccacctgccggcgcacgtcggcgtaaccgacatcgccgggggcgcgcgaggtccagatcagcttgccgagcgacacgccgagcgtatcctcgatcggcacggaataggcggcgtcgcgatcggcggcgaccagctgcagtccgccgatgacataggtcttgccgatctcgccgatcttggcggcatcgagatggcggatgaagatgagatagcgcttcttgccggcgccggcggccggcgcgccggacttctgccgcaccagcgccacgccgccgacggcgatgccggattgcgtgcggatgaaaccggatgcctcggggacatcctgaggcccggcggccttcaccttgtcgaacagcgcccacagagccggcgagaaaaactcctccaacgcgccgtccatcggcttgccgtcgcggtagaccatgatcggcgtcttgtcctcgtcgatgacgacagccatgtcgaacagcgcgctgttgacggacatctcgccatagttcgacaccgtccagtccatgccatcggtggcgtagacattggtggcggcatcgtcccatgccgcgtaatcgttgagcgtggcgccgagttgcgaaacgaaattgtgcagcgcgccggaaatggtctcgcgcgagcgctcgtcatccagcacgttggacttctgcgccacgtgactgagcgcgttgagcaccatcatcgtcacgaccgcgacgacgacggcaaacgaaaacagcacgcccgccacggtggtgtggcgaccggcacccagaatcgcgctgcgtgtgctgaagatcgatggcatgcattctccctggcgggaatactgcccacaagccttcaaaaaacggttaaaacaacgcttgaacgattaagcaaatccttatggacaagatcgcgcaaaacaccgagaaaacatttaaatttcaaatacatagacatattaagccatgcttgtgaaaacgtccgccgcgactatgcgcgcctaattttgcaagcgcgttcaaaatatcgccgccatgaacggctgaatcgcgaagagccggcttacttccatggcgccgcttgcgtcatcccacgggtcgccacaacgaaaaagcggcccggcaggaccggaccgcttcatctcggatcatgataattcaggtcttaccaggacgggatcagcgcgcccttgaactgttcgttgatgaacttgcggatgctttcgtcgtggtaggattcgaccagcgtcttcgcccacggtgcgtccttgtcggcggtgcgaacgacgatcacgttggcgtagggcgacttttcaccttcgatggcgatggcgtcggtcttcgggtgcaggccggcttccatggcgtagttggtgttgatgacggcggcatcgacgtcatcgagcgaacgcggcagctgcgcggcatcgatttcggcgaactcgatcttcttcgggttgtcgatgatgtcggcgacggtgaccttgatgccggcgtcttccttgaacttgatcaggcccttcgaggcgagaaccagcagcgcgcggccgccattggtcgggtcgttcgggatggcgacggtagcgccttccttcagctcgtcgaggctcttcaccttcttggaatagacgcccatcggcgtggtgatcgtcgtgccgatgctgacgagatcgaacttgcggtcggcgatctggttgtcgagatagggctggtgctggaacgagttggcctggatgtcgccatcgttgagcgcctggttcggcacgacatagtcggagaactcgacgatctcgatgttgagacccttggtcttggcgatctcggcgaccttttccatgatctgcgcgtgctcgccgggcgtgacgccgaccttgatgttttcggcgaatgccgagccggccgcgaaggcggcgatcgcggctgcgatgatgaacttcttcatgggtgtctcctgtgttgaattatggtttgttattaatggatcagtttttccggttgcgcttgtcgaagcgccgggcaagcccgtcgccggcgctttgcaccacctgcaccagcacgatcagcaccacgacgacgatcaccatcatctccgggttgaagcgctggtagccgaagcggatgccgaggtctccaagcccgccgccgccgacggcgccgaccatggcggagtagccgatcaggctgacgatggtcatggtcaatgccatcaggatgctcggccgcgcctcgggcagcagcaccttgagcacgatctggaacggcgtggcgcccatggcgcgggcggcctcgatcagccccttgtcgatctcgcggatggcggattcgaccaggcgcgcgaagaacgggatggtggcgatggtgagcggcacgatcgccgcccaggtgccgatcgacgttcccgtcaacaggcgcgtcaggggcacgattgcgacgacgaggatgatgaacggcgtcgagcgcgcggcgttgacgatcagcccgagcacgcggttggtcttcggcgccggaaacagctcgcccttgcccgaggtggcgaggaacacgccgatcggcaatccgatgatcgagccgacgatgccggcgacgaacaccatctgcagtgtctgcatcagcgccttggagaggagattgaagatcatatcaggcgacataaccgagcacctccgtcttgagaccggtttccgaatagaagcgatcggcgcgggcgatcacatcaggatcggcggaataggacacgacgagcgacccgaagggctcgcccccgatctcctcgatcgcgccggcaaggatattgacgtcggagccgagctcggcgaccagccgcccggtcaagggcttgaaggcggtctcgccgaagaacaccagccgcaccagcgcccggtcgcccgctgatggctgcgccttgatgcccgaacgcagccattccggcagcttcagcgccgaggcgagcagcgtgcgcgtcgtctggtgcttgggattcgtatagacgtcgaaggtccggccggcctcgacgatgcggccggcatcgatcaccgccacatgactggcgatggtcttcaccacttccatctcgtgggtgatgagaaggacggtgaggccgagttcggcattgatgcgcttcaggagctcgaggatcgactgcgtcgtctccggatcgagcgccgaggtcgcctcgtcggagagcagcagcttcggatcggtcgccagagcgcgggcgatgccgacgcgctgtttctggccgcctgacagctccgagggatagttgcccgccttgtcgccgagaccgacgagatcgagcagcggcccgaccttggcgcggatcgtcttcttgtcgacaccggcgatctccagcggcagcgccacattgtcgaaggcggtgcgcgaggacaagaggttgaagtgctggaagatcatgccgacctgccggcgcaggccgcgaagcccctcttcgctgagcgcgccgacatcgacgccatcgacgagcaccttgcccgaagttgccgtctccagaccgttgaccatgcggatcagcgtcgactttcccgcgccggagcggccgatgatgccggtgatggcgccgcgcgccacggtgaggtcgacattctcgaccgcggtgaacccgccctcgccatgaggtccatagcgcttgccggcgcgctcgaaggccaccatcgggatagctcccgcggtgccctccgggccctgcccggaatggccgcccgacgcgcctggggcagcgtcttgtttggcctgatgttggagtgtcatgtcatgctcgcatgtgttggtcttcaaaaactggcggttctataaccgctatcgcaccgattagccaatcgggcggcacattcgaagacaatcacggatgcgggacatggatgcggctttcgtggcgggcgtttgggaaaggcgctttgcctttcctgttgctgccacttatgccgtcatcggttgaaaccggacagggatgtttttttatttgtgcggtgcagcaggaaataatctacctgccgcatagacaattcgggcgaatacgatcacgcgctcttgtgattacccttgggaaactgcgcggcgagctccgaataccacttgccgctcttcttcaccgtgcggacctgggtgtcgtaatcgacatggacgaggccgaagcgcatgcggtagccctccgcccactcgaaattgtccatcaggctccaggcgaaatagccgcgcatcggatagccgtccttgatgaggtcggcgacgacatcgagatgctgcatatagtaatcgagccgcatcgtgtcctcgaccgcgcccgcgtctatgccggtattgtcgcaggcgccgttctcggtgatgtagcactccggcaggtcgtagcggcggtagagatcctccaccacatgcttcagcgccggcgcatagacctcccagccgatatcggtcttgatgtcgctgacgcggggcgcctcgaccgtccaggggaaatcgccggtcttattcggatcgtcggcgacgcgcagcggcgtgtaataattgagcccccaccagtcgagcttctggctgatgatcgaaagatcgccctcctcgaccacgggcatgcgatcgccgagcgcctccaggaactccctgggatattcgcccttgaagacgggatcgaagaaggcgccgttgtggaactggtgcgcccgctcgtcggcggcccggtcggcggcgctctcggaccccgggataaccgacatggcgttgagcaccaggccgacaggcacgttgggcgcttgcgagcggatcgcctcgacgccgaggccatgggcgaggttcatatggtgcatggcgtgtagtgccgcctgcatgttgcgctcgcccggcgcatggatgccgtagagatggctcagccagacgatgcaccacggctcgttgaaggtcgcgacgctatccagacgatcgccgaggcgcgccatcaccgtcttggcgtagcgctgataggcataggccgtagaccgcgccgtccagccgccgtcgccggcaagcaatagcggcaggtcccagtggtagagcgtcgcgaaggtcttgatgccccgtgccttgcagccgtcgacgaggcgatcgtagaaatcgagccccttctcgttcaccggcccggtaccatctggaatgatgcgcggccaggcgatcgagaagcggtaggcctcgacaccgagcgactggatcagatcgagatcctcgtcgaggcggttgtaatgatcgcaggcgacgtcgccattgtcgcgattgaagacccgacccggcatgttgcaaaaggcatcccagatcgacggcttgcgcccatcggccttcgaagcgccctcgatctggaaggcggccgtcgccacgccaaaggtgaaatcgccgggaaagcgggcggccagggccttggcatcaatcttcgcggcggtcttcgcatcaatcgtcaaactgaaatcctccaaactcggccggcggctgcgtcgcgcttccggctgctttctactctacgtataggtttgaaatgtcaaatctgtaacgttacagctgaatacgaccgcgcgccctcaaaggacatcctcgcccgatggcagcaacaattgccgcgtgaccccgatccgctcgagaaacaccgcatcgtggctgacgacgagaagcgccccgtcataggcggcaaggcccgcctccacggcggcgatggaatcgatatcgagatggttggtcggctcgtcgagcacaagcagcggcggcggctcggcgcctccgagcacgcaagccaagccggcgcgcagcaactgcccgccgctcagcgtcgaaacctgctgaagggcggcatcggcccggaacatgaaccgcgccagcgccgcgcggcaggcattctcgttcgcaccgggattgagcctgcggaaattctcggcgatcgacagcgaccggtcgagcaggctgacgctctggtcgaagaccgcaaggtccacgggaaccgcgaccgttcccgcccatggcgcgatccgcccggtgacgagcgacaacagcgtcgtcttgcccgaaccgttcggcccctcgaccgccacccgctccggccctgtgatcgcaaaggagagatcggtgatcacgggccgatccgcctcatatccggccgtcacaccatcgagccgcagcaccacccgcgacgcgggcagatgtgtcgacgccagcttcgcggaaaacggctgcaggatctcgatgcgctcgcgcgccgcgctggcatcctccatcgcctcctcgcgccgcttctcgccgagccggaccttgtctcctttcgtgttctccgccgcccgcttcaggccgccggcgacgatacggggcatatcgccccgcgccgccttcctggcgccgattttgtcgctgcgcgcctgccgctcggccgaaagctgcgcgccgcgggcgacatccgccacccgcttttcggcatccgcgaggtcgtgttcggccgccgcaagctcgaccgccttgcgtgcctgaaacgcgctccaattgccgccatagcgcttggcgccgagcgtcgtcatctcgacgatcgcatccatccgttcgagaagcgcgcgatcgtggctgacgacaagcgccccgccccgccagctctgaagcagtgcgatcaccgcatcgcggccatcgcgatcgagattgttcgtcggctcatcgaggatgaggaaatccggttcgccgaagatcagcgccgccagcccgacgcgggtgcgctgaccgcccgagagcgaggtgagcggcgtatcggggtccgccgcaaaccccatacgatcaagcgcatcggcaagccgggcttcgagcgtccagtcggcggcggcaacctcatcggccgacgcctcgccgagaaccgcgcgcgcgacgacatcgagggccgcgcggacaccgaagagatcggccaccgtctgttctgaatcgacctgcaccgcctggcgcagcacaccgagccgcccgctgacggcaacgctgccggattgcggagcgagttcacccgtgatcagcctcaaaagcgtcgtcttgccgacaccattgcggccgaccagcccggcgcgttcggccccgaagctcagatcgagattggaaaaaagcggccgcccgtcaggcgtggaccacgagagattggaaagggtaatggatggcatggacatgggtttcccggatggcaaggcaaagcggcattgcgatcgggttgaaatccatggtgcaccgtcctgttggtattgcggatggttgtaatctagacaggcggtggggtgaaatcaaggcgggcgggtgcaaaggccccgctaccctcataacaaggcccctcccaagtccataa

SEQ ID NO: 18 - DNA, 79016 bp, Rhizobium matallidurans
  source 1..79016: mol_type = genomic DNA
tccggtcgagcggccggcgatagagcgggcacgacggctgtttcgaatgacgcagccgttggcgggtacgctcgccgacatctatctgcgcgaacgcggcattctgcgggcgtccacccatggtgcgctccgtttccatccgtcctgctattatcgcgatctcgtcaccgctcggacgaccagctttccggctctcattgcggcagtgaccgatgcggccggagccatcaccggcgtgcaccgcagctggctcgatcccgatggcgtcggcaaggccaaggtggacaatccccgccgcgcactcggcaggctgctcggtaatggcgtacgtttccgctttcccgtcaccgatcctgtaccagtcctggcggcgggcgagggcctcgaaaccatgctgtcgctctcgcacgtgatgccaggcatgccgatggtcgccgccctgacggccaatcatctcgcgggctttcacttcccgcccggatgccggcgtatctatatcgcggccgacgcggatgccgcaggccggcatgggctcgagggattgagccgacgggcgcaggaatgcgggatcctgccgctggtgctgtcgccggaactcggcgacttcaacgaggatctgcgccggctgggtcccggccggctgaccgcaagcctcaaggctcaactcactccggaagatgcggtggccttcctgccctgatgaggcttgtcggaaggagcacaggcgggattgctgcagcgcgggtgagaggacggtccgtggtgccggctcgctccccgtgtgaatgcgcgcccgcgggcctgccgagaggcgacccttatcacgcgggcctccgggccttcagcgggtcggtcgggtttcttcccctgccgggccatttccgcgcatcggctcctccgaaaaccggttcccacttttcgggccgatgcgatggcccgtcattcctcgcggatcaagaaaccctccctcagccgcccggcgcttcgctgggccgctgcgcttcgcttgcggttccggcctcggcccgcgtgaccgggttcgccgtcaggccgcgagaggcgcggcccaccgaacggagaccaccatggacctgatccttcccgccgacgacggcttcgagcccaaccacgcgtcctccccgaccgaccgcttcatctacgagatgcaggtcttcggctatcgccccttccaggatgagcccgatccgcggccattgccgggggaacctcaggtccagtcatcgatcacaacgatcttcgacgccctcgccgagatgctcggcgacacccgcctggagcccgatctcgaagacctgttctggtcgatccccaatctgttccatcgtgccggcgagcgcatccagcgcgagctcgatcgcaacgagcaggcgcagcgtaccggccagcgcgagcaggacggctcggaggtcaagagtgtcgagctcgaacgcctcgttgccgagggcatcacgctgttggaacgccgcaacgccttcgagtttatgcgcgatgtttccgccgatctgtttgaggcgcagaccggatcgtcctggcggccccgcactggttccaaagtgaaccatgccaacatgacggcggcgatgatcgatagccgggacttcctctccgcgcggcggcgcgccgagaccgaggtgctgatccccgccggcaccaagatcgccttctccggtggcatggactacaatgatcatgagcggatctgggctaagctcgatcaggcgcatgccaagcatgccgacatggtgctgctgcacggcggctcgccgaagggcgccgaacggattgctgcctgctgggctgaagcccgcaaggtgacgcagatcaccttcaagccgaattggacgaagcacgccaaggcagcacccttccgccgcaatgacgagatgctctcggtgatgcccgccggattgatcgtctttcccggaaacggcatcacagacaatctcgccgacaaggcacgtcggctcggcattccggtctggcaggcttcaggagacggcgcgtgagcgccgtcttcccggatacatggaaaagatggaaaacatgggaaaaatggattatatgggaatcgaagtggagaccatagcgatgaagcagttcacgacaggcgacctcaacaagcagatcggcgacgttaccgatgcggcaagccgcgagccggttgttctgactcgccacaagaagcctcgcttcgtgctgatgagctacgatcactatgagcgcatgcgcaccggcggcaacccccgccgcgcctttcatatctcggaaatgcccgccgagcatgcggaactgttcgacgaggcgctcgatcggctggcgcatggcgaaggctacgacgatgagccgtgaattccgacccggcgaggtcatctcctatccctacctctgggcctggcagcagcagcgcggtgagaccgaaggccgcaagcagcgtcccgtctgcgtagtcatcgccatccgcaatgccgccgacggaaacacgcatctggcgcttctcgccatcaccacgcagccgccacaggcgggtcgcatcgctctggagatcccggagatcgagcgcaagcgtgcgggcttaagcgatctaaagcagtgctggatcatggtcgacgaatacaattacgatatcgtcgagcgctcctggtacatcgagcccgatcaggacatcctcggccgcttcagcaaacccttcatggtgaagatcgccagactgtttgccgaggcgcgcggccgaaccggccgggtcaacaggctcgattgaaacttgccgccgcttcatgccgcatcttccccttcttgttctccaccgtcctcccgaactcgtctccgccgtggcgcatctctggcgctatctgattgatgcggccacgattgcgtaaatgaccggcccgtcgcgggcggttctcgatcgatctcgatgtcgcatcgctgcacgtccaaggcgacaccccttgaagtcaagtctgtcacgcggttcggctccgcagaacttcagttgggtcaggagaggccgaggattcgagcgtcacgccaccgaggccgtctttgacgatgaggatgggatcaggcctgtgccgatgtctcgcgatgtgccgactggttgacggccagcgtccgttgacccgaacaccaccgacgcatgtcacgagcgcggcactccgcgggtccgcaaacggccgccacggcgaggtctcctgccgacgtcgcaatcaaggaccattcccgttctttatgtcgcctttctaagggaccggccgcgatcagcgtcaacccgcaaggggtttcccttcgctacgctgcggtgacgcctgcggcgcggccccttcttcgggcgccatcgggaatggtcccgatgcaacgaaggagacaatcccatggctaccacgatcgcaaccctcaccgaaaagaccgacggcactctcgaaggcgtcttcgccaccatccgggtcaacgcaccgatcgccctcatcccgaacgccaacaaggcgagcgaagaagccccggactaccgcatcatccaccgcaagaccggctttgagatcggcgcaggctggaaccgcgtctctcgccagactggcgaagaatacatctccacgaagctcgaagcgcccgagatcggcgtgatcttcggcaacgtcgccccagcgcccggcggcgagcccggcaagaaggtcatcctctggaacagcccggcctgaaccggtcggccggccccgaaactggggccggcttccccattccaatggaggccgccatgagccgctacacaattaccgtcaccagtaccgcattccgccacgccgacccggatgccattatcggctatgaccgcccgcttcagacgttcttcctccaggcatttccgggcgccggtggtgaggatcttgaactctggcttggcacggacttcaaggagttcgaaactctgtcgcaactgcgtgccgcagcaatcgcacgcggtttcgacttcatacccttggcatccggcattcttcacaagctgctggacgaccatgcccgcgaagcgcaacacgtggtcagcgacacgatcatccaggatcttcttgagcggacatccgcccactgacgcaaacccgaaaaaaatagcccggcacgacgccgggctatttttatgctgacaaaattacttgttcagtgcgtctttcagtgccttcgccggcgtgaaggctagctttttggccgcggcaaccttgatcgtcgcgccggtcgaaggattgcgcgcctcgcgctcgggggtcgcctttaccttgaagtcgggtagggaggaggtcggtcgttgacgcggccctctctccctcccacggaaccggacttgatagtttcccatcatccggctcctatgctgacaataccccaattctgtcgagccgttgctgaagacgaccggcatggatcgcgtgatggcaaggttcgcatgcaatggtacgtttgcgcatgcgagctgctctggttcgagcaagccatgagacgccattcatgtccgccatccgtcgaacgtgatgaatatcgacgggcacatcggatatcccgcaatactcgcaggagcgagcgcgcagccgatcaacaagatcagtccgcccccagaaccagaacgaaggctggtcctgatctatgcgtgaatcttccatgactttcttcgatgcaacgtgcctgagttggaataccgcgacgaacctgcgcccgtctttggtttccacccatagcccatgatccccttggtgccgctgcaaatggatactgaagatcttcgcgatactgcatttgtgctttctcgccaaagtcttcatgagactgaaccaccacacccgttggagcggggccatctcatttttccagttattgcctaactggtaatatccgaccaatccccgtagcatcgcgttatacgcaacgatgatggcgacatccgagctgattgtcatctcaggacgcatagcgccacgtattgcatgatagctgccaagtcggttccgtttagcaaaggccgcaagcttctcccttgggagatgcagtcggattccgcgtaccggtgtccgcttgaccattgcccttcgaccttttctcgtgacacgtttctcgcgaaacgcacgtttggtcgaccgaacagcgtagccgagaaaagtcaccccgccgtcatctgcctttgtgataccgctcttttccggtgcgacttcaagatgaagctgattcttgaggaaggatgtgacctcattcaggatgtcggcagcttcctgtttcgtgccgatgacggagataaggaagtcatcggcataccggacatattgaagccgccggaagaacgtgtcgtggaagtccttgctggggagcttccgggcagcaacgatcaaaggctgcagttgagcccgaagccgttctgcttcggcctctcggccagagcttcgcagcttcgcgatatgctgacgataatgcgctcccttgctgagcagtttctggtattccggattcgttggcctctcaatgccccggtcgaacccggttttgaggctatccatgaactcatcgagttcatggagatacacgtttgcgagcaagggcgagattactccgccctgtggtgtgccgctatacgacgcgtgccacttccagtcctccatatagccagccgtcaacattcctctgataagcttcagaaaccgctcgtcatcgatccgtttcctcagcagtttcatcaaaatgtcgtggtcaatattgtcgaagaacccggcaatatcggcctcgaccagccaaactgttccgccccacgtcttctggatggatgccagagccgtatgacaggagcgcttgggcctgaacccgtgcgagcgacgagaaaaattcggttcatagatttgctccagaaccagcttcacggccgcctgcacgagcttgtcgtcagcgtcgggaatgcccagagggcgtaatttcccgttcgccttggggatgtagtgcctgcgaacaggcttgaagcggtagcttccctccttcacccggcgtatgatccagtccagcctgtccagcgagaagccgtcaagcgtattgcggggatcaatgccgggggtgagagccccggagtttcgggcgatcgcttcataggcccgtgcccaaatcttggggcagtccagaagacgatggaggccgtttatccgctttccctgtcgtgacagggcaggtagcgagatcagtcgtctttccacggcatcgacgtgcatcagcctgtctcaattgtcgtcataaggctcccgatctcatgtcagcacgccgcccttcacccggccagaggggattcccgtccggtcacccggcgcgtttcacccattgccgtccgcctctgggcggctgtcccggacattaccccgggcgtttggctagtatggcggctccgtcgtcatgtgggtctggtgaggccagcccgtttagacgatcccgcgtttacgcaatgaaggagatacagcgcggacaggtgtcccattcaaccgttcggtccccggcaggggatggagagcgcgactggggcggagcaaacgggcaaatttcgtcgctccccggaatgatcttatcatccactacgctcgatgacgcatcggctatcgttgagcgtcaccaccggcttctggttcctcggtctaggattcaggcagtctagctttcaccatacgcgctttgccctgaccgatcagatcgcgatagctgcgacggcctcggccttttcccgacatgctattgtcccctgtcgagtttccccgattgcagctgttgccagccaaggtaagtcggtgggcatgggtagttcccagttatcccagcagcataaactgcactcttacatcgcgccgacgcggcgcaccttgccgaagcccgggagcgacgtctcgttgccggcgatcgcagccgccgtaatcgaggcaatcaccgcttcgacgatcgccttaccctgggccttggtgaggctgtgttcgccggcgatctagtcggcgatttcattggtcgtggtcattttcttctccgcatcaacgttaatgcgagaatccctgacaggggatcaaagcgctgtcatcgacgcaccacgtcaagatcaacgatttgcccatttttccacaactaccaaggactttgaggcatctccgtgggtctgcatggtggatccgcaagcgggcatcgagcccgcttgcggatctctggtgccatacctgaggaaatgtctgctcagtccgtccgacgggtgtcatgcgggcatgacggcctcaaggacgagcggtgcccccaattttgcctccgctccggttccctgcactccgacaaaatcggcacccccactcgccgccgctggcggtcgcgttccgcgatccctgaccccgccacgcccccatgaccgcgcgcgtcgtctttcacaaacgtcaaggagacgacgacgatgcttctggaacaacacattgaagagcttcgcctcgaactgcgcgaagcaatcgaccccgtcgagcgccgcgaggtcgaaatcgaactggagctggctcgcgcagagctggcggtgatcaccgcagagcaggagggcgcaattgacgccgagccacccttctgagggtggctttcgccatgtcgcctggcctgacgcgccggatcgaccggcgcttcaggcccgaagcatcgtttcgccatcggcacatgccagatcctgcggtgtttcatagggaaacggcgaaagcggccggacacccccactcctgtttcgatcccatgccaatcgacatgcggatgcatccgccccacggcactcccttcgctatcgatcacccgatgcatcgtgccgtatatgcggtttcggcctgtatccgcgcgaccgcctctttcgcaaaagctggaggaagagcctgactgcctcttcctcccgtgcgaaaggatgctcccgcctttgacctcttgcaccgatgcggccccatcggcggatgagacaggcatcgccgaacagattcggttcaatcgacatggcatagtatcgggccatgtttttcttggcgtcgatgcgttcgacatagagctggtagcgttgcgcgatcatgacacggagaatcgggcagggccgactcggcgtccaacgacatgtttgaatcggtcggtctcgattgattcatgctgatgatgggttgtcggcggatgatccgagcgagccgcctgcggcggacggtgctattcgctctcgctcacggagcccgcaatcggtctccgcccattcgggtcacgcccctctcgcggctgctgcgccggcggcgcgaagtcgccgcgaccctggtcgaggataacgcagggccggctggacgccggatacagacacggcgccttgggcgccgtggtctatctctctctgacgtcccattttgcacccgccgctccggcgtcaaggactgcgcggcccctccaattttcagccgccgtcccttcgggccatcgtcagaaaatcggttcctccacttgccgccgctggcggtcgcgttcgcgatccctgacccctcgcggctacggtgcggcctcctttcgtcagagacggaaaggagacactgatatgttcaatgactggtactacgtccatcagctcgcagtgcttgcgcgcttcaggctcatcgtccttgcaaatcgcttgggttgcgaggacgaattcctattggaactgcatgacaaactcatcgagggactggcatgtgcgattgcgcgggtgcaatccatcacggcactggagcgccagcttgcctttgacacggatgaggaaggcatcgccgccttccagcttcatggcgaagaggaatgcctggcccgtttccggatcacgctgcttgatcatctcgaaatcgacgtcgacactcacgagtaccgtttgaacggcggcgactggcactatgcgctcgcggccgactgcgatggcatcgagatcagctatccaaggcttgtcgccctcaccgatgccgagttgggcacgctcgcaccgatcgtccgcgccatccgcagcgaggcaggcatcggtatcagcatcgcccgtgtcatctacggttgatgcgcctgcgaggggcggcttcggccgtttctcgccttttccactcacttgaccgcttggccgacatcgagcctgcgcgcgctcttgaggggagagacttgccgcctctcccctcaaactcccctctccctgcggtgcgggtcgagacccgctcggcctttcgggccgctaggcggacgctgccgcgacttccccaaacaagacggagaggacgagtaccttgcgctgcgccctcatgcttcgggcatccgctccaggctcgcgtcctctcctgcggtgcgctcgccgtctcatcgttcgcatgtcgtcggggcccattccctccggtcacggtcctctcgactgctcacgacgacggcttgcttcagcatctctcaagaagtctgtctgcccaccgtgctgttcctccggcgcggatcacaggcaatgagcccgtgatcgctgttgctttgtctggcgactcgcaacagcatcggcgcctcgggcacgatgcccagacagatttcttgagagatggcaggataggctattggtataccaatagccgtttcgcccgaggggcgagggttgcggcagcgcatccgatgccgaattctgccaatgtttgcgggcggatcagaagtgagacggagtgcgggtaaacaccgggcgcacttgcgcggagggttcccatcaccagcaggtgccgtcaccggtatccgtacagccttgagaacggcggctcggtgaatcgggaaatgcgtcaatgagcgaaatagccgatcggggattctcctaaacggtgtatcggcttctcggcgaataggtgttcgcgtcaataggtaaatcggcgattaggcgtatgagggagcctccgaataggttttcgagcgtatcggtgaatcggtgaaccaccctatcgacgcttaggcgaatgagcgtttcggtgcttgcgccaatcggcagatgggcgactgcgtaaatcggaggatgggcgttcgcgtcaataggtaaatcggtgattaggcgtatgagggaacccgcgaataggtttgcgagcgtacctgtgaagaggattaccggaatttcagtatcgggctcctccgctgatctggcctgttgctctcaggagcgcgatgccgtcctgacccatgttgatgatatggcgccaactcgccaactgcccacttttcgcgtcgatcaaccgttgaggcaatcgtcacgacgttgcagcttttcccgcttgagcaagctgagtaccgctgttacttatacctcagtataacgggcactttgggaatctctgcaataatacccgctaaggttttttggctgaggtgacggaaataaaggacagggtggtgtcggcgccaagtcgttcgctacggattttgtaagcggcgttcagatgcgagagatcaaagatgcgctctgcaccgttgtactgtagaaggctgatggtctgcatcttcgatgcagaagaagatcgccgaggcttcggcgcttcaagtgcttagaggtcgagcagctgatgtatatgggcgagcgtaatctcgtccagtgctggccgatctctttagacgcattgagaagcggctcgatagatcaccaagcctcatcgttctggacgaggcatggcagatgctcagccatccggtagtcgccgcaccccttgtgtggtgccttgcctggagaaaagtttgcctttcaggacgtcgtcagtcagatcggcaggcaaaagccaggacagcgctgccgtcgcagctcgcccaatcccgtcctgcaccgtgctgcgggcaatcccgagcagatcggcaatatcgcgaacgctcacgccgtctgatcgcagtcgacgcaatgtcgtcgttatctcatggtcagccttcgtctcttcgacatgccatctcctcacgttcaaaaggaggtgcacgccaaggttgctgtcccagccgcactgcttacgttgaaaaactgtccggcatcgaattggaattgcgtccggtaaatcatcggaaactacaccatgatttctcagattgacctcgtaatcctaggacgcgtcgacgcggtccttagcagagtgccggttctggctcatcatggtgacgggcgcttgaacggcggccagcatggagaggataaggttcaggaatatgaccgggtagggatcgaaggcgtgcgaggctgcgatcagattgaccgctacccagacggcgagcgcaacggcgaagattacaatgagtgtccaagaaccgccgaatttcgctaccttgtctgccaatcgttgagccgaggagagcttctcgtcgaatgactgattttgaatcgcgggtaatttcccttcgtgaaatcagtcgccggaataccgcttgctctcgctgcgtcagcagctcgaagggctttcccaggtatcgattggcaccaagcgaaatttcctgcgcagatatctcgcgccctgtctctgcagacatgatctccttcagatgtacaaacttgccgtgacttcagggcgttagcgccgttcaagacccaaccaattccctgccagatatctgagcaatcgagatactgaagaaaatcggagtttccttaccttccgagtcggtgccgggcgtggaggagccgggctcccaccacaatggccgcttctgcaagagggaccaggcgtgaagacgttcgttgtgccgctccgaagtgtccggcagttcctcgtaggtcccttgaacgaggacgctcctccaacggtgatgttccccgctttcctccacctgaaggcaagcgttcggattgctccgcatccaatctaccttttgccccgccagggaaaagacatagagcttttctccatcgaacgcatagtggacgggcacgacgtaaggtcgattgtcgcggacacaggcaagatgcccaacattttggtgggcaacgacctcccggctttcgcggtcagtcatttctcgaacgcccaatttatgatcctcctagctctgaaacgcgggtatggaacggcgcgagccttggcgtttgctcgaaggtgcaatggttttcgttgcttcttcccggcccatgttttcgaaagttgcctcgaaaagctcctgcgcatatgcaatcgcagaatcggcatccaaggacgacagcttgatgtcttcgcatttcaaccgcatcgcacggcgaatggctgacagcgcctgttgggctgcatgtttgtcaccatctttgatgaggaggctcaacgaggtcattgcgacaacctccagtaccgtcatacggccttcgatctcgcccatggactgaatggcaaggtttgcgccgttcccgtaaccatcgcgcttggcattgtacatttcgggaatcccttcatgaagttcggcttatcgtatcggttcatcggaatttactccgtgtgaacggcttagccttcttgcggacgtttttggcttcggccgtagcacggaccctccctcattttcccaagctgaaacagccgcagagtccgcgttcagtctttgccgtttggacgccggataattgacggtcgggatagttgcggcctcaatccgacgaatgacagcgacctcctgcaagtgccgatcaccttcggtcgcttgcatctcagaagtagcgtagtcagcccgcttgaggacgcgtctaagtgtttttcgttcctcgggcgtggggcacatcgattctgatccttcagacttggcgaagcaagtatcgagagcacatgcgacatcgctgtccatctcggcttggatgaagtcgccgacgcgatattcatcgcatgcatgtttgtgccttcttcatccaaggtccccggcggggttcagcggccttcttccggcgttgagaagaagctggcgctctgtcgcagttggccccaacagcttcagcagtcgtttctcttcaagcgggtcaagccggaagcgtttggcaaaatcacttattgtccagaccctggccaatctggacgaacgagactgttgagccttcgtggcagtcatttgctgctctcctcagttgcggccgtcacttgaacgtcgcggtggccgggacctgtcctgtcgcacgcgagatccaggggcctgctgcgccattggtttctccatgagcatcgtacgggctgctcaatctataaaggaccgcgagagcgagcccaattgccaaagcggccaccattatccttcgaccagcccgagaaaccataaggccgcaatcctttgtaaataaggtaccgtaaggggccgctcgctattccttaccctcggcatccttcttgattgccgactccaagtcctgcggatgaacctgcaacaattgccttgtcccgatactgacgcccacggctggtatttcgatatgcgttgcagttcttcggtaagcgggaaatgacagtccttctatcaattcttcatctactatcactcggtaggtgcccgcatcgagcgggacgaccagagcgcttagggcaaaaggacgagaaaaggtaatctcagattctgttgtgcgttctgacataggaacctcaattggtcgattggaccaacgctcaccgcaaacgatgctatttcggtaactgcaatccggacgctaccagaacgtgccttgcagtatgacgtagagaatgaatgcgacagccatgaccgggatcgatttcatgacgaaatccccgtatctcaagccgctgaggaatcgcattgcgcgttcgtgtctggaagttcttgctatggaagacatcgcgtcctcccgcttggggctagagctttttgcggctctaaaaagcagcgcccgttccgtggctgctactatatctcaaatggggaggctggacgcaattgcaaggcgaaaacgactccttgcaaaataatggatagcggcatttttcattgtcgcgaagtaagcgggtctgccacgctggcgtttggcttccatcgcggatcgacgccgacagctttcgacattcatctcaaagattgttgcgtggtggacgagacgatcaacgacggcgagtgtcatggcgggatcggggaaaaccctgttccattcaccgaagggctggttggcggtgagcatgagtgatcgccgctcgtagcgcgcggagatgagttcgaagagcacgctcgtttcagcctggtgcttggtcacataggcgaaatcgtcgaggatgagcagatcgaatttgtcgagcttcggacttgaatgacgttgctcgagctggaggaaagcgtgaagaattcgcgcccgtgtcatgacggggcggcccttctggccgccattgtcaagtcctccgacgcgatcgtcagcaaaagcctgacgggcgttatcaggacctcgaacaaggcggccgaacggctgttcggccataccgcagccgagcgaatggaaataaattaggtcatttgcattttgcagcgtaggatactctgtcggcctattcttccagggcagagccgattgggagattatacgcgctcttgcctgacggtaggagtagatatgatgagacgtagatctctcaacgacgatagaacaacggttcccgctccaaggaccgccacgcctattacgaaccccaaccctccacgagcgcagagcaagctgcacaagtttgcgatcagcggggttcccatgaatgaacgcgtccaaaccatagtttgctcgatcggcgacttgcggctggcactggaagcggacgttgcttggtcggttcgagaaagtgcacgtgggagaacgttatgactaccccactgccgttcgaaaagatgcctgtcgaagaaaggcaggccatccttagggcactcgctcacaaacttcatgcttgcgccctcatcgctgagcgtgatggagatctggtctggaagctgcttctggctctcagtgcccggttggaagggagcagtgaggaagtggcagcagatccatgtcgtggcgaggatgttgttcgaaagtcattgaagttgctcagtgagttcgagttgcgtcgacctcactgcacggttcatgagttcgcaatcatgccgcgacattgacctttagccaatgatcggtgtgatcaggcggaggtcccagtgaaccggaaaaggcggatcggacggtatgcgggctgaaagctgggggcgccttgaaacggaggcagcaaggcgtccaggcggtggcggaacgggacgccaacttcgttctagtgaatatgccgttaagggcggctctccttggcttcagcgattaagatggcgcaaaaccagcggctggagtgcagttgtcgatcagaacgagaattaatggagacggagccgggaggctgctgtgcaacggttcattctcaggcaaaatatcgacctgtttcgcgcgcggctgctggagccacggaacgaccacgatacccacttcctcaaggtcatgctctcgcaggctctcagagacctggcgatcctcgaggctgtgagtggtttcggtgtggaggtcgatccgttgcacgcggaggtgcagcggagaatcttccgcgactcattcgagcactcttcaaagccccacctcctgctggatccccgcaagggactgcacatcgtcgacattaataccgcgtacgaaaaggccactctgacatctgccgccaaggttgcagggagttgcatgttcgatgtcttccccgacaacccttcggacgaagaggcagacggggtcagcaatctctatgcatcgcttaaacatgccgccgaggatggcgtttccaatgccatgcgtatccaacggtacgatgtccgggacgccagcggcctcttcgtgactaaattctggaagccggtgaacactcccatcttcgatgccgagggtcgccttatctacctgcttcatcaggtggaagacgtcaccgaggccattcagaagaaaatgaccgaggcagccggcagtccggaaaaatctagccgtttgatccagcgcaacgactgtctcgatacgagccactatccgtttgtccgccgccaaacaggtcacgcgtctgcggcacccaccagccgacatcagcaagaagagcatagcgaagagatcactgcacccagaaatccaaggaacatccgatgcgacatgcgacgacagcaaccacccctaaagccaatgaaagccggtcggcagagagtgccggtattcaggatggcaaggttcctgactttcggttgcagaagccagacgagggcggctggcaggtgcgcgtggtgagcgaccgcggatcttactggttgcgcgccaaccacgtggaactttgcgaccacggaaaacggatcgatctatcggatgcgaatgcctttctgcgcgcagctcgaaaggatgggttcaacaccgaatatgtcggcccgaacggcagcgccttcatatagctgcttttggtggctgacggaaaacacatgatttccgcgcagcgccgtcgcagggtgaagttggcgtcgtaggatggcgattttctgcgcgacaaaccctgtcggaatgtgagactgtgcgacaattcctgatttgaggtttgtcgcacatgttgatcggctacatgcgggtgtcgagtagtgatgagcgccaatcggttgccttgcagcgtgatgcccttatcgcggccggggttgatgagcgtcatctgcatcaagatcgcgcttccggagcgcgcgacgatcggccgggcctgaagacctgcctcggggaattgcgcaagggcgacgtgttggttgtctggaagctcgataggttaggccgatcgctctctcacctgatccgtatcgttgaagagttgaaggtacgcggcgtcgccttccgctctctgacggaggcgatcgacacgacgaattcgcacggctcgtttctgttcaacctattcggcacgcttgccgaatacgagagagcgttgattacggagcgggtcaatgccggcctggctgcggcgcgccggcgcggccgcaagggcggcaggcctccggcgatcgatgcggaaaaggtcgagcaggttctggctgctttggaagctgccgccagcaaggcctccgtgtgccggacgttcaaggtaccgcgctcgacgctgatcgacacactgagacggattggatggaccgggtccgggaagaaagattcgcccgacacctcgcattaagggctgatgtgaccgatgtccttcctcgatgcgcaggcgcgcaccattttgttcgagccgcctgacatttatgaagaagccctggcgcgctatgctctgtctgctgaggatattgctttcgcaaaggcgcatcgccggtcgcataatcggctgggctttgcaatccagctcgcgctggtccgggatttggggcgtccgctgcgtccaggagaagtggcgctcaatcatctcaagctcggcgaggctcttctcgccgcccgtgagagtaacaccgattttgcatccgcgatcgcaacctccctcggctgggacggattgatcgccagcatgacggctgcagcctctgtcgtgcgcccagatcgcagtgacgaattcgacgagctcattgagcggcacaaatcgttgcgcaagctgggcagactcatgttccgcacgttctcgttccggtcgttccgtcccgacgacccgatcctgacggcagtggaccatctgcgtgcactgtacgatggccagaaattgcccgcgcaggtgccgctcgcatttatgacccgcaaatggcgacggcgtgtgcgctcggatggcacccatatcgacctgcgcgcctgggaagtggcggtgctcgttcacctgcgggaacgtctacgggccggcgacatatgggtcgatggcagccgggcatggcgcagtttcgaggattatcttctgcctcggccgatcttcgccctgatgcgcgccgaagggcggctcgggcttgccatccctgacagctttgccgaatggcgaactgagcgcaccgccacgctcgacgcgaaattgaaagagctggccaaggcggccgccgccaacgccattccagatgcggcgatatccgacaagggtctgtcaatctcgccgatccgcgaggaggaccgcgacaggatcgtcacgctcagccgccggctttatattctggtcccgcggatcaggatcacaagcctgcttgccgaggtccaaagctggaccaggttcctcgacagcttcacccattatcgtaccggtgagacggcaaacgacgaggcggcgctgatggccgcgatccttgctgacgctacgaacgccggcgctgaacgcatggcggaaagttcgcgcggcgtcacgatccatcagatgatgctgatggtggaccggcatctgcgatcggaaacttatgccacagcgaccgccgtgctggtcgatgcccaacaggcccatcccttcgccgcagtctggggcgacggccatatctcatcctcggacgggcagttctttccggccggcgggcgcggcgaagccagcctcgactacaatgcaaaatacggaaaacggccgggtgcgtcgatctatggcttcctgtccaaccgcttcgcctccttcttttcccgcatgatccaggcgtccgaaagcgaagcgccctacgtgctcgacggtcttcttcacaacgagagctccgtcgaaatccatgagcacgcaaccgatacggccggcgcctccgaaacgacgttttccatgttccacgccttcggctacaggctcattccccgtatccgcaatctcggcaatcgcaggctcttcgtcatcgatccagacccggcctacggacctctcgacgcgctgatcgcgggaacggtcaacatggatgtcatcgagcagcactgggacgaggtgttgcggctgaaagcgtcgatcgctgcaggtctggtgccgccatccgtgatcctcaagaagctggcagcatcacggcaaaaccggctcaaccaggccctgcgtgaaatgggccggattgaacgctcaatcttcatctgcgactggctgctcgacacgaagttgcgccgcagatcacacgcgatcctcaacaagggtgaaagtcggcatgctcttgcacgcgccgtcttcctccatcagctcggcgaactgcgcaaccgcgtcgccgaaaccatggcctaccgggcgtctggcctcaacctcgtcgtcaacgccatcatcctatggaacaccgtctatctcagccgcgccgtcgattatatccgcagccagggcatcgtcatgcccgacgaggtgctttcccaggtcgcaccgctgccctgggcacatatcgcgctgaccggagactacctctggaacgaaattgaccgccccctcgaacgcttcaggccgatccgcgctaaccgcttcaatccaaacaacttcaaattcccttagcgggtattattgtagaaatgcccatggagcccctattcggtgatgagagcctgccgcagttgatccggcgcgatgccggcaaaggctgcggcaatcgatcgcacaggcaggagaaacggtgggatgtcttcggtcggcctcacctgctgggtgtcgaagtcgtatttccagccatacgagattaccctccgcttgccttcgaagccatggaagtcgaagggtctcagcggcaattttggtatttcatgcaacaggtccgactgaacgtctttgggaacgatttcgggttggtagcggaaaccgggcggcaaagccggttccgctttcccaaatagatcttcttgcgctgagaaacccatgtgcaattctccgcctcaatgaacgctggggactttaacggacgcggcaaaatcctctgccacgagttcgctgatggcgatcagcacctcctccgccgaaaagccggaggcgatggtcgcgcggatcagatcctgcaggtccggctcgacgacatcgcggcaatcttcaagccgctcgtccgacaccggtacgcttccatgatgtgcctttcaaaatctgccggcagttaccgggccgatgccccacgggcggtggcaggaggaagcccttcccgcctcagccaagttgcttggcgatgattgcttggagttccacacgggtgagcaggcaggggtatggtttctggttcttgtcggtagccttgccgctgtcgcccggcttcggccccgccggcagggcgacaatatctgcgtttttcaattgagatccttcgtgggcacagcagcatggcacgcgctaacgcgcgaaacggtcgacgtttgagtcgtccgcccgttgctgtggctatgtgagtgatgtttgaaagataagaagtgggtagatgcattacaaggcagtgtgccccgaaggatcttgatccacggcgaggcgcagaaatgcggcgctagggcacagacgcgaaatatcagaggatatggaaacctccaccggatgagcgatgaaccgttgcgacgatggaagcctaaagggctgggccgacgtcgtgaaaacgcgcaaccgaccggctggtacccatctcagggacatttcagatcgtctgctcttccagcgctccgacagaggcagccaagggcaggggagaaaaaacgttgatcaagcacccctatgccgattttcgatcatgtcggtgaccttgttggccagctcagtcatcacaaacggtttggtgatcacctccatgccggcctcaagatgaccattgccgaccgcggcgttctccgcgaaaccggtgacgaacagaaccttcagatccgggcggctcagtcgggcggcgtcggcgacctgacgaccgttcaagccgccgggtaatccgacatcggttatgagcagatcgatcctgacgtcggtctggaggattttcagtccccacggcccgtcttccgcttcaagcgcgacatatcccgcctcctcgagcacttccacgatcagcatgcgaacggtcggttcgtcgtcgatgacgagcacagtttcgccggcacccatttccgcgatcgttgtgtccactgcctcggcatcggccgtgatctcgccagtataacggggaagatagaggcacatcgtcgttccctgccccggctcactgtagacgcggatctgaccgccggactgccgcacaaaaccgtgtatcatggaaagacctaggcccgtgccctgaccgatcggtttggtcgtgaagaacggatcgaagatccgatcggcgatgtctttcgggatgcctgttcccgtgtcggtgacgcacaccgatatatattgtcccggtggcaggtcgcgctcccgaccggcgcgattgtccagccacttgttcgcggtctcgatcgtcagcttgccgcccccgggcatcgcgtcgcgagcgttgatggcgaggttgaggagcgcctttcgagctgggcggtgtcgatccgggtcggccagaggcccgcggcaccgacaacctcgaccttgatggccgggccgacggtgcgcgtgatgagatcctccataccgcagaccagccggttcacgtcggtcggtttgggatcgagggtctggcggcgggagaaggcaagcagccgctgggtcagcgccgcggcgcgttgcgcggacgtctgtgcacccctaatgaaacgatcgatgccatcgctccggccctgagacaggcgtctttcgataacttccaggctcccgctgatcccggccagaaggttgttgaagtcgtgcgcgataccgccggtgagctggccgacggcctccatcttttgcgcctgtcggagcgcctcttcagcttcggcacgcttgccgatctcggcttccacctgctcttccaaacgctcgttgagctggtgcaaccgctcttcggtcgcctttcgctcggtgatgtcaatcacagtgccgacaaagcgcgtactttggaccgtactgaagaaggcgcgtccacttgcggcaatccagcgttccctgccgtcctcgataccgaccgtgcgatattcgatgtcgtagtgcccagacccctcggagctgatcgcccgctgcacggcctcatgcgctcgctcgcggtcgtccggatgaatgcctgcaaggaaggaaccctcataggtgaccgtcgcttccgccgacaaaccgaagagctgcttgcaccggacgtcccagcgaagcgtgttcgaggcgggatcgtagtcccaggtgccgatttccgccgcttcggtcgccagccgcagtcgcgcctcgctgtccgccagctcgctttccgctttccgccgttgttcgagttcacgttccagcgcctggaacagccttgcgttgtcgatagcgacggccgcctcggcggccagaccctccagtccgcgttccgatcgatcgtcgaagacaccaatatcggcgtggccgaagaagaggcccccggtcacttctccgctacgcgagatgaccggcactgccagatagctgcgaacaggaagatgcccctcgggcatgccggcgcgcggcgcgttcttgccgtaccgtggatccatggtgatatcgtcggaccgaacgataccttcacctccaaaggtgggcgcgaacaccgccgtattacgtggcatcgggaactttgagaatgtttcggctggcacaccggagagggtgtagagcatgtagctctccccggcctcgttctcgacattgtagaaaaaggcgccgaattgggcccccgtcagctctaagcccgcgtcggtcacgatctggacgagttcctggagatccgtcttggccgcaagggcggagcccgcccgattgagtatctcgagggcgcggcgttcgtccgtaatagcctcctcagccgcccgctcctccgtgcgatcccgcaggatcttcgtgaacccgatcaccgtaccggcctgatcgcggatcggcgacatctcgccgacggcccaaacttttgatccgtcgcgacggatacgccaaccttccgtaccgccgccgcggccgatggtcagcgcatcgttcatctctcgtcgaagcgctgcggcgccctctctcattcttcccccagggagatctcgtgaatcgaaccttaacgcaaagctattgatttagttgcagaagcgagcaaaaaggcgttggaaacccgcatcgacaaaatgtaaacgtgttagggtattctgtttcgtctggcgtcgaggacgaagcgacgagagcgagagggtctcgcagaccgacggtcctctgcacctggaacgtccggatttcgggatggcgaaaactccgctgcggcaaacggcgtttaccgaccgctgggattagaggtaatctgagtgcccacccaactttaaggctgagcgccctggccctttggcaacgcgcagacgaggaacaccgcgatcaccagcagaaacgcggcgaatgccaatactgccatcgacgacatcatcgtgatgggaaggccacgcaaattctttgagacaacactcgacgcgccgctcaagtggagcaaagagccagattcggcagtgtggttcggcggtctggccggctgtttcttcgcgcgtcgatgccagaaactctctccccttttttggtttcgagagttgttctcaacggcccttggttatggctccgaacctccttacccggcctccccttgtaatccagtaattcagcacgacttagatggtagtgacggctcgtcttcagggcgctgtcatcaagggtgcaaaaccttgccccaacaaaggaggacttaatgtcttccaatccagcagcatcgcatgtcgaacccgccggcttcaagctggtcagggaagtcttaaggtccgctggcctccggggatctgagtcggacgcgagttccgacatgaaacgcgacgcctcgatctttctctcaaccgagttccgcaggggtgtgaggacaaaatcggctctcctgaattctctcgccaaccgtgaacggtcaccgacgcgagcaggccttgatccccaacccgagggtagcgctgttgatcggtggcaagatgagggtgggcgctgatgggaatctcgttcccaaacgaagctcgtagttttgacgacagaaatcgctgtgtccgtttcaccggatacgacgggatgttcgagatcaaattctatctggcgaccgaagtcttggcctgcgagaaatcgcatcgaaatgcaagcgaggcagactacctgacggcgttcgatgcgttgcggccaagaattctgaaagctgcgacctctgcttattccaaagtgcgatccagcaccatcacgctggatctcgcgcattttcgttgagcataccgtgatcctgaaaggatacgatcgtgcatcatccaaccaaaccagttccaccgctccaaccaggagcggcgaaaactatgcttgtgagcgaattcgccaaaaggtttcgtctcggtcaggtggaggagaaccgattgcggaagctcctgggccccatcgccaaggaaatagacctcctccgaaatgccggcaaatagagggattggcccgccacagagcattccagcattctcccgacaggaacagtgccgtcatgaatatcacagtgaaaagcatcacgatcattcgaccgttccagcttcccgggatggcgcaacctcatccaccaggcgtcttcgagcttcagattgatgaggagcccatcgacgtcacatgggaggcttttcatacgacaatgaccttgctccttagctccaacgggcgcaccgaggcgtggtcggtatcgagggaggaattcgaaaaaacgctggcgccgtctattgccccttgagcaacctcgacactcgtcgcacccgacgaactggcaacgggaaaatttcctcgtgcaagccaagcttgcctcaaccaagggcaggatacgaacggcaagaaacccatgaggccgctgatgagtcacggatgctgcgtaattgtcgcggccgagccaggataagatcacggcgccgcagacacgttcgcagcccttgctgtttccaagatccgtacggacagcgctgcagcggcaataacacactccgatctcaggtcaccccgatcttagcggcgagatcaaggagaccaccatgacaatcgaccgcgccagtgtgagaacaattctcaagccatggggtcgtcttgatctcgggccatgggcatcgaaaaaccatcaggatagcccggtcggcgaaatctcgtttgactgtggcgaagagggagggccggaccgtctactcctcctgaagctcctgtttacaggggaaacactatcgatacaggttcatcccgatgatgctatcgccaagtcgatggggatgaaaagcggcaagagcgaaggctggtatgtgttggcagcggaagacggggcgcaggtcgccgtggggctcaaacggccactgacacagctcgaattcaggaacgctgcgctcgacggatcaattgacggccttctcgactggcaggacgccgcggccggtgacgtgttttatgttccggctggcaccgtgcatgccatcggtgcaggtctggtcattgctgaaatccagcagcgcaacgacactacgtttcgcatctgggatcatggacgttcgcgagaactgcatattgaccaagccatagccgtggcacggctggaaccggcaagcagcaggaagctaccacggcatatcaccgtcgagcgcgccgagctcatgtcttgtccgttcttcaccctcgaacggttggacctccctgccgacaccgtttgggaattgacggcgagccgcgaaagttgggctctggtcgtcgcgggaggcggagcaatcggatccctgacagcgaggatcggcgatgggtttttcgcggaagctgatcgtgctgacatccgtgtcgggcctgacggaattgtcttgctcattgccaccgcagcgagctcgcccgcgatcgggctcctgagtaagccccccgccaaagacctgtcgaagcccggtcccgccgaggcgaccagctatctcgcgggtcccggcgttgatccatcccggctgccgggagtttcgctatgaatcagctcaaaaatatcgcattcatcggcaattctttaccacgccgctgtggtatcgccactttcacgacggatctgcagcaggccgtttcgaaatctcccgcccgtgtcgccacggcgatcgtggctatgacggatcatggtcatgtctacgactacccgccggaggtccgtctcgcgatagccgataacaacctcgacgattatattcatgccgcagacgtcctgaacgccggcaatttcgacgtcgcttgcctgcagcacgaattcggaatttttggcggcgaggacggagatcatatcgttgcgctgctgtcgcggttgaagatgccgatcgtcaccacgctgcacacggttctggcggagccaagtctcggccagcgccgcgtcctgaacaaactcgtcgacctgtctgccaaagtggtggtcatggcggaaaagggcaggactttgttgtcggaggtctatcacgtgccggccgacaagatagaagtcgttccccatggaattcccgacatgccgttttcggaaccggcagtcgcgaaagctggcctggggttcgacgggcgctcggtaatcctgacgtttgggcttctctcaccaaacaaaggcatcgaggtcatgatcgacgccatgcctttgatcttggaaaaccggcccgatgcgatttacgttatcctcggagcaacccatcccaatctcgtacgcgaccaaggcgaagcctatcgcgaaagcctggtgacgcgggtaaacgacctgggcatcgaggacagcgtggtgcttctcgatcgcttcgtcgacaaggcaacgcttctagagttcatctccatgtgcgatgtctatgccacgccttatctcaatgcggcccagatgacatcgggcactctggcttacagcttcggcctcgggaaggccgtcgtctctacaccttactggcatgcgcaagaactgctggccgagggacgcggcgtacttgtcccattcggcgacgagtcggcaatcggacgcgagatcgcgtcgcttctcaccgacgacgcaagacgcgacgcaatgcgccggcatgcatatcaaatcagccgaccgatgacatggcaaagggccgcagagcgctatctcgcattgttctcacaggtggcgtctgaaaaccccgcatgccagcccgcaacacggaagaacatcgtgatgcgcagggcccctgccctccccgagccacagctcggctacttcatgtcgatgtgcgacgatacggggctgtttcaacatgccgtctattcggtaccggatcgggcgcacggctactgtgtcgatgataatgcccgagcgcttctcttatcggtttccctgaacgggcctggcgagaggctgttgccggaggcactcaccgcgcgcttcgcgtccttcgtgcagcacgcctggaaccctgacgagaaacattttagaaacttcatgggcttcgaccgacgctggctggaagataaaggatcggaggacagccacggccgaacgctctgggctcttggcgaatgcgcccgcggcgacgcaagcccatcccggcgcgcctgggccgcggccttgttcgcgcaggcattgccgaccgttgaaggtttcggctcgccacgtgcctgggcctttgcgcttttgggactggacggctattgcgcagcctcgactcacgacatgctcgcgcatcggatccgtttgacactggccgacaggctgatggatatcttccatcgtgtcgagagaatgggctggaactggttcgaggagaacctctcctacgacaatgcccgactgtctcaggccctgatcgcgacgggatggagtgctgaacgccccgattgcgtggcagcagggctcaaatccttgcgatggctgatgacgatacagacgagccctgaaggactattcaggccaatcggcacggatggatttacagatcggacgggagaggtgaagctcttcgatcaacagcctctggaagcgacggcgacgatcgccgcatgtcatgccgcatggcgggtcagccacgacaccacatggaaagaagaggctgcaaaggctttcgcctggttcctcggcagcaacgatctctcattgccggtcgtggatctcgaaacaggcagttgccgcgacggtctgcatccgacccgtcgcaatgaaaacagaggcggcgaatccgtagtctgctatctcctcggccttgtggaatttcgcaaactttcacgcgccagtggccatctgtcgacattcgaccagcgtcgcgcactgacggcatgaatcacagcctcaaatcagatcgagatcatcttgtcacagacaacatttctcaaccgccaagcacttttcctacgacccgatcccacgcgcgtcgtggtgcggcccttcaaacccgccacggaaccacgagatctcaaaccgacagacaagacgcgagccaatcacatcgttgatcgtgtgctcgggctcgacagcgaggtcgcagagctgcaactggccgagatccttgaaaacttcgagggcagacaccgcaatctgctggcgacgttcgaaaagcgcgctaacgaaatggaagaggcgttcgcgcctcacattgcgttcaccaaggtgcaacgccaactcgtcggcgcatacttcatgcacgaatactccttcgaggcatccgctttgttcaatccgagcatagtcgcccacgcggatcagtcgggcgtgccgcgcggcagcaagcgctttatcctaagcctgcgtgcggtcggcgaaggacatgtttcgtctctcaccttcagatcgggaattgtcgatcagaatggcaccgtggacatcgaacccacggcgcggcttgcgtccattccctcgttcgacaacccctcgccttcatcgcccgacgagcctttggaactgaaattttcctccgaacagccaatcagcgaacgagtgatatttccgatgaccgccgcgcagtcgaacggcatcgaggatgctcgcttagtcgagttcgaagaggctgggcaaagaacctactacgccacctatacggcctatgatggcagagacattcgctccgagctcctcgagaccaaagattttctgtcgtttcggatgacgcctctcgccgggacagccgccaagagcaagggaatggctttattcccgcgaaagatcgacgaccaatatgcgatgatcggtcgccaggacaatgaaaacctttatctcatccgctccaacgacctccacgtctggaatggcggcgagatcattcttggcccgaaatttccatgggaattcgtgcagatgggcaattgcggatcgccgatcgaactcgacgagggttggttacttctcacacacggggtcggccccgtgcgaagatacgcaatcggcgcagcccttctcgacaagcgcgatccgtccaaagttctcgcccgctcgaaagagccgctcgttcacccggagccgtcggaacgggagggatatgttccaaacgtcgtctacacgtgcggcgccatgcgccacaacgatcagatcgtgctaccttacgccatctgtgacacgttctcgaacttctcgacgatcaagatcgccgacctgctggacacgctgaccggctgactctctgcatggggctatcatcgtttggtgccgacacgggaagccaggcaacatcaaaccgccgcaatgccacagtatatggcagccgaactgcgatgccgccccaaagggcgataccattggcgagtttgccaatggtagtcgccgtcaatcaatcccgaaatcgcgacctttatggagcaagcctcatcacggcttgaattgttcttttgaaatcaccacgccgaaattatactccgtctgccagcagccgtgctcgggccaccgcggatgcaacagtaatatcgagcccgcacagcctgatgagacgatatgagcaatatatggtctcagccggagaagccgcccaatccggtgaccatgtcgaggcggagaacctttatcagcacgctgaacacttttatcgcacggccgccatgcagaaagtcggccagcaacaatgaacgtgcaatcgacctaccctgtcgggggagccccggacgaaaaagcctggctcaaaatccttgccaaatatcgcacgccgcatgcgggccgcagcgtgttcgagttgacgatcacagccatccctttcaccgctttctggacgctgacctggttggcggttcattacggcttctggtggggcctgatcctgatcgtcccggcggccggattcctgctgcggctgttcatgatccagcacgattgcggccatggctccttctttgcacgcaggcgcttcgatgactggacaggacgcgttctcggcgtccttacgctgactccgtatgactattggcgcagggcgcatgccacgcaccacgcgtcggccggcaatcttgatgagcgcggcgtcggagatatcaccactctcaccgtgacagaatattatggacggtcgcgctggggacggattggatatcgcctttatcggcatccgctggtgatgtttggcatcggcccggcctggcttttcctcttccagcaacgcctgccgatgggtatgatgcgcgagggcgtgcttccctggatatcgacgatggccaccaacgttgcggtggcggtgatcgccgcgctcctgatctgggtgatcggccctgtctcctttctagtcgtccacctaccgattgtccttctcgcgggttcgatcggcgtctggctattctacgtgcagcatcaattcgaggagacacactggtcgaaggagccggaatggcaatttccaaaagccgccctgcacggagcttcgcactatgacctgccgcggcctctgcgctggctgaccggcaacatcggcattcaccacgtgcaccacctctccagcaaggttccctactatcgcctgccggaagtccttcgaaaccatccggaactcggcgaaatcggcaggatcacgctgtggcaaagtttgcaatgcgtgaagttggtcctgtgggacgaaggaagccggcgattggtctcgtttcgtgaagcggccgctgtcgcgcggttgaggaacttctcttcgacccccgtttgctgaagtgccggctttacccgccgaccatccgaacgccaacctgtgtttcaacgggctcgaaccacgcaatccggggccaggctggtgaagctctgtcgatccgcgagataatagaagacgtcgtcgagtcgcacggttggatcctgataagatcgtcatcatcggatcgtccgccggagacgcgatcgcgaacgtcatgctggcgacctatcccgaattgttagctgccggcgcgatcatcggcgggcttaatgatggaactgcctaaggcggagggcaggctatcgaaatgccgagcagatggtccatcagtgggccatcgtgcaccaaggtctccgacgcaccggatgtgatcgagccatcaatggcgatagtcgtaagaactggctcaatgagagcggcaaacccgtcatcgagatcaatctcatcaagggcatggtccacggtgtaccttgccgttaacagcgaaagtcctttggaaaattcagggccgcatgctggacgccggcattgactgcacgcgaggctggttgggcgacccaggttcgatacgaccaagacagcaggagcttagaaaaaaagataggcattgcaaaaccaaaaattgagcctatatattgtttatcgaccaatgcttgtgacgtcgttccagagctctatgctcccgtcggatttcctctcaaataatcgatcttatcccgcaaggcatcgcgggaaccacaacgattgcttcgaaaggaaatcgttatgaacactggtactgtgaagtggtttaactccaccaagggcttcggcttcattcagcctgacaatggcagcacggatgtcttcgtgcatgtgtctgccgtcgagcgcgccggaatgcgttcactctcggatggtcagaagatcacctatgacatcgtccaggaccgcaagtctggcaagaactctgccgacaaccttcaggcggcgtaataaggtcattagcaccgctgaccacggatgtactggcagcaaagctgaatgactgtgagaggtcgggtcatgcccggccttttgttttcccgccacagagattggcaatcgtaatctccgaagcatccgcaagggtaggttcagtttcgaccgctccttggcttaagcggcgtggcaggcagaaatgacaatagcctgcccaaacggcgaggcaggcatgtggcagacgcaatagccgcatcataggcatcgctgtcgttccggcggccttacccaaccgagaggaggacgcgatgtcttccaacgagtattccggccacgtttcacaaaatctggctcgttcgaatgcgttcggatattatgaacaagtggccctcggcgcgcttctcaaaaccgcggtcaccggcgacgctccgcgaaatctgcccttggcggcgatgagagcctttcccaatttcggtgtcggcggaaaaacccgcatgcggacgatacttcacggcacgacgctcctcccagtttaacaaattcgcttcgagacagacgcggacccaaatcactccagctcaaacagcgccgacatttatccgggcgccgaaggataagcccatggccaaaggccaaacgcgtagcaaccgcgaaatccgtaaaccgaaaaaagacaaatccgcagcagcggcacccgcgccatctggctcgcaggtcaagctcacgggcggccacacgacgagcgtcagcaagaaatagctcggagctgtcacccccaatatcatcgcaaggggcgcgataccgcgctcattattcgaggacaaaatgacaaactacaccacccaaaaatcggcagaagcgctgtttcgttcacctgccgccgaagtcggttccagtgccgaaaagctcttcaaccttcgaaaacggatgcaactgcggaagcgcgaactgcgcgacagcgaacgaaccgtccgagatgccgcccgtcgcccccgtcatcctgtcgcaaccgcgagggcgcaaatgtgacccggttcgattatacgggcggagctggactttacgccggcaagtcgaaagctggaataagcggccctcgctatcggcggttcgagacagctgccgaagccctccgtttcgccgtagaggacatgccaaacagtcagcagcgtggctctatgttggagattgacgaggagcgttttgatcaaaaccagattcgcgcgctctatgacgcgccaggctacccactttcacgccggctcgcttgatcggcgacaggtctgacttactcttgggacgccggcataagatttaatctgcgacgctcagagatccgggacaccgtcgcgaccaggccgatccgattggccgtggctttccgtgtcctatgaactgacagctgaaaaagaggagtaagacatgaccgatctgcaagaatttgcttcgagttcgaatggagacaagtggttcgttggaaaagacgctgcgaccaacaggcttttcgtcctccaccgggggaacgcatcctctggcggccacgagacaagttcgtcggtcgatgctttcttgaaccagcagcccttcggtcccgagcgtgaggcactggtcgtgtttctggagaagaataaaagcagcgaagataccggtattcgcgacgatgctcagacgccatccctgcggctggcggaggagtacctgcgcctgggcgggcgtcggcgcgtgaaagtcgacgacaacatcgtcagcacgcgaaagtgggacgatgaaccagccatggcatcgtcattctggaaggagcatatcgagcctctggatgaaaagaagcgccgcgaggtcaagctgcatcttccatcgatcagcgacgactgatccgaagggcaatggggtcttgtgatgagtccccgagctcggcaacggacaacgcagagccgtgggcgtttcgccagctcaagtctgatagagtggaccggtttgcagtcacgccgcgctgacaaggagagggcatgccgaagctttccatacgacaccgcacgacttaccgctatcgcttcccggttcagctttcccccatgaggcaatacgaatctcaccgagattgccgctacgcacgaagggccgtatggctgggcgacggacgtcttcagaagtgcaatcgattatgcaaagccgagcgcggtccacaacgccggcggtcgggccgttcgagacgccggcaaggtgatcaacgatgcgcttggctgccggattgatgcgttaatcagccggtgccgcacgcggaaggattcgtcagcagcctcgccatcagcttttagggtccgttgctatgccgatgctcaacattcatcatcgtacgacctacgcttttcgagagaaggtgtcgctgtcgccgcaccgccttatgctcaggccacgtgagggccgctgttggttttcacgcggaactgagccggtttttccaccgagaagtgagccacctctaagtatggttttctgatcaggctttggtcaagggattagctttttctcctctcttttgggctgctgcggccgagctggctttgaagcggaagctgtcgtttccggtttctaagatatgacaacggtgggtcaggcggtcgaggagagcggttgtcatcttggcatcaccgaagaccgaggcccattcgctgaagctaagattggtggtgataacgacgctggtgcgctcgtagagcttgctcagcaggtggaagagcagcgctccgccggaggcgctgaacgggaggtatcccaactcgtccaggatgagcagatcgaggcgaacaagggtctcggcgatctggcccgcctttcctttggctttctcctgctcgagcgcattgaccagttcgattgtggagaagaagcggacctttcggcgatgatgctcgatcgcctgaacgccaagagccgtcgccacatgtgtttttcctgtgccaggtccgccgacaagaacgatattctgcgccccgtccatgaactcgcatcggtgcaattggcgcacggtcgcttcgttgatctcgccggcggcgaagtcgaagccggagatgtccttgtaggccgggaagcgagcagccttcatgtgataggcgatggagcgaacctcgcgctcggccatctcggccttcagcaactgggacaggatgggcacggccgcatcaaaagctggagccccttgctcgatcaggtccgtgacggcctgggccatgccatacatcttcaggctacgcagcatgatgacgacggccgcactggcaggatcatgacgcatggcgacctcctgcgatccggagacgcagaccatcatagcgttcgacattcgccttgggttcgtgaagcagggtcagcgcctgtggcgtgtcgatatcgggaccgtcggtcgtcttgccgtcgatcagccggtgcagcagattcagcacatgcgtcttggtggccacgcccgcatccagggccaattccacggctctgacaacgacctgctcatcgtgatgaaggacaagagcgaggatgtcggccatttctcggtcaccgccggggcggcgagacgcgcttgctctgctcaacgaagccgtcaaacgcggtaggcagcgccatcaataccgggcgttccgccgaccagacgtccgcgatcgtacctggcaaggtgccatgcgctgtctcgcgccacaggttctggcaatgctgttccagccaggcatttaatgtcgccaaatccggaaagtccggcatctgctgccacagacgaggtcgggcatcctggacgttcttctcgacctgacccttttcccaacccgcggcgggattgcaaaactcaggcgcgaagacgtagtggttcgtcatcgccaggaaacggatattgacctgccgctccttaccgcgaccgacgcgatcgaccgccgtcttcatgttatcgtaaatgccgcgaccaggcacaccgccgaacacccggaagccgtgccagtgggcatcgaagagcatctcgtgtgtttgcagcaggtaagccctgatcagaaacgcccggctgtgcgatagcttgatatgggcgacctgcagcttcgtgcgttcgccgccgatcacggcataatcttcactccaatcgaattggaatgcttcgcctgggcggaaagacagaggaacgaatatgccgcggcccgctgtctgctgctcgacccgccagtcacgggcgaacgcggcgacccgaccataggagccggtaaagccgagagccgtcagatcagcatgaagctgcttcagcgttcggcgctgcttgcgcgacttcccggcctcggtcttcagccagcccgccagtttgtcggcaaaagggtcgagcttgctcggtcgttccggtaccgtgaacgtcggctcgatcgtaccagcgttcaaatactttgcgatcgtattgcgcgacaatccggttcgtcggctgatctcgcgcaccgacaacttctcgcgcagtgccatccgacggatgatgtttaaaagtcccatgtggaatcactccgttgcccctgtcgctcaccgcgttgggggaaggttcacatggctcaattctcaatggaaattatgcgcctaaccggctcagttccgcgtggaaaccaacaatcacgcctttcccagacgacaccgatccatcgcttctgcggggatccaggagcgccgcgccacgatgaatgtcacttgcggacctggaggttgcgtacatgactacgtgccgttctattttggtgctttgagcccgatgctcctcggcgtggtgaacgcgaagaacgttgatcaatacgacattctttattttgagttcccgatctctatcgtcgatcggccggacaccgtctttacaaacgcatcggcgaacaccgcgattcctccacaattctacgcatcaggcgatcaactcgatcagctcgattgggccgcgattgattatacgaagtgggggagcctggatgaagcgcaccgtcaccggcgcatggctgaggctctcgtacacggccatgttccagttaccgccgcctcgcgctgtgtcgtctggaacgatagcgtgaaaaagcgggttcagcagatcgttggcaattcggcatttcccgccatcgagttcgaggatcgaaaccgcaggcattactacaaaaacctagaactaaaagacggcacgagcctggttaaaggaccgggcgagatactcctgcactataaccattacagggatcacgtcattcagaacggtgggaagcacgtcgcgaccgcagacttcaaaaacctcaccgcgctgctcgctggacttcgcgccaatttcggctgcgtcccgcacaccgccgaactcgtgggtttagcatccgccaatgctggtatccacaaacagactgttgatttgcataccaaagacgtcgttgagcgccttgtcaatctaccgagatatgcggccctcggagacaggcaaaagaagctcgccgagattgccgcttatttgcacgatatcggaaaaggtccgaaggcacggtggaccagcaatggaggccttcagaaggttgatcccaatcatcccgtcggcgccatgccgatgatggccgagatcctcaccaaacatgttggaaccgtaaagccaaactcggcggcgacgttgatgaaattggtgtgctatcatgatctagttggtgatgtcttaggccgcgaccgagacgaacggcaaatcatcgatgtcgtcgatgacaaagacgagctcgatatgctcttcgtccttggtcaagcggacgtcctgtcgctacaggagcactggtgggatcaggcgaaagctgatctggtttaccgacggtgcttggcagcaatttaggaaggtttgacggtagagcgatgctggattttatacaaggcgacctattcgacacaaaggccgacattcgcgtgaacacggtcaactgtgtcggtgtcatgggtgccggtgtcgccttggcgttcaagcagcactatcccgaaatgttcaaggagtatcgagatgactgcaaagctggccgtgtgcgacctggaaagatgcacgtatggaaatctctaagcggcgattgggtcgtaaattttcctacgaaacgcgattggcgcgacccttcgcgatatgaggacatcgatgccggtttagatgatctccgtgcctaccttgataccgtcgggccggtaacggttgccctgcctgctttgggatgcggtcatggaggattagattgggaccgcgtatccgaaatgatccgtcaaaagcttggcggagtgaacgctcatgtcttcgtttttgagcccgcagcatccctgagagctggcaagagtgtgacgcaaccttcctcggacgaacgaggtagcgttgagcagttgggatacaaagtcctaaataaccatccctccgcatcgaatcccacaggtctcctgttcgtgatgggtcggcaagatctgctgacacgtaaatggttggcgcttctgccttcgcgccagccgggcgagcgggaaatgaaagcgctgcaatccatcgccgcggaactcgcggtctccggggcaaacgttaccgtcgcgctcgcttacggaacaaaaatcagcgaggagatcgccgacctgttcgcgcaacagggcgttgcaacggtcctgcttctcccatttggtgttttgacccgcaaaccgctagcgaaaatacatgacatcggtcgatctcacccgcttacgattgcatcgagcgcgcctcccaattccaaatggagccgcccgttgttcgcccagacgatggacatgcttcgtgcaaacgctgaagcagcccttctctcggacccggaacctgaatggttgaccaacagaggatcagagaagtgggctcaagcgtcgatctcatatgttcgatacgaacactcctcatcctttgtgcgtgagacgctggatagaatcggcgcgcagccgattggtcggcgcggagaaaccggagcacctaatctcgaccatttgctgacggcacttcgaaaccgtttgtcaactccacccagagaccagagcgaagacctgcgtcaagacgtgcgagtgcctgaaactggtcgcgagaacagcttaagtctttccttcaacgggatttctgaagagacgaaacgtgagttgctggaagcgttgctgagggctgcttcaggggttcgcgcgctgacggtgcagctgtcgtccgacgtcgatgacgatgatcttcatcgtttgattgagcttggttttaggcgggagagtatttcgcaagatagtccgccaccaacaaaggcgcggccggtcgattccaccgaaccggacgatgacggggccgaggcggggcttatcggaaactgaatgaggtcgctgcagctgcaggcccgtgaaccttgcggacgatggaccagacttagagaattccccacgcccgaaacctccccctgcccgtcatctccctgaggcccagctccaaaacgatccgtcgcgccgcctgcggcgtcacgtcgagcgtcttcgccaccatcccggccgacaccaacggcttcgccatcaccagctcggccaactcgggcagttttgaagacgtccggcgtccgtccagctttcggtccatcagtgttcgggcgagcgccagccggtcatgctctttgagacctatctcggcggccgcgatcaggccgtgggcaatagccagcagccgggtctcccggtcccgatgccggcgccgatcgacgggaatggttttcaggccaaggttgatggcggcgagatgggtgccggtggtgaccccggcctggcgcaggatcgaggcgcaaaacaaccggccgagccagggcgcgtgctgcagcacggcaagctcgttccaggcatcgagggcgacgatggcctgcagcaccgccggcaggtgttcggcctggcgcaacacgccacgccattcatcgagccgggcatcctcgtcccaatcgagatcatagaccagtgcgtctctgtctgccgcgatggcgcggccgggccgcgttgcgttttcgatcgcggcctccgatcgggcaagtaccgcatcgatggcggcatagtcgacaccgggaagatcgtcgccaccgtccgcgtcttccccctcccctaccacatcgatcgcgacggcgcgccgggcggcgccgtccgcctctgcctcgtcggcgccgatcgacgccactggttcagtttgccggagcgttcgaatgccgtcggccgaaagcgcccaatccggggattggccggcgatccgccggcgagtgcgcaggacgtcgcgggcgattgtcagctcatgggtcggtgtgcgaatatccttcgtggcgtcgtggaggacgaggtcttcgaggtggacgagttcgccgtcgatccacagcgaggcggaggcgtcggcgaaatgcatacgctcaatacagcctgccccgaccgccgaacgggcaatgcgttcgtcgagacgggtcaacgcgacaccagcgtcgaatgccggctccatcagggctgtcatgccgattttcgcgagatcataagccattgaaatcatggtaaatgatttgctaaaggaactctatagcaatgttgtggttcctcacatggtacggtcgcgggttgaggttctaaccatcgataagtatcccttatcggaagtgagccatctatgccaagaacattgccatctgtcggccatcctgattcagcggattccccacatttccggcgatttcgggcctatttcgccctcattcggtggattcaacgcgctcttcgcgctttgcccgctcagtacaggcgcagtcgccgcaggctctgaagaaaattccggtcggcgtcgtccgtccgagcgcagatcagcgaacgttatgcgctcagaagccttacttcccagcgtttccgcctcagatcgccgctggcgcgcgttcgaataactggatgaccaaacaccagtgtatggtcataaatcgcgctctgcggactcgcatatcactcataaaacacgcttgcaaaggaccgtttatcgacgcattctttatttgaacaaaatgccagaatcgagccgaatatccatggcaaaatcagcgagacgtgtagcccctcccctgccgcggcgcttgatgggttatgcgcgtgtttctacagaggaccagctccacgatgcgcaggtcgatgaactgcgcgcggggggctgcgaccggatctatcaggagcacggctcaggtgcctctcgtgccagaccagttctcgccagactgctaagggagctgaccaccggcgacgtcctcgtcgtcgtgcgactggaccggttggcacgatccgtcagtcatctgcttgatgtcatcgaagaccttgaggaacgtggcgtccatttccgatcgctgcgcgatccgatcgacacgtcgacgcctcagggtatgttttcgctacaggtcctgggcgccgtcgcccagcttgagcgtgcgctcatagcggagcgaacgaaatcgggtatgaaggctgccaaggcacgcggccggattgcaggcaatccgggccttcgcgagcgacgccctgaggcgatacggactgcggccgctgcgaagaaccagctttatctcgacgagctgatcacctcggcgcagacctggcttccgatggtgaagcgactacgcccacagcatagctgggacaatgtcgtcctggtccttaaccgcaagggccacgactggactgtcgagcggttacgccgtgctgtccatcgcatggttcgcgaaaagctcgcggaccctgaactgttggcgcgatcccctcgcagaccagtagacgatcaccatatgaagctggtggcagcaatcgctatcgccgatccgagtttgacactgcgcgacatcgcggcgcagttggatcagatgggagagcgtccggttcgcggcggccggaaatggcaaccctcgtccgtaaaagcgctcatggacgaggcgtttcgcttcgggcttcttcggggctgacggagtctcaaagagtgctaagtcaacgcgtcggctccacaacgcagcaccacgtgtcgatgtaggtgcagcatcaccctgctggcgtagatgccaagctccggtagaagatgtaacctgcgacgacaaagatgagcgccgcgaacagacggtcgagtatgttcttgtaggcgctcagtcgagttgccagcatcgtgccgaaaaggccgcctgctacgcctccaccaatgaactccatggcaagccaccagtccactagcccggacgccgcgtagttcaacgcggtcgccagcccaaacgctccgacggagaggagcgacgtgccgatcgcgttgatcatcggcatcccggtcgccagcatcaggccgggaacgatcaggaagccgccaccaatcccgaagaaacccgatgccgctccggctgcaagcgccacagctgcggttacaaagcacatcctgaggtcgaccggccggctttttacggacgtcggcttcctgggcttgagcatcagggcgccgaccacgaccatcaggacgccgaacaggaagatcaggcggcctccgtccatcgctttgccgaggctggagccggcaagcgcgccgaagacgccgagcaaggagaagacggctgcgcaccgccaccagacgtgaccctttatagcgtggctcgcgaagttggcgaaggcgttcaccgaaaccgcgagcgctccggttccgatcgcgatatgaggctgcgtgacgccgacgacataaagcaggagcggcgtcgccagaatggatcccccgccgccgagaaggccgagcatgaagccgacgatcccgccagatccgacggccgcgagaacggaagtgctcatgtccttccgctccaaatccggtcgtaaagtatcatgccgaccagcatggcgacgacgaacagcaccgtctggggaaagccgaccgacagggaagcgacagccggccccggacagaggccgccgatcccccagccgattccgaacaaggccgagccgatgaccagcggcgcgtcaatcgtccggtttgtgggcacatggaaactgtcgtcgaaagcaggatggcgcatcttcttcatcacctgtacgccgatgaaggcgacagcgacggcgccgccaagaacgaaggcaaggcttgggtcccagttgcccaagacgtcgaggaagccttggacgcgagcgggattcagcatgccggagagcgacaggccgaagccgaagacaatgccagaggcgagggcggcgccgaattgatagatggtcctattcataatccgaggcctcgtagaatggtgacggcgatgacccccgcgattaagaaggtggcgacggcggccatggatcgtggagagaggcagccaaggcccagcacgccgtggccgctggtgcatccggatcccatccgcgaaccgaggccgactagcagtccggcgacgatgatcatcggccagcccgctgtgatctcgacggtcggccagttaccgaccgccagcaggtagacgagcggcccgagcaggaggccaagtacgaacgcaagattggtggtcaagccgatgccttgggcaaggcggccgacgatgccgctgatgccggcgatccggccgttcagaagcaggagcatgaccgcggatgcgccgatcagcatgccgccgctcagcgactggagatagatgttcatgtctcttcctttacgcagaagatgtcatagagcgcggagaccagttgtgcggccttctcctcggtcaggcggtagaagatctgctttccatcccgccgggtttcgacaattccggagctccgcagcaccgtcagatgctgcgaaagatgcggctgatggatgttgagcttttcctcgagttcgccgaccgagaactcgcgctcgactagcgtgcacacgatcatgagacgggactggtgggacaacgtcttcaggagatcggcgacctctccggcccggccgaccatctcggcgggagagagccgtgccttcatcattttccttaaatcggtgttcattcccatgcggctccctgcaatgcatcgagcgggaacttgaggtagcgcttgccgttcgcttcaggctccggcagacgccctccgcggatgtttacctgcagcgcatgcaggatgagcttcggcagcggcagcgtcttgtcacgcctcctccggagctccacaaactgctcttccgtcactccggcaagatgctcgttggacttcttctgctcggccaccgtgctttcccaccgcggagcgcgaccgttcggctggtagtcgtgtccggtgaagattcgggtgtcgtccgggagggcgaggatgtcctggatcgatttccacaggacgcgggcgtctccgccggggaagtctgcccgcgccgtgccgctctcgggcatgaaaagcgtgtcatggacgaacgccgcgtcgccgaccacgtaggtgatcgaggcgagcgtgtgaccgggcgagaacatcaccttcgcgtcgatggagccgaccttgaacatttcgccgtgtgcgaaaaggtggtcccactgcgagccgtcggtggcaagctcgggccaattgtagatcctcttccagagcttctgaacatcaacgacgcgtccgccgatcgcggttctggcaccagtcttctccttgagatagtgggccgcggagaaatgatcagcatgcggatgggtatcgaggatccactcgaccgtcaggccattctccctgacatagccgaggatcgcgtcggcattgatggtcgcggtggctcccgatttctcgtcgaagtccagcacgggatcgataatggcgcacttgcctgtcgccggatcggacacgacatattggacgctccaggtgcgcttgtcgaacaagcctttcacccgcgggcggcgtgccgcgtgctgcttgagccatgccgcggcggcgctgctgtcgaagccgtgggcacggccgaactcgacgacgtcttcggcagccattcgcccgtcgagaacctcgccgattaaatggagggtgagggacctcgtgcccgacttgcaatgggcgaacaccgggccttcggacgcatcgaccgccttctgaaaggcacggacgtcggcttcggtgatcgtacctagcgtgaccgggacataagcgtaggacaggccgcactgctcggcttcctggctttccacgtccgtgccgggctgggcggcgtcctcggcgtccgggcggttgttgatcagcgtcgcgaaaccctggcgacgaagggacttgatgtcgtcggcacttggctgcggcgagaccgacagcttctctgaaatcctgatcacggacatgactgactccttagtccatttacattatccattataatataacgtataatgtctatctttcaagtccgccaagtgacctgatcgtcgcagcacactcaggagcagagagacgccctccgaccccagaggagctttctcgacgccgcgtcgcgccgaccggaccccgaataacgacggaagcagcagttttacagggcgattacaagagagcgcgtcacccctcgaggagatccaaaagactacgagctagtcgcgagagcgcgattgagcgttggcgtcccctaagcgtcgaaatggcgtgccacctcggatccttcgtaatcgcggcgacagctctaaaatatttactgttggatcgaggcggaagatcgattctgctttttttccccgtagatgaccgagtagtcagggactgactcgaagttatatttttctcaaactgctggaaagcgaacgtcaaacaatcgctaggagggccgaactcggattgtgcgctgctgatatccagcatctgcgccatcgtcaggagagtgctggaccgccatgtcatggacaagcacgtcaacggcgcatccacgttcaccgggatggaagccggcccttttatgtcttgaacgccgaaaaaagtgatctcgggtcttccgtggttcacagaaccgctccagagaaagcggatagcctttcgaatgtcggcaagctttgtctcgcccctccccttctccgcatcgtcgatcgcctccatcgtcgcaatcagcaggccggcgtaacggagttcaaaatgcgacggtggggcacgcgacacagctctcatacagccggagcaaatcagctcggccaacccgtcccggtattcataccggaagtcgcatcgccttaaacatttcagacaggagaagcggaggcgaacgcggtggatgctacaagcaacggtctcagcgcgcgaccagtgtctgcgaagatactgatcgcggccgtttcgccgatcgccctccaggcaggcgggacatatgccgcgccatctggactgccggacataaccaagtgaggcagcattccgggaaagtgcgagcgcctcgacgacggcaggtcggatcctgcaagcgcggctccatctccaaacacttgtcgggtctggatcgaaatcgttatcggttgagctgtcgaggcccagccaagcttcaatatcagcactttgccgggaataccttgccgcaacccgcgcctgccacgatgagatcagttcgtcgccatatggccgcggtgccagcggcaaaagcggtgtcgtcctcaccgggcaatccgtctctgcagttgccgctccgagtatcgcgtcatcgagatcaggggcaaaaccagctcgccaccggtgaagctttcgatggcaatgcgctcgttaccacttcggatggcctcgaccgctgcggtctcaatcaaccggaaaatcctgaccgttacaccgtcggtcaactcaaggacacgttggcggactgcggcagtgcctatatcggatggttccctgagggggagaattccggccagactcgacagaagctgggccagatttttgtcgttggaccaacggttcagatgaagagcatcgaaccgctcggcgagctgttggtctgttagaagggcttgtcgggcaaggtccgtccccgcacagatcataggcaccttcagatcattagccaggaaccggatgacgttgaggaatattcgctgctggcgaaatgtgccggtcaggacagcgtggatctcgtcgatgatcagcatccgaacgcccatgtcacgcatcatgcttcggcaaatggccttcaggcgccatgcggcttcgtactggggacctggcgcgcccagtgcattcagcagctcaccatagacatcgcgctcgatcggctcggccggcatctgcatggcaacgacaggcatcgtcgtgacgcctgtgctccggtcgaaccgaggcggatgatcacgtaggaatttccgaatgatcttggtcttgccgataccggtttcgccatagatgagaaggcagggcatccggtcgcgcggagggtaagacagaagatcctctagccgcctgatcaccgtcgttgcttgcgaagtctcaagccatctatccgcacgcagccaggcgatgcgctcatcggtatcgagatcggcatactggcgatacgccggctgcaggtgctcgtatgctgtcatgaccactcctccacggacaatggtggcagatcctcgaaaatttctggactgggctggtcgtcgggaagagcgtcgtaaccccgacttgcgaacaatgcgcgctcgctccgctctgcattccggcgcacggttcgtgttttcaccgcagcgtccgccaaaagttgccgctgctcggcaatcgtcgaaaagatcagctcttcgttgacggcccggacgccttttgctcgcaatgcagccaaggccagacgatgctcaccaagcgtgatacgcgggcgccgaagatcagcgaaatgaaccgtccagacgaagccgtcggccccttctacctgaacgcgcgacaggtctcgggggtcgtacttgacgcgcacccgctggccccggccggcccatgggctaagcacatcgtcccaatagcgaagcccgaacagatggatcccgtctctacggacgaaccgttcttcaaacggcaggaaatccttcaggaactggccaggatcatggggaagcctcaacgcgtatggccgatcagcaaggccgtcatcccaggccagccgtggaggcacgcccaggctgcgatgaagatcggcatgatagcggcctgtgatttcgagtgtgagccacctctccaactcatccaaggtcatcgctgcatgtttctcggagtcataagacccgcgatccgcgacgttgcttgaggtcgaacccggcagcatatgcaccgcccccatcatggtgccgatcagccgttcgatatgcgcgccgtaatgcggacggcgaaccggacgatgaacaagggaaattccgtgttctgctgccccgcgaacgagagctttgccatgaaactctcgagcgttgtcgagatgaatgatatccggaaggccatgggccggccaatcggccttgatacgccgatcttcgagccacggttccttcggcaagaccaactgttgaacgacgagggcaacggatgtcgatgaagggctttccagactgatatgaaaaccggccaccatccggcttgcgatatcgatggccagtgtcagccacggcctttgcaaagggcggcgatggaaagaatcgacgataaagagatctacgagcgtatggtcgatctgcacgacctgaaatgcatagtctgcagtatattcccggacaaccggtgcgaaccgttggcgcgcggccgtggctccctccctatctctataaagccccctttggtccgcttgatggactcgacctctgacagctttcaaggaaggtgtggggataccggcctcgtggcacagctggcggacgcggtcatgaagtgccttcgcagtcggccgttcgcgacttcgataggtgtcgcggattgcaacctcgatggtctcttcgacatcgtcacgcagtcgacggcctcccttttcttgacccgccacgccatcaagaagcgagctggctaccggcgccactcgataaagggctatcagttcgtaaagacgcgaccgcttcaacccaagttcccggcacactcgtgcaaggccgagcgctggtatacgcttcgccgctgccagcggccggatcagcgcttcgcgagtgaccgccttcgtccaagcgacctcagtcgccaccattttatcgggtcttttgttcatcctatatctccccatcccgtcacggttcaagtggagctttgcgccgactacatcgacagctaagatgacgcgggatcgtaacagagccgcgacagcactttaagtgacgaaggagtccggagaattagggcgagtccggcgaaattggaaaaccccttgtcctgagaaatcagtgagatagaatccactcgattaagaatgccgacaagtgaaactgggcgcaaggacgatcacaaaggacccattttgctcgacattgcagatcaaagacgcggccagccaaggtccgcgaccgcagctaagccgctactcgctgcgggccgtggcgcgatgacgctggccgcgcgccagttcgacaaaacggcgcttgatctcgttgaacaatgccggtggcaaagggccaaggtagcctgtttcgctctcaacgggccggacatccggtcccggccagacaaaccggttgctttccgtcaggataatccaggatcgttcgtcgtccagtccgagacgccgttttgtcgccggcgggatttcgatcgcgtcactcggatcagagggcggcgagtgcgtgatcggcaggacacggactgcgggcgtgccatcgtccagggtcgcaacaattgccaacaccaacgccgggcggtccttgtcgccctcctcccggccttcgagatgctgccaatgccagagataggaataacgaaagacccaaccgacttttggttcagtcggcagcatgtttgtccgtcagcagttcggcgttgagatgatcgagacccggctccatctgcgacgcttcaatggcggcaagttcatcatcactcatcgctgtggtgagatctacgcgacggtcgcgtctggccagacgcagatagtcctcataggcgatcagaaccgtgcgcggccggccgttcttggtgataatcaccggctcgcggactgcggcatcctgataggcgccaaaattcttggaaacggctgctgctgtcacggtcgaggtcatggcagaactcctttgttgcggaatatacgggctttccgtaacttttgcaaacgcacgattagcattggacatgtaccatgacgaaaaagaccttgtcggtatcgtcggtcacccagaatgttttaaaccgcgccgaacagctcgacaacatcgcggcggtgctgccgatcgaccgacgtgacaagcttgccgaaatcctgaccgaccaggacgtcgagaccctgcgtcatctggtcaacgaaggtatgggtgagaatacgctgcgggcgttgacctccgatctcggctatctcgaagcctggtcgcatgccgcgactggcggcgcccttccttggccggcccccgaggcgctgctcctcaagtttgtcgcccatcacctctgggacccagcgaggcgcgaaaccgatccggaccatggcatgccggctgaggttgaccaggcccttcgagatggcggctttctcagatcaaccgggccgcacgcgcccgataccgtgcgccgtcgtctggccaactggtcgacactgactaagtggcgaggtttcaacggcgctttcgcctcccctgccctcaaatccgcaatccggctcgccgttcgtgccgtgccacgccaacgccgccgcaagagcgcaaaggcggtcaccggcgacatcatggcaaaaatgctggcaacttgtgccggcgaaagccttcgtgacatccgcgatcgggctatcctgatggttggctttgcgtcgggtgggcgccgtcgcagcgagattgccgggctgcgcagggaacagttgacggctgagccgccgatcgccgttgagggcggggctcccctgccctcgctgtcgatccatctcggccgcacaaagaccagcagcggcgacagcgatgaagttgtctacctgaccggccggccggttgatgccctgaacgcctggcttgttgccgccaagattgaaagtgggagtgtgttccgggcgattgatcgctgggggaatgtatcccgtcgggcgctcgatccgaaggcgatcaatgatattgtcaaacagcgggcgacgatggccggtctggaggcggatgagttttccgcgcatgggttgcggtcgggctatctgactgaagccgcaaaccgaggcgttcctttgccggaggcgatggagcagtcgcgccaccgatcggtacagcaggcgtcaagctactacaacaacgcgacccgccggagcggccgggctacgcgattgttataagggcgccgtcgtcctccgcacagccatgacagcatgttcactgaaactgtatttccgtggcgttggcaaaacgagctggtaaacgatggtcatgctcaaggcgcatttcgccgcgctgtttcccaaagcaacgctgaagcttctatctactctaccgcgcggcggaaagaacgaccactggtgccaccttcgaaacacgttcggctatttcagttgcaaactcctggtttgactcctgatccggaccgcgcaggcgattaagaaaccttagctgcaacagggggttagtttgttgtcagctgactacaatcgacggcttccgaaagctcctaagatcggggacatcacgcacttatagccccgccagagttcactttcaaaagcgccattatcatcgggccgagcgaaaactcaccgcggcgagttctggaggtgagatcgcggagatagccaccagctgaattgatgtgcccagctcgctcaagtatcgctgccatcgcgacggccgcattctcggcgcccatcgcctcgcaagcgtcctgatacgctgaagcgctcactcccaaggtcgatcgaaccacgactgcggcggacatcaagtccctccaactctggacctggcctccaggcgcataggccgcaatttcagggcacgctcgcatcaccaaaccaatagggaaactctttagcggctccgccggtcggtctggttttaacatcggtttctcgccctgctctttttctgagccaggttcaaattcatttatagattcggtatttgaattctgtatgtgctgacggatttcgttgtcattggtagcggttttttgtgaaaagatgttgctttccaatacgctaagtacaccttcgcgcaatagttccagttcgtccaggatcgattcaagggcctcaatcgacttggcggtccgaagctttgctacggcccctaggtagattgtctccatcgtcgcccagtcgccaggcgcaccatcgtcaacagcagccgtgataagcttacgcacgtccctgcgcgcgatagtcgtccgctccttaactaccttgaagcgtcgtgcctcctcggccacccgctgcgccatgagagcaagttcttccgccctcgcaagcaatggggcaagactgaacccatatgctgtctccacctcgccgtccttgccacgtctcacgtagcgtttaccattggggctgtcgttacgatttatcagtccggcacccaccaatacagccaaggcctctctcagagtcgtacccgcgatgccgttcgctcgtgcgctcagttgagcattagacggaaagaccacaaggttcgcatcttcgctgaggtccgtctctggataaaacgacaggagagcgttgagcacagcaagcgccctatcgcgcaggccaagtagcgtgcgtgcttcgcaggcgtcgcggtatactttccatttgtccgcaacttttcccttacggatgtccgctgtctggaattgggtcctgaccaaggcaagcgtcatcggccgccgcccgaatggcgtcgttacacttccacttcgcatttttctttcacctttcgatcggcaaaaggaatcagctcaccaaatcggtgccaaagactattgactgggattcatggaaatgcgattctcaggctgcttagaccaatgagagaggcttccacgacggcaacgtttgggggcctttttcttttgcggtttcttccttttctaaccttcggatccgggctcggtctgccggaatttctcgtaaagatcaggaattcgatccatcacgaacttggcaaacgcctcgtcccgatctctatcaatctcaattttacaaaccctgccggagaccgcgagggtcgcgatcttagcaccctcggcagactttgcggaaagtaccggcgtcttttccgcgctcggtctatcgatcgcctttatcgcgcgaagaaccgcgataaagcgatcatccgaagtcttgtgaccaaaagacttgtcagttgtagccttacgcgctttgctttccgctcctgcatttttcagaccgtcagcaagctcctgccaccgcgggcgacctatcttcggagcccggcctatcgcttcggccagccaaccaggaactgcgcggcctacgttgatcagcttggatgcttcctgccgatcaaccgacaacgcggtttgaatgagtgtcctctcaaacccgccttcctcgagtttcagcgcgaacattgaacgctctataaaggtaagatcttcacgagctgaattttcaatgccttgggcgacagcaaggcgatcgtcactaagttcgcgcacgtaagccttgaccttaagaccaagctcagtggcagctcgtacgcgacgatggccataagaaatctgataacggccaatctcagtcggatgagcccgtactagaattggtatttcttgcccgtgctcaaggaaagaggctttgagcgcttcgacagccgaagcatcctgatccgcaaaacgatcggcgaaaggggatgggtcgataagagacggatcgaggtcaatcggaagagcgccgtcagcaactttttgcttgagttcttcgtagtccctctcaacttccgaaaaagtgtccttcaacgaccgaaccgctcctgacgctacgcgctgcattggttgacgtgtgtccacggtcggcgcctcatcaggccctgcggcaaagagattgcgaactgattgagtgcgtttgctcatctatcatttccccaatcagaacgtttaactactagccccaacgacatcacgtcgtcagctgacaacaagttaagcgattgattcttttgatagtggagcaccatcatctcccccacacttcattgattaggccgacagcctcgtgattcacggcactaatcgattccatcgctcgatcataggtcgatcgaccgaccgcgccacgcgacaactcgtaaagagattgcttggtcaaaccggcattagcaattgcggtcgatttccatgctgccgcagccatcacatcggtaccgaatacatcccgaagtaaaccgacgatttcctgttcaggtacatctcgaggatcatggcgggtcacaaggaacctcagaaaatcatagtctagcttacctcccgcctcttcgattacggagacaagatcggacgtcattaggagaaattggctcatggaagctacgtccaccatttgtgggtggacggtgacaatcattcctgtcgctgcattcaaagcacccatggtgaggaaaccaagctgaggagggcagtcaacaacgacaatgtcgtactcgtctttgacctgatcaatggcgcttgcgacacgcctgaaaaacaaatcttctggccgtcctcggttctgaagcataaatcgcggggtctgatgctcaaactccatcagctcaagattgccgggaacgatgctgatgcccgtgaagtaggtcttgcggatcacatctttcatcgccacacgctggtcatcatacctgatggcgccgtatatcgtggtattctccgcaacatcgaattccggctgataaccaaacatcgcggagagcgaggcctggggatcaagatctatggcaaggactcgataaccctggagcgccagaccctgcgcgagatatagagatgtcgtggtcttggccgagccacccttaaaattggcgacagtgatgatttgaagtttttcgccctcccggcgacggggccagaaacgcgctgcttccttggggcgtgcctcggcgaggtactgccgcaagccattgatttgttcaagtgtataggagcgtcggccaccggtcccgatatcaggtgccgggccgaggccatctagggagagttggcgcaggtagccatccgaaacaccaacgatctcggctacctccccagaggtgaacgaccgaagcgacttctgcgcggtcgggggaaaggcgcgttcaccgaccgcacggagtctcgcggatagagcttccgcgcgctgcgtaatatgtgcggacgttgcagccctactgatgtgcctgtcgatcacgttcactttagcctcaggttcaagacggtttatcagcgtcagacgcgctattaccgtctgaagatagcgcacgattcccgtctgtccgcaagagaaatagggttaacaaaaccttaacgctctttgatgcaacaaactgttcccgcctttttttcaacgtttccagagatttagcctggtataaattcccgcccaaaatctctttccctcacaatctgttcgcaaatattcaagacgccgacaggccgtctctccaacttgcgccaccgtgcaggaaacgacagagaatcgcgaggtacaaatttgtacgtggacagcttggtgccgtcccgcttttttttcccgcaaatcaatcagcgaggagaacgtcgcaatgcttcagtcgcattcccgccttgtgcgcaagcttcaagaagcactgggcgatcgtctatgtatcgccctcgacgaccctggcgtcgtcgagatcatgctcaacccggacggtaaagttttcatcgagcggttagggcagggcatagcgcccgcgggtgagatggctgcgacagcagcggaaacaatcatcggctccgtcgcacacgctctacaatctgaggcggacgatgagcggccgatcatttcgggcgaacttcccattggcggacaccgctttgaagggttgctgcccccggttgtcgcgtccccaacgttcacgatcaggcgcagagcctccaggctgatcccactcgacgactatatcgctgacaaggtgatgacggaggcgcaagccacagtgatcaggagcgcaatcgcgaatcggctcaatatcgtgatcgcgggtggaacgggctcgggcaaaacgactctcgctaatgccgtgatcgctgaaatcatagcctcagcaccggacgaccgcatggtcattcttgaagatactgcggaaatccggtgtgcagcagaaaatgcggtgtgcctgcataccagtgacacgatcgatatggcgcggctgctcaagagcaccatgcgcctccgtcccgaccgcatcatcgttggcgaagtccgcgatggcgccgcactgacgctgctaaaggcctggaatacgggccatcccggtggcgtcaccaccgtccactccaatactgccatgtccgccctgcgtcgcctggagcaactgaccgccgaggtcagtcagcagccgatgcaggctgtgatcggcgaggccgttgatcttgtcatctcgatcgagcgcgcggggagggggagacgggtacgagaagtcatcaatgtcgagggcttcagcggtagccggtaccagaccgaacattacgctcaaattgatgaggacattcatgctgcataatcgctcttttcgcctcggactgctcgctgcgatgttttgcgcggcgattgcggcgccagcccttgccagttccggtgggagtcttccctgggaggggccgcttgaacagattcaggaatccatcactgggccagtcgcaggagcaattgccctcgccgccatggcgatcgccggcggaatgctgatcttcggcggcgagctcaacgatttcgcgcgacgcctcgtctacatcgtactggtcgccggtatcctgctgggggcgactacgattgtcggactattcggtgcgaccggcgcgtcgatcggcatcactgccacaagtttgccagggaccgtttcccagccgatgcccgttgcaagaggggagggggccaatgggtgagccgcattccgctctccaacgcaatcgcattcaccgcgctctttcacggccgaaccttttgatgggggcagaccgggagctcctgcttgtcacagggctggtggcaatcatcctgatcttcgtcgtgctcaccctgtattcagcgctgtttggcatcgccatctggttcgtgatcgtcggcgcgctgcgcatgatggcaaaatccgatcccctcatgcgtcacgtctacgtgcggcatttgcgctaccggcatcactacctgcccacgtcttcgccgtggcggcgtttttagaggtgcaatgatggtcgctttgcgttcccttcgcccgtctgcaccgtcgttcgccgatctcgtgccctatgccggactggtcgacaatgggatcattcttctcaaggacggaagtctcatggcggggtggtatttcgccggccctgactccgagagcgccacggatttcgagcgcaacgagctgtcccgtcagatcaatacgatcctttcgcggctgggttccggctggatgatccaagtcgaggctgtgcgcattccaacgaacgactatccttctgcggagcgcagttattttcccgatgctgtcacccgcatgatcgatgatgagcggcgtaagcacttcgaacaggagcgcgggcatttcgagagccggcatgcgctcgtcctgacatatcgccctcccgagcgccggcgatctggcgtcacgcgttatatctactcggacactgagagccggacggcgacctatgccgacacagtgctcgacagtttcaggcgctccacccgagagattgagcaatacctcggcaacgtcatctccattgagcgtatgcggacgcgtgaggtgccggaacgcggtggcacccgcattgcccgctacgatgagctgttccagttcatccggttctgcatcaccggtgaaaaccacccagtccgtctgcctgaaattcccatgtatttggattggctggcgaccgcggagctagagcacggccttaccccgaaagtcgaaaaccggttcctcagcgcgattgcgatcgacggtttgccggccgagagctggccaggcatcttgaataacctcgatctcttgccgctcacctatcgctggtcgtcacgctttatctttctggatgccgaggaagccaaacagcggttggagcgcacgcgcaagaaatggcaacagaaggtgcggccgttcttcgaccaactcttccagacgcaaagccgatcggttgaccaggacgcaatggccatggtcgctgagactgaagacgcgatcgccgaggcttcttcgcagctggtcgcttatggctactacacgccggtcatcattctattcgacgagagcagagaaaagctcgccgataaagctgagtcggttcgaaggttgatccaggctgagggatttggcgcgcggatcgagacgttgaatgcgacggacgcattcctcgggagcctgccaggcaactggtactgcaacatccgggaaccgctgataaacacccgcaacctcgcggacctcatccccctcaattccgtctggtcgggcagtccacttgcgccctgcccgttctatccacccgacgcgccgccactgacgcaggtggcttccggatcgtcacccttccgactgaaccttcatgtggatgatgtcgggcatacgcttattttcggaccaaccggttccggcaagtcaacgcttctcgcgctcatcgcagcgcaatttcgccggtataagggtgcgcaggttttcgccttcgacaaaggcaactctattctgccgctgacgctggccgttgatggtaatcattacgaaatcggcggcgaggcaggggagggggctaggcttgccttttgccctctctccgacctctcgaccgagaccgaccgcgcctgggcttccgagtggatcgaaacactcgtctccctgcagggtgtcacggtcaacccggaccaccgaaacgccatatctcggcagatcggtttgatggcgggggctccaggccggtcgctgtcggattttgtgagtggcgtgcagatgcgggagatcaaggacgcgctgcaccactatactgttgacggccccatgggccagcttctcgacgctgaacaggattcgctgaccctcggtcaattccagtgcttcgagatcgagcaactgatgaacatgggcgagcgaaatctcgtccccgtgctgacctatctgtttcgcaggatcgaaaagcggctcacgggggcaccaagcctcatcattctcgatgaggcttggctgatgctcggccaccccgttttccgcgacaaaatccgcgagtggctgaaggtgctgcgaaaggcaaactgcgccgtcgttctcgccactcagtcaatttcggacgcagagcgctcgggcatcatcgatgtcctgaaggaatcctgcccaaccaagatctgcctcccgaatggggctgcccgcgagtccgggacacgagaattctatgagcgcatcggctttaatcctcgccaaatcgaaatcgtcgcagccgctattccaaagcgggaatattacgtgacgtcgccggacggacgccgccttttcgatatggcgctggggccgctcaccctctccttcgtcggtgcttccggcaaagccgacctcgctcggatccgggaacttctctcaacttacggcaaagactggccgacccaatggctcaatgaaagagggatcaatcgctatgcttgaccatatcctatcgctcagaagaaaatcagcgaccgttgtcattgcagcgtttgtaaccggcgcttccacaccagcatttgctggctcagcgacgggcgctgcaaccgagtggacacagcttgccaacaatgcacagctcgtcgaccttcttaaaagctccggcctgcaagtcgaaaatcagctgacacaaatcagtcagttggccgagcagatccaaaaccagctgaacatctacgaaaacatgctgcaaaacacggcgcagctgcccgatcatatctgggggcaggtggagagcgacctcaatcagctccgcagtatcgtcgatcagggacagagcatctctttctcgatggggagcgcagatgatgtgctgaaacagcgctttcaatcctatgctgatcttcagactgccgccgccaacgggacggacctatcctcgaactatgcccgttggtcagataccaaccgcgacaccatcgccagcacgctcaaggctgcaagcctgacggctgaccagttcgacagcgaggaggatacgatgggctccctccgaaacatgtcggaatcggccgatggccaaatgaaagctctccaggtcggccacgaaattgcggcgcagcaggttgcgcaaatgcagaagctgcgtggtctcgtctcccagcagatgacgatgatggggacgtggctgcaaagcgagcaaaccgacaaggatctcgcgcaggctcggcgggaaaagttcttcaacgccgataccagtgccgtccccgaaggtcagaagatggagccacgctggtgagccgcgcagttgtcattgctatcgcgcttttggtcgcggcggcttcggtgtccgcagcaagggtgttcatcatgaaatccgacgatcggtccgcatccaaaatgagtgagaagtttttcggtgtgaaaaaggacctgcccccaatcgaaaagggccaggaaatgcgtccaagatggtgagggcacggatcgagttgatcttttttgcaaccggacttgcctgccttatgctggccggccctgcgtttgcacagcagggccaagtcctcacagagctagaaaatcaggtttcttccgctgccaagggctgggaaacaacgatcatggatgcggcaaggtctctgttctggatcctcgccggaatagaggtggggattgccgcggtgtggctcgccattcagtcggcatccctcgacagctggttcgcagagcttgtgcggaggataatgttcatcggcttttttgcctttgttttgacccagggaccgacgtttgccaaagctgttgtcgatagtctctatcagatcggggccggcagtgggtcagcttcgcccgcggaggtgttcgatgcaggtatccgtgtcgcttcgcagatgtcggaacaggccaagttcggtgtcttcgaggataatgcccttgcgatcgcagccgttctcgccatgggtattgttgtgatctgcttttcgctggtggcggcgattttcgtggctgtgatggtcgagatgtatgtcggcctactcgcaggaatgataatgctcggccttggtggatcctcgttcaccaaggactttgccgtccgatatctcgtttatgctttcggcgttggcatgaagctcatggccttggtcatgatcgcaaagatcggctcgaatgtcctcctgggacttgctcaggcccctaccgccgagaccgaccagttcatcacgacacttgcgatcgccggcatctcggtcgttgtatttatcatcgcgatgtatgttccaaacatcatgcagggcgtcgttcagggggcgtctgtttccggcgggatggaagccattcaacacggtgggcaggcggcgtcattcgcgaccggcggagccttcctggcagcaggtgcggctggagcaggatttgctgcagggcaagcggcgcgggccgccggatcatcctttggaggagcggctctacgtggagtgggtgcaggccttggctcggccgggcaggccgcaggatccgcagccaaggagaaggcgatcgggtcgcccggtgcctatgccggctccatccttggcctagcgaacgcgaagctcgaccaggctcgtggcaagggagcctcgcccggtcaaccgccggaacgacacgacaaatcgtaaattcaagacagggaaaacaatatggcagcgcaacgcgcccccgagaacccttatcttgccgcaaggcaggagtggtcggaacgatatggctcttacgtgagggcggcctcggcatggcggacggtcggaatcttaagcctgggtatggcggtgatcggtttcggctactcgctgtatctcagcacgcaagtcaaactcgtgccgtacatcgtcgaggtcgacaagctcggaaacaccgtctccgccggatttccccagcagatcgaatatgcagacgcaagggtcattcgggccacgctcggcggctttatcaccagtttccgctccatcacgcctgatgccgtcgtccagaaacagtatatcgacagaacctatgcgcttctgaggacaagcgatccctcgacccagaagatcaacgcctggttccgcggcaactcgccattcgaaaaggccgtgaatgcgaccgtcgcggtcgaggtaaacaacatcgtcgcgctgtcgaaccagacctatcagatcgactggaccgaatatgagcgtgatcgcaagggcaaggaaatcgcgacacgccgatttcgcggcatagccacggtggcgatcaccgcgccccaggacgaggcaacgatccggctcaatcccatcggactctatgtcaaggacttcgactggactgcgcaactgtaagggcaggggacttcaatgaatacacagttaaatcgggcagcgctttgctgcatgaccgcacttgcgcttttgatcacggcgacgacatcgggctttgcccagaacctgacgacgaatgaggcgaaaggaaccaccctctccaacaaatggcgtgggaagcggggactggtgacaactggggccgacggaaaagtcatcttcctgttcggtgagacgcagccttctgtcgtctgctcacctttacaggtctgcgacatcgagcttcagggtggagagattgtccgcgacgttcttgtcggcgatacggtgcgttggaaggtcgagccggccacatccggtgctgcgggcggacaggcaattcacctgatcgtcaaaccgtctgaggccgggctggtcacatcgatggtcgtgacgacgtcgaggcgcacgtatcacattcagctcaaatcgcatccaagccagtacatggcccgcgttggtttcgagtatccggaagaggccgcgacgagattgtccgacatcaacgctcgaattcagacgatgaccaattccgacggcggcgtaccgccagagcaacttgccttctcctattcgctgagcggcagcgcgccctggaagccgaagcgcgtctattcggatgggcagaagacctacatacagtttccgcgaacgctctccggtcaggatgcgccggtcctcttcgtggtttctggcaggcaaaaccggatcgtaaactaccggatgaagaacggcatgatgatcgtcgattacaatatcgacaaggctgtccttgtttcgggcgtcggctggcgtcagcagaaaatcaccatacggcggggaggctgatcgatgcgcctttgccttcttctatttgttgctggcgttcttctctctggttgccagaccggaacagacgagatcacgacgagcgccgcgccttcgacggtaacaggccccgtggcaagcgctatcgctggcgacatagctgggcgttatgccgagcaggcgggatcgaccgcgacgccgatcaggcttcacagcgacgcatcggatttcgcgaccgcgctcgaggccgcgttgaaggggtggggtttcactgtcgtgacggatgacaaggcgcgctcattgaaagacaccgccaaaccgatcgagctggcatattcgttgatcgacgttgacggacaggtgctggcaagactttccagcgagacactcgagcttgggcgagcctattcggtgtcatcaggtggcgccacgccggcaagcccgctttcattgatgaagcgaaactgaggagagacagatatggtccagtcgctccagctcggcaatccgagcagcgcctcgcaggaaaaaggcatgaaacggcttaatcgcctgccggtgttctttggcatcggtatcgcagtcgtcgtcgcctgtgtccttgtctacggcatatcatcccggggactgcggttcggcgacagaattccggatgaagcaggctcgaacgtcccggcctcgaccttcgctgatcagatgaagcgcggggtaaaagacggcatcatcggggatcgcgaagagcagcccgtattccagcccacgcccacaacccagacaaatgtcgaggccaagccgattgaagaagagcagataaagcagcaggcacgggaagagcgccgaccgcgaatggagtcggaagaagaatggttggcccgacttcgccgcgagcagcgcgaacaagtcctgcgtgaacagcagcgacagcgcatggccagccttcaggcccgtgcgactgcgtttgattcgccgctgaaggtcaaaatctcggagctgggaaatatctccaacgacaccaggacaacggagcggcagccggccaccaataacggtgcctctgatctctacgccgcggccatgaaatcaggtctgatggggcagaatgccgatccaaatgggcagacttcgaaggaagatttcttcaacgccgacatcaaggatctcggctacctgccgaaccaggttgtaccccagcagtcacgctatgaactgaagcgcggctccgtcatcccggccaccatgattaccggcatcatctccgatttgccgggccggatcacagcgcaggtgagccagcacatctacgacagcgccaccgggcattttcttctcattccgcagggtaccaaactactcggacgctatgacagcaaggtctcgtttggccaaagccgcgttctggtcgtctggacggatgtcatcttcccgaatggctctacactgcagatcggcggcatggctggaacagactcgcagggctatggcggcttctccgacaaggtcaacaatcattatttccgaacctttggatcggcagcgcttgttgcactcataggtaccggcatcgatatggcagttccggagagttcgaccctcgccacacaggatacggcttctgacgcggcgcgtagaaactttgcggagaccttcggccgcgtcgcggagcagacgatttccaagaacctgaatgttcagcccaccatccagatccggccgggctacaagttcaacgttctcgtcgaccaggatattgtctttcccggaaattatggcggttgaggcacacgttgccgtaaccgccttggacaactcctggatcaggcagatagacgcacgggctcgctggttgcatttttgcgcggccgatatcctgcgtagaggggagccacgacaccgagcgcctgctgcatgcgcgtgcgaacttcctctgaaacttcgaagataccgcagcaaaccggggagcgaccatagccgtgcgcacggccaacctcttcaacggcgagccccgcccgacgatagacgcgcgccaggtgcggctcgtagttcgagaccagcgtctcgatgccgtgggacaatccgcattcgcacaacgccagtagcagaatgccgaacgccttacccgcttccagactcgggaagtcctcggagagtgtttcctcatcgaggcacattctcgttccctcatagatgccaggtgccatcaggctggcccccgcaaaagtgtcgcggaacacgtcgtagagaagcgtcgggccggtggttggcatcagtcgcaacgttccataaaggcgatccgcgcgatcattgcaccacatcaggtaagccggccgcagagcatcgtattcgtcgcgctcgcaatcaccgtcgatcgtgacggcccatccgagctggtcgcgaaagacgcgtttgcgaaggcgaaatgcctgatccatgagagacttataacgggtgtactgatgcgcctgaaccagaatgaacaaagtttatctccagctgttgatgatggctggaagatgccgcctcccggggaagccagatattcccgcatatgctcaagcccatatgcgggtattgtcaaagtctggctggcggtcggctcatatcgtgatcacgcgcagcttcagggcaagagtggccgccgccgagatcgtggcgcaaccaagtttcgtcctcgccgacttgatgtagctgcgggtcgtgtgatgggataggccgagaataagcgcgatatccttgtaatccttgccgagcgcgctccagtagaggcactcacgttcccgcggactcaagaccgggatcggatcgctcgctccatgtagctcgaacacggccatctggtggacgagatacgcgagatcgacccattcactccgatgagcatccaccagatcctcccagtcttcggcggaggcgttcgaattcaaagagaggatggcgcgacggccggctttatccgttatagggatggagaagccaaagcggccgatcccatggcgtgttgcgtcttccagaaacatcagcatctcgggtgcgacttcgagttctcgccaatcgaatggcaactggcgcagaaagccctcgcgcgcaacaggatcgatggtgacatagcccttcaacagataagtggatacccacgcatccgggtaggtcgtgcgcacgaacggggcgtcaaaatcaccaatcaccgtcgaagcgagatggtaggtaatgaaatcgacgcgataaaacgactgtatcaaatggagcgcctcggtcaccgcgcccgtctttgcaaggcgctccctgacgtcagaaaaatcggcgaaagatcctgtcaatatacgtttccaacacggcggactgacaatccgccgcagagatcgaataatcagccaaacgagttcggcggcgatgcagaacttcaagggatcgtgctgtagcctgattgctttcgcgtttcaaacgcaacttctcgacgagaaagggcctcgcgatgcagaggttaatttagttcgactattggtcgatctccgcgtttcattttggacacaaaagcgacaacgactctaggttccttcttcaagcgttggccgcgagccgacccagtacgccaacaaatctgcggtggcgcgaacaaggttaggtcgctataagcgctggtgaggcagtacgcgctgcctccgggctttgtaacccgaagcacaccggtttggtgcccgccgttagggcgccagattcctcgacctatggtcggggagccgtggaggtatgtccaggttcctcggaactaaaggtccatgggctgagtgtgctcggttacaaactccccgatcgccaggggtcaggaactatgcgggggcgcaccgcgcattcctgttttgggagttgaacatggacgccgacgaccgattgaatggcgaggcagtcgatctgaagccgctggtaggcctcctgcatgggcttccgtcaccgctcgtcgagcgtctcacgatcgatgcaatccgcgaacatcgcgaactgttggagcaggcagaaaatctgttcaatgaactgccggctgacgttaaagccggtaaggagcttgttagcgatacccatattgcctatctcgaagcaaccatcaggatgcacgcgcaaatgtcggcgctgaccaccctgctgcacattctgggctatacgcccaaaacctgacccgccggatcagcctaaatcaggccgcgtcggatggccaaagccaccacctgtgcatgattggccagattgtagcgcgttctgacatcgtcaatcgcagagcggacgccagcatactttgcctgctctagttcagcgatcacctcgacggttttgccaagcgacagccagcgaatgtagttcacctgcttcggcgtcaggacaatcttttcctcgatggagggcgtgacacgcatgtgctcaagacgcgtatgaagctgggcgaccgctgatgcggccataatcgcatcgatctccatatcactggcaagcgaaggcttcgccgatgcaaaggtcagcatggacatggcaccgttggcggtggcgaccgggatggaaacgcccgagcgaatgttgaaatcagcggctttcgaaaagaagtttttctgctcttttgacagcgagctcttttcggcttcgccggaccaggcgaaagcgcgccttatcagttgggcctgccgcatgaccggatcgatgaaccggtagtccagcgtgtcatagattttctgccagtcgatatcgtagttggagaccgcataggtctgacccggacgaatgttgacgaaggcatagcccacaaaatcgaaccgatcagcaagattggccagtgcgcccttcaccatggactgatcgtttccgatcacagtgatatccagcagtttctcgacccagtttgacatccatactctccctgtaaatcgcacccgtttcgcggtggcgaagtgcgtcggcagtcagagggaccgcgacgcgcgcgaacagtgacctggtaaagaatgaagcatattcaatcgcgtaagttgaccatgatggaatggttttctaaatcgtcttctcggaattgcaaaccacggattttgcttactcgcggaaaacgtgtcagctcacaattggccaagcgatctcagcttcatggcccctgagcagaatctgtcattgttttgcgaaatgctttacatggaaggaccaatttagagcgaacccatgttgcagcttacccacgacaccgaacagcttgcccgggaaattgcggcccgtgtcgggcgcagaccggacgatatcatacgcgctgccctcgaacgtgaagctcaggccctcggggttttcggcgacctgcctgtgagacatcgcatgaccgtcgaacagatgacagcgatcggggaaaaggtttctgccctaccgctgcttgatacatcatccccgaaagaagtcctcgacgacctgcatcaaccatgattttcgtcgatcactccgcagtcgtccacgtagccgcaatcaggacacagagatcaggagcactacggctttaccaacttgacgaacttaaccaaccttgccatatatagctctccgagcggagggtgagagatggcatctctgaagtccaaaaccagcatacgtgacggtgcaagcgggcgcgaaaaaccgggcgctgaatccatggcttttttcctgaccacaggcgccgccccgctggcgaaggggagagccgccttcaagatcaagatcccggacaatgcatcaaaagccctgaccggcaatcccaatcgcgtcaaggcgctcctccaggaatatggtcaagcgatcgcaaaaagccgttctgctggccacccggtcagcttccgtgtcgatgtcgattccgaaggtgagatggttgtcactcccgttgaggcggtggaaatgacaacggtgcctgtcgtagaggagaacgatgcactggatccggagttggagcaggcgttggtggccgcacgggcgcggggacgcataaaggctgctgaggtcctcagcggcactgacatgctgaatgccgacgaattcgccaagctgcttggcacgacaagggtaacggtgaattcaaagcgccagaccggactggtattggggctggatggcgcgaaacgcggctttcgcttcccggattggcagatcgatgccgatggcaagccgtttgcagcgcttgcaacgctccacgagcgactgggcggagcctgggcggtttaccggtttctggtccaaccccacggagagctggacggactgacaggtcgcgaggcattggcgcggggacggaccgagcaagcgctcgaggttgtcgagagcattggtcgagatttccgctgaatggcacgtactctgccgcctcccggctttacaaatgcaagccttaacctgcatacggtcgcggccggacttcggttcggtcgcatctatctgggcacatactctgatccgctaggcttcggtaagacgccgagccgtttcagcgatccgcggcgacgcaagttcgccaaccggttcggggtgctctatttgggcgacacggtgaaggtgtgctttctcgaagccgtcctgcgcgatcagcgcgatggggtcctcggcgacctgccgatctctgaatccgaattgtatgaccgcaattttgcagagatcgaagtcaccactccgttaacgatggtcgatcttcgcgacgatgggccgatcaagatgggtgtgccgacggatgtcgcgaagggctcaaagcaatccctcgcacggaagtgggcggtcgccttcaatgaacacgtcagccaagtcgacggcatcgtctacccgtctcggctcaacggccacaccaaccttgcagtgttcgatcgagctattggaaaactgaaggcggtcggcacgatgaagctggtccgcgcgccgggtctggctgatatactaaacgacctcaatgtcgcaattgtcgaacctgatccctgatattttacctgtcgtcgaagtcggatccagcactacttctgcccaccgatccgggacaaatcgacccgaattcccgcagtgccaatctccttttcgtcaaagggctccccttcgctctgggaggggttagcatccgcaggtttgtccgcggcatccaaagaaacttccttccgctcgacgattgttcctcctggatcctccgcctgaaacacgctttgcccctcgaactggccggtgttccaggcgtaaacggcatcttcgaagatctgtggaagcacctctttgctcgttgggttgccataccactgtgaaacgatgcgcatgatctttgaaaacatcctcgtccccatgcgaagattttcgcaaggctcaatcagatctggtttcagctcggacgcgtccttcacgccgacacccgccgggaactgtgtaaggcccacacgcacgacggcttgcccgacatactggcgtatgatctccatagcctcgtcgggcgtcttcggttttggtacgaggatgagccgtccaccggctttcaccgtgacggccagcggatcgccaggaccgacagcggctacgaactgctcgacgatggcgggtttcagggagggatcggcgcattccgcgataaaggcagcatccatgacgaaggctccaaagttcaggtattgaaggaaatctcaagggggacgccaaacagggcggaccaggctttggcgctcgcgcgctggatggcgacgatgttgccacccgtcgtccaccagccattgccgatcaaaacgatcgcgtcgggtcggtgtagcatcgactggagaatgggccacagtacgagctgctcgtagcagataagaggcgcgatctttcggcccgcgacctcgacgacgggattggcgaagagactggcgcgggcgccgccagtctctcctatccatcgctcccatggacgccacatcgaaaccggcacaggcatgcgctcgcgatagaggacacgtccgccacccccatcaatagccaccatcacattgtcgtagccattcgcattaatcacagccgcaccggcaactaccgtcacactgaccccttgcaatccttcccgccagagacgttcaagggttggcgtccagaagcccagcgcgctttcaggcagaaccaccacggctgcgccagatcccgcaacctcctgaacgagtgcgatcaggttgcgttgacgttgtagtgagctgtcgcggccaaggctcgcacccatttcaaggtcgacaccacgccaccccaccggtagaatctgatttgtccccgatgcggcggaccaaagccatagacctgacagagcaatggcgatagccggcccgatccgggatgcgagaccgatcaggacggctgtcaaagcgagcagcccccaccatccccatcccggaaacagaattcccgccgccgtcaacggatgcgcccagcctgtgatcccgagcggaggcagaccggtgagagccaagatgaggagatatcgcaccgcttttaccaagcccgaccgtgctgtccagaataccgcatggacagcaacgaaagaggatgccgccgcgacccagaagctgaggccgacccagagatccgcagcaaagaactgtgcgacgcccgacggcaatcctcgcgacgccgccaggaaatagccggccgcgacgacggccgctgcgatccgcgttgatgaaagggcccacagaagcgggaagagggttgccgcagggagcagggacacctgcccgctccagccaaccgccccgaccaccacggcaagcgaaacgagaacggcaattatcatgacctcacggcgcataggtcaacacctcttgtgctagaccgagtacgccggactgaggcaccggcccgaaataccgggagtcccatgagccgataaagccggaatgcaaatacacctctccgggccgcaccatcctgctttgatcgtgccgaagagatcgcccctgtgcgtccttctctatgatgcgagagcgggggatcggtaagccatcaatggcgacacgatcggtgacgtccacgcgctgtcccgccaccgcgataacggtcttgatcaacggtccgaaaccaccggggcaaagtccccgccggagatatccgcgctgtcgcgcctcgcgcatagcgggattgtcaggcgggcagacgaaaactgtttcgccgggcaagacggagcgggtgagcggaacgatgcgccacaggccgagcggctcactcggcgtcgtgttgatgcgcagaccaccactccaaccggcagcaaagaggacgccaaacatgccggcggccacggatatcgtgacgcaggcgcggcgtcgttgacgaggcatcgtccaaccttcacgcatcatcataatcatttgagggagagccccttggtctgggtttgccgcgctttttcagcctgcttcaatgccagcgtggtgcgctcgtgcgcggcgagctgctgcacagtgcgcatgctgttccaggccgactgaacttcgcttttctgcgaggggttcatcccggccgtcagtttgtggaaggtctcgccgtttgcatctttcgccgacagcgggagcaggctgcgttctccgaagcgctcagacacagccttggcgaagccttcgagctcggctttcacgtttctgtcggccagcgtatattcgaggccggcaggaagatcgttgcgatcgatcgcatcgcggatcctctccagcgtctgcctggccgatggagagagggcagggatgtcgacggagaccttgagacggatcgcccgctcttgcgcttcatgcttgcgctctgcctcggcccgcgccgtcacatatcgctcgaggtttcgcgccaaggcaggcgcgttgacaagtgcggtgtcgcgcgccgccttctcgttcgctccggcgaagatgccggtcttgcccttgagcgctccaaacttttccggctcagctgcgatctttgcaagcgttgtctgcgctcttgccggatctttcagcatggcatcgacattgaccgccttgaacgcggtctccggctcggcgaagacctgggtaaagcgtgtcgtgacctcctgccattgcttcttcaaaccgggatcggcagtcagacgatcctcaacggcctggtcgatcgatttcgggaacgtcgtgatgcctaataccattggctttgcctccatgaagggtttcggggtcacatggggattcgggcgcttgagaccgagctgtgcgccgatcgtcgccaggcgggcggtgagattgacgagcttctgtttctggcgaacggtccagtcgaggcggtcgcgaacgagggtgcgcgctacattgaccagatgcagaccccgcgcgtcggcgaagcgaagggccgcgcgatagaaggcgcccttctcgtaatcgagcgtcgtttccttggagttcttgcgcgatagaagctcggcaaggccaccccccttggcgaaggaccgcgagccataatagacgccgagatcctcgcgatgacgggtcatcgccacataggtcaggtgccggtcgagggacagcgacgccaggaccttgaccctgtcgacggtcgcgccctggctcttatggatcgtcgtcgcgtaaccatgatcgacgttgttgtagaaccgctgctctacgctgatcgtccgccggcgctcgccctcgccaatctcggcaacgatacgccccggggcggcttccacgaccttggccagcatgccgttcttgacgccaagcgagctttcatttttgaggaagacgatctggtcgccagcggcaaaatgacggataccgtcttccgtcttgaaggcgtaaccgtcatcgacaaggccgcgctcgaccagcttggcgcgcgccagggtattgagcatccgcacgtcgcggcgaaggtgtgcgaggatcagcgaggaatgggccggatcgtactcgcggttccaatcggaaataaggttttcgacagcttgtgacttcaaggtcgatcccatcatccgaccgtttgcgctgtaggactcgacagccttggcgatgttgccgcgggcgagatcgagcgacgcgtcgcgcatccattgctcgcgctggcgatagatggtttcgagttcggcgtagccgatacgatcggtgattgcccgaaacgcagcaccggcctcaatcggctgcaactgttcgggatcaccgacgagaacgagctttgccccgcgcaccgttgcctcttcaacaagctgcgccatttgtttggaggagaccatgccggcttcgtcgaggaccataacggtcttgtcatcgagatggtcgcgaccttgggcccagcgcagttcccaggacgacaatgtgcgggaaagaatacccgcttccttttccaatccttcggccgccttacccgccagagcggcaccaacgacacgataaccggccgcttcccaagcctcgcgcgccgccttcatcattgttgtcttgccggcgccggcgcgcccgatcacggctgcaatgcgtgccggcccctcgacatgctcgatcgccgctttctgctcatccgacagccgtgtgtgccggtcaaacgtcgacctaagcactggctcgcggacgccatgggaactgcgcccggacagccatatggaccggtttgccatctcagcctcaaggcggatcatctcgcgtgtcgtgtagcgggcaggcgtcctgacaccggaggtaaagtctatccgctcgcggtcgagacgcagcacttccagatgctgcatgatccgcgccatcaggctttggaagagagccgcatcgtcgacatagcgatggaggaccttcgccacgtcctggttgtcgaagacgctcttctcccgagtgatgagatcgagcacgataccgggattgcgctggatgcgccggacattctccgcgcgccgctcctcctgcaattcgatccgctcgagcttccgtaacccggctgtcgccagcccgttttctgtgtgcgattttcgctcgatggcggtggcaccgaccccgatatgaatggtcggtgtcaggtcgatgccctgcttttcgaaggatcggccatcgatgcggatatccagcccggcaagcaccagatgccggttctgcacagcaaaccatccatcacgaaaggaattgaagccctcggtgccacccgcccagagttcatagatgattttgccagtgtcattgcgaatgggctggccgtctggtccaagaacagcaaccttcttagcaccgaacccgtccccgctcagaggccgcaatgtcgtcatcaggtggacatgcgggttgccgggtgcatcgtgatagacccagtccgcgaccatacccttcgacgtgatatgctcggcaacgaagtctcgcatcatcgcgatgttctgctcggaggatagctcgatcggcagcgcgatggtgacgtccttggcaagctgggcgtcgacccgcttctcgaacacctcgaccttgttccagaacgcttctgaggctcccgagaccgatcgatcggcgatcatggcgcgcagccagtttggcgcatcggcagggatcacgaactcctcgtgcagaagaccctgcttcctggtgtagtcgattgtgcgtgcttcccgctcatactccatcctggcgcagtgccggtaggccgcagacagcacggcgctgcgcccagagccacgggcgacgatgttgactgagaaatgcgggacggccacgggcggatcgctccttcttgcgaacgaaatcaactggttgatcgcaagaggttgccccgccagggggcaaaagcagaacgtcgcgtcagcgacgtataattgcgcccttggatccgctcttgtcgagcggcgggatcattcgccaaatgctgacgctttggcgaggtacaaatttgtacctgtcctgccggggaaaaatcggggactctctgccatcattccacggatatcactggagattgcatcccgatgaagaagccaacgtcgaaaatccgcgaagaacttgcccgcttgcaggaacagctgaagcaggcagaaacgcgtgacgccgaacgcattggccgcattgcgctgaaggccggacttggagagatcgaagtcgacgacgccgaccttcaggcagctttcgaggacgttgcaaagcggtttcgcggaacgaaagccggatcgaacggaaaagaaaagggtgccgctggagcgaccggaacatcgtcggccacgtcgctcagcgctggcgcggctacgagccaggctggcgaggcttgagcggatgcagcggctgaccacagcagaggccagaaagaaggacgctcgcgagaagatcgagttgggcggcctgatcgtcaaagccgggttgcgctatgagaaacgcgcgcttctgttgggtgtgctgatcgaagcgcaaaagaaaatcaagggcgatgaggcggagcgatcccgtctgaccgcaatcggcgcggaggcattcggcaatgacagcgaataagatcctgctcgccgttgttccgccgctggcgatgatcgccatcgcactgatgttgccggggatcgaacagtggctcgcgacgttcggaaaaacggcggaggcgaaattgacgctcggccaaatcggcttggcacttccctatgtggcgagcgctgcgattgcactgatctttctcctcagtgcccagggatcggtcaacatcaagacggcagggtgcggcgtcgtggccggatcgggcaccgttattgcaattgccgtcgttcgggaaggaatgcggctttcgcaatttgccggacaggtgcctgcggcgaggtcgattctgtcctatatcgacccggcaacgatgacaggtactgcggcagctctcttctctggcatgttcgcacttcgcgtggccgtgctcggcaacgcggcattctcgcgttccgagccgaaacgcatccggggtaaacgcgcgctgcacggcgaggcggaatggatgaaactgccggaagcagagaagctgttcgcagaggccggcggcatcgtgatcggagagcggtatcgtgtcgatcgcgacagcacggcggcactttcttttcgggccgataagcctgagacatggggcgccgggggcaagtcaccgctgctctgcttcgatggttcgttcggatcgtcacatggcatcgtgttcgccggctccggcggcttcaagaccacgtcggtgacgattccgacggcgctgaaatggggcggcacgctgatcgtacttgatccatccaatgaggtggcgccgatggtcaaggcgcaccggattaaggccggccgagatgttatcgtgctcgacccgaaggatccggatatcgggttcaatgccctcgactggatcggtcagcatggtgggacgaaggaagaggatatcgcggcggtcgcctcgtggatcatgagcgaaagcggccgcgccagcggcgtacgggacgatttctttcgggcatccggcttgcagctgctgacggcgatcatcgccgatgtctgcctctcgggtcatacggaaaagaaggatcagacgctgcggacagtgcgcatgaacctatcggaaccggagccgaagctgcgggcgcggcttcaggaaatctacgacaactccgagtccgattttgtgaaggagaacgtggcagcgttcgtgaacatgacgccggagacattttccggtgtctatgccaatgcgatcaaagaaacacattggctgagctatccgaactatgccggtctcgtgtccggttcgaccttttcgaccgatgacatcgcgtcgggaaagaccgacgtgttcgtcgccctggatctcaaaacgctggaaacccatggaggtctggcccgggtgatcatcggctcattcctgaacgccatctataatcgtgacggggcgatgccgggacgcgctctgttcctcctcgacgaggtcgctcgcctgggtttcatgaggattcttgagacggcacgcgatgccggccgcaagtatgggatcacgcttctgatgatctatcagtcgatcggccagatgcgcgaaacctatggcggacgcgacgccaccagcaagtggttcgaaagcgcgagctggatcagtttctcagcgatcaacgatccggagaccgcggactatatctcccggcgttgtggaacaacgacagtcgaaatcgaccaggtcagccggagttttcaggcgaggggttcgtcacgaacccgatcaaagcaacttgccagccgaccattgatccagccgcacgaagtcctgcgcatgcgtgccgatgagcagattgtgttcaccgggggaaatgcgccaattcgatgcggtcgcgcgatgtggttccggcgagccgacatgaagtcctgcgttggcgataaccgcttccatggaaaacgtggaccattggaaatcaaggtctgagggagaacccagacccggagatcgggcgatgagatattgggaagccttcgaggcacaggtcacggcagaaaaggccatcgaagaatgccgcgtccatcaaattgaggccat

SEQ ID NO: 19 - DNA, 77043 bp, Rhizobium matallidurans
  source 1..77043: mol_type = genomic DNA
atccaattcagcgcgtcgctcatgctgcctgcccgactggcatcaactgtcacggcggcatagcagaaaaatatgcccacgatggcaaaaaccacgccgcgagatatgagcccatatacgcaaatcaagatcaagggccgattctctccaagatcaagataacgctcaaatcgccgcgagatgcccttcgccgccgttgcgacgcctccaatgagaaaccccacgccgatcgcgcccgctaggtagcggccaaaaggctgagacatcgcccacgccgccaaactatcttccccaccgccatggctcgaccccatccctaccacactctgaaacgcgtaggccgccaaacctaggtaagtgcctgcgctgccaaaaagagcggcacggaccagatagcttttgaagctagcgtcgtggccatccgcgttcgccaaggactgcgcgaggcgccacgccacgaagccaagaagaccaagggcaatcaatgtgagccagattgtccccaaccattggccaaggagcacatccagcgccgactttgtgtcagcctgtcggccgccgaaactcgaaaatgtagccagtccagcgactagcaggaatacgataccccttgcaccgtatccagatcgagccaaccaagcaaatcccgtatgtttcatcgactgttctcccgcgccttgaagaacgtgtgggccagcgcttaggttccgcgtcagcagtccacggcgcaaacgcatcaggccacaatggcctcccaaaatgtttcatgtttcacgtcaacacgcgtggaactgtttaacgactaaccagctctgaacatcggctcgtttcgccgttagggttttgggaaatggcgaaccgagagacggatggctaaacatttttaacgtcgtcggaactccgacggcgttaccggcgttgaaccgacgtatatctttcgactagaggtttaacaccatgagtactttgctgattattgtcatccttttggtattgctcggaggcggcgggggctactacgctcacgggcggtacgggggccgaggcttgggcggcgtcctgggtttagtcgtcctcgtgctgatcatcctatggctgttcggcgcgctgcacggcggtgccgcaccacctgtctaagcccttgtggcagtcgacggacccgcgcctctcgcgcgggtcccagatcaatgaaaatagcatttacgggacacggcgccaatcaatacccttgcaaaggagccctgctaggacgcagcccttggtggtcatcctgccgccccgtaccgtcaccgtgagcttgtaagtcatatcacgctgcggatcgaaggccgtgccggtataaacaccatcgactccaggcttgatggacatgaccaacttgtctccttccttttccttcggagttcctggcctgatccacgtgttggtggcgcatatttccgatccgcacgaaccaattcgaaccttggcgtttccgtctcctcgcgcccattggccatcgatttcggcggctttggcctgaacgatcacgcagaaggtcaacgtgatcgcggcgactatccttgcactcatgttcggatccttatctcgggttgatatcgatacgagaggtagtggtgagcggtttcatcaagccttgcagatccgaaaaatttatccggacggtctaaaccgaggaagcatgacgtccgtaaacaaagacgtcgacgcgctcgggtaggccaatgagtattttccttctagtctcggttgctatctggctatcgctggccatggccggcgcgtgggcgatacagcgcagcagcggacaaagtgggtggatcgatacaatatggtcggccgccgtgggtgtcggaggcgtggtcgctgcctcgttcgccggtggtgacttcgaccgccgtgtcgccctcttgatcgtgatctgcgcctggtcactaaggctcgcaagccatatcggctcgcgcaccacaggtggtggcgaagatcctcgctatgcgaaattcatcgaagactggggcgacggcgcagcctggcggctgttcgtcttcctgcagatacaggcattggccgcgttcgtcctcgtcctggccgtctatctcgccgcagccaatgaccggccgtttccaggcgccatcgacgctctggccatgctgctcgccatcgtcgcgctgggcggcgaagccctgtccgacgtccagctcgcccgcttccgaaagacgcccgaggcaaagacggaagtctgtgaggtcgggctctggcggtactcgcgccatccaaactacttcttcgagtggcttttctggtgttgctggccgctgtttgcgtcgactggatcgatatggaactggctgtccttgctcgcgccactgatgatgtactggctgctggttcacgtctccggcgttccacctctcgaagagcacatgctgcgctcgcgcggcgacaaattccgtgccctgcaacgccgggtcaacgccttcttcccaggtcctcgcaaatccacccttccaggagatcaacaatgaacatgctggcattcgccatcaacactgccgagcgcgcgccgcttactgacgcaatgacactggcaggcatcgattttctctgcgcgcgcaccaagcgcaagctcgcgacaacgacggcggataccgaacgcgacttcgtccagctcatggaccgcttcccggtggcaacccacaccgatgaggccaatcgccagcactatgaggtgccggccgacttcttcgcggtagcgcttggcccgcagcgcaaatactcctgctgcctttatccgacgcccgatacgacgctcgcggaagcggaattcctggcgctcgccgacactgtcgcgaatgctgcgatcgaagacggcatgacgatcctggagctcggctgtggttggggctcgctttcgctttatcttgcgcggcgctttcctaattcgcgcatcacaagcgtctcgaactcggcctcgcagcgcgcccatattcttgacctcgcacggcgggaaggtctggcaaaccttgacgtcatcaccgccgacatgaaccacttcaccacggaggcgaaattcgaccgtgtcgtctccgtggaaatgttcgagcacatgtccaactggcgcacgcttctcgaacgtatccgcagttgggtgaagcctgatggcagactgttcctgcatgtcttcacccacaaggatcgctcctacaggttcgatcccaacgacccgtccgattggattgcccagcacttctttaccggtgggatcatgccggcgcacgacctgccgcatcggttcggcgatctgttcaaggtggagcaggaatggcgttggtcgggaacgcactatcggcggacggcactcgactggctggcgaattttgaccgcgacatcaatcgcatccggccaatccttgcaaaggtgtatggcagggatgcacccctctggattcgccgttggcggctgtttttcctgtcgactgcaggcctgttcgggcatgataagggtgatgtctggggtgtcggccactatctgctggcgccgaacacataatgtctgaagcagccaaacagctcgacccaatcacccaggcgaccgtgacgattgtctgggtcatcgtgctgaacaagcccttttatcctgtctacgtctggtatctggtcggcaatggcgtggcggcatcgcttggcacattgctctcagcgcccctcttcctggcgatcccgttcgtagccaggcgatcttcactggcggcgcggatcgcgctgccgctgatcggcacgttcgacaccttgtttgagacgaaactcttcggttccgcttcgggcacggaattgtacttcgccgcctgcatcatgctcgtcgcgctgtctttccaagcacacgaaaagtggtggcagcgcggcatggccgtgcttgtctttgccgtgttcgtcttctcgcgcaatttcatcggtgcaccgctgcatgtctggactgcacccgaactcgcgaccctcttcaacctgaatgcgttcgccgtcgccagcctgttggcgtttatagcccttcgctatgcggggatatcagaccaaccgatcaaacgacaacgaaagggagcttagtatgcataagatttctcgctggtgttttgccgcggcactcgcgttgatgtcgttatcaagcccagccctttcagcctcagcagagccgcagcccgtcgcggttggcatggaccactatcgtggaacatggcttgagattggccgccggcccatgtggctgaccgacggctgcgttgcgggctactcgacctacaagcctggaaaagcgccaggcgagatccaggtggaagacggttgccgcgtcggcacccctggcggacgactgaagaccgtcgatggcgatggaaggatcctcgacctcgggcacggcaatgccaagatgcgggtacgctaccccttcttcattacattcaactattgggtcctttacaaatcccccgacaaggcgtggttcatcagtgccgatccaaagatgcaaaacctctggatctacgcgcgcgccgtgccatcgaaaggaaaactgaaggtgatgatccgcaaggcgagccaactcggctatgatgtcagaaagcttgagtttcccgcgcagtctgggcattgatggtggcgaatctcgacaagctcggatcttccggactcaaataacgtagcggcgaaccagctgagggaacagcggccccgccgccagttcatggcgatgcgcaggcagtcagaacaactgggctgcctgttcgttgccctatcgcgtgctagggtctcctaggcactcctggcacatccgggagcactttacctaggatgatgggcaggtctcgcactggaatacaggtggcagtgtattggggatttgcgaccgccgtcccgacccccgtcatgcctatctcgccaatacaacaagcactgatggcgcctgcggatcgggcgtgttagtgcggatgatgtcgatcgtcggaacatccattcgctctgctggaacatgacattcggcgagcgaagctttgaacatccggccagtccttttgtcgtctctatggtgagcgctagcccaatgcccatcacgatgccgcacttgcctggcggtcgtcttggcgttgaggatctggccggcgtcgaaggagccgagagaacgctatacgcggatttcgcccgtcagggcgctgaccctgacctcgcagaactcagcgccgcggaagtgcatggaaaaggcctcgattccgccggcggcggtaccagcccgccggtgatcacgttcggatgcatggagacaccgaatgtccacgccaactggtactttctcgcaagcttggactgaagttggacaccatgtcgacatcgttcttcctgtcaatccggacgatccttccattcaagaaggagcgaatgcccttctgaccaatcctactcgctcaaaacgcggacaacgccaccggccgtgctgccccgtctggacgcgtggcctagttcgatttgcagacagttatctttttgccgcgggcgatctccgcggtgtcgcatccatccggaacccgcgagggccaacgttacgtttcaggagcggaggagattcccgatgaagaaagatggcgaggtttcaagcgaggggttgagctcgatttggctcgaaagatttcgagcgaagcacagcgtggacagcggcgttcgcgcgctggccgcgtaccggttgccagctctatcgtcgggactgcccccactgaatccatgacgaagccggcggcgaggctcgataaccccaggctgcctacctcggtatcgaatcgtcttgggaccgtccgatcagcatgtaaagccatggaaacgatgaggacgctttggaccgaaattctcgctggcgctcatggaaccaattgccgcgatgtacatttcttccgcgcaattttgtgaggggacgttgagtaatcattttcaaatcaagagcatggaaaccaccggagttcggcaagtcctgcgggtggaagaatttgccaaccgatacgatttggacgagcggcaaagacgagaccttcgatcgttgttcggcccattcgcgacgcttcaggagttgcttacaaactgtcacttccccgcgaagtgtcgttaatagggtagctggcagtggattgtatcgtcaattccattgtccgtgccgatcttcatcagcataatttagacgagagccttaatgagcaaacgcacgctgttccaattttttcattggtactcggccggggacggtagtctctggaaggagcttggtgaaaaggcctcctatctcgcaggaattggaatcaccgacgcctggttgccgcctgcgtataagggggcgtctgggcctgactctgtcggatacgacacctatgatctgttcgatctcggggagttcgaacaaaaagggagcagggcaacaaaatacggagaccgggccgcccttgaagcaggttgcaaggctcttctcgagcacgggatccggccgatccatgacgtcgtgatgaaccataagatgggggcggacgaaaaggaaagcgttattgttcgtcgcgtcgacccactcgaccgtacgaatatcgaggaggagtcaattagcgcgcttgcccacacgcgttttaccttccctggcagagacggaaaatactcccggttcgtctgggacaagcagtgcttcagcggcgtggatttgattgagaaacctcatgaaaccggcgtatttcggctagtgaatgagtatggcgaggggcagtggaacgacgaggtcgacgatgaactcggcaacttcgactacttgatgggagccgacgtcgagtttcgtaacagggcggtctacgaggagctgaaatattgggggcggtggttttccgagcaggttccagtcgcgggtttccgtttggatgcggcgaaacatattcccgcttggtttttcaaggattgggtcggtcacatgcgcgacactattggcgccgacctattcgttgttgcggagtattggcaccccgatataaccacgctctccaactatctggagcgggtcgacaagcagctgctgctgtttgacgtcgcgcttcaccaccgtttccatgacgcctccaaggcgggcgcggactttgacatgcggactatcttcgatgggtcgctcgtatcgtccatccccgaccacgccgttaccctcgtggacaatcacgacacgcagcccctgcagtcactagaggcaaccgtcgagccttggttcaagcccctcgcctacgcgttgatccttctgcgcgagcaaggcacgccgtgtgtcttttatcctgatttgtatggtgcggcatacagtgacgtcaccgaagatggtcgcgaacagatggtggaaatgcccgtcattggctgcttggccaggctattagaggcacgtcagcggttcgccaacggctcgcagattgataaattcgatagcccacatgtgattggctttcttcggcggggaaccgaaacagagccgggttgcgttgttgtcatgtccaacggcgatgcaggggagatctccatggacctaggcccgaacctatcgaaatccgtcttcgtggattttgggtcacctatcgggtgaggtgacgaccgacgaccaaggtctcgcgattttcccgacgaatgcaggtagtgtcagcgtctgggttcagaaagattttgtttgagcggcgccgcaaaatggcttggggaacagctgctttggttggcgatcaatgggagtacgacatatggcacccaggaggcgccgctgctacatcagcggatacctcgatatctctctcttccggacctgcacgcggtgacgttaatctcgatccgcgaccttttggaacaaatcgtctccaaagacatttcgtcgccaactgagggaggcagaagatgaaagacgaattattcgagcgtgaacgtgcccttcggggaaaaccctatagcctggaagagtttcggtcaaaatacgtcctggatcgcaaggtcgcggaagacctattcagacgttttggaccatcatccgtggagctcgatcttttgatggaggcaaagcgccggaagccgtcattccaagccatcgcctccgatatccagctgtgaggcaataggggacaccaagtctccaccagtcttgcgcaagaccggggagcacgccacctagcttcagggccattccgacacgtcccacgatgatctcttcgagaacagggcaatgtcaagggaaaagagaccatgcaaatgtgctctagaatttgctagaagtgccgaagttttcgacacttctatgatagcgctgttcgggctaaacatttgacgggatcgcggggcgagcgtagccagcgcaggcattcacgtgcgcctcgaccgacccgcctgtgcctttcagaggaactgaaatcgcgattggttgttttccgatcaaacagagagaaacatggcgggccaatgaaatcttttgccgatcgctggtattattctgacaagtcccggcggcaacctgtcgatcgcgatgctctcgaacaatggcgcgaagatacctcccgtgcttccgatcccgtgccagcaacctttggtcgcgctgtggaacgcggacctattggccgtgcccgcggagacggttctcgcatgtcacatcgggtctccgaagtcgcgatgggtgacgtggcggctgggacggctgaagataagtcagtccgccagggcgttgacgatatagtccgcgaacggccgctcgccccacctggcaccttcgcgcccgcggcctggatcttaggagccaccccatagagctcgcggcaacaatccaggcggtgtggcgataccctgtcagttcgctgcggggggaacgggttgacaccttggcgctcgcatccgacggcgttcggggcgatcgcgattatcttctcgtcgacctcgtttcgggagagatagccgcgccggaaaaaatcgcccgttggcgtcccgcgttggagcttgatgcccgcgtgacgagcaggggagtcctgatctcctcgaaagattgggccatgacgattgatgatgccgagttagacagcgctttggcagatcagttcggtttccggtgtgcgatccggcgcgctgggagtagccttcttacaaacgtgggcgaaatcaaattgtctcctcgctacctggcaagccctgttcatttgctgtcattgagatccctttcggagctatctgaactcctgcccgaggcgatcgtagacgttcgcaggttccgcccgaacatcgtcgtggacactcgtgcggacgagaacgactgggttggccgccagatcgcaatgggcgcctgccgtggcaccgtcaccgaaaaaaccaaacgctgtggaatgacaatgatcgcgcagactaacctgtgcgaggatcccgaaatcctgcgaacgattgtccagaggcgtcagcgttgtttcggtgtgtatgcagatatcgattccgagggcgtgatttccgttggagacacgatttccttcgatgagcgttaggccgagtggacgaggagttctgagtttgccacggcatcgataatcgtcgctgaaaccttgctccccatttcgtgagcgctggtaataccttgaatgaacggcattttgtgcagcaggaacgggaccgagacacagtagaggttgttcgacagcccagcttccaagcggggtcggaaactgtcgtcaatctcaattccacctgtccgacgggtttcgtcgttcgcgcttgctccggccgtgtgggtctctgcctttttgatcgcgccgggttgacgaaggctcggaaacgggaggtcggaagcggaaagagcgtgctgtccggtggcatcgatgaaggcgtcgtaactgatgtcatttccatcaacaaccacgacagcgccgggtttttcacgatcctgccgaatgtcgtagtcgtcgcctaacgccttcactgacagcttgcctgcctgatgcagggcaaggagccgttcgacggattcgtgcggaaccgtcgcgtaatcgtccacaaacaccgtcttgaaatgcttgtggaagcgcttcagatctcgatcattcagacgagggatggcaagcgcgatcacctcatgcatgttgaggatagcgtaccgccactgaacggtcttccgctcctctttgtttttcttcgcttcagacagattctgcgctgcccagacgaaagggtccgcagcctgtcgcggtcgaaaatagcggtcggcaatatcttccacggaggccaaggccaatccaatactggcagcgtagttgggatcggccgctgcaagctctcgccgaaacaactcgaagacctcatcgaggagacgctcccgcttttgctccatcagcagtcgtatggcaatttcagtgcaaaacctgagaggctcgtatgggatcggacaatagaagtccgcctctggcaacaaacccttgcgagacatcatggtgatatggaaccctgtgctcatgggatctggttcgtatcgcaaggttccggagtcgtcccgaaggaatatgccatgggcggtggcgacggagaccacggcgtctataccgctaagcgacgtacccaatacaccgacctttacagcaccaatcctcttgatcgcggcagcgggccatggcgacacaaaatacccaggcgacgtttccgtgttctcgggccaatcgtgacctgtggccatgacgacgtggtcgaaagacatcgttgcatcccgcccgccgtgtcttttgaatacgagcgatatgtcattcgtgccgagtttgatatcgagaatacggtggctggttttcacatcgatggagtggccacccgagagcccccggttcaccagtgcccaaaactgcgcggccaggaactcgccgagaacgatccgagggtaaaactcgcgttcgccgatccccgacctctcgatgccgagctcttgaagctcgggatcaccgcgcgacgacagccactcaacgagggtctgctcaatgcgaggaatctcaatgctggcgatatttgccagcatcgcgcggtcgttgaccgccggatgatacggcgtgcctttacccggatcgggtgtttcctcaaaaatcgtgatcgacaaaggcgtggcgctggagatcaacccagcgagcgtgtagatcccggtgggtccagacccgatgatggcaactcttggcatgtgggtggacggtctcgaatgaagggggccggagaagtcaatcaaggagccgctcgaaaacggctcctgaaacaattagttggctgaagaccactgactgcggacatcctcagcgttcttcgtcagatggacgtgctcgtcgacatgatcgacccaatccaggggaatgaggtgatggcggccatcaccagagtcggacttcgttagcttgatgcgcgacgtgccatccatatggtctaccgtaccgacatgagcaccatccgcgcctatgacttccatatgctcgcgaacttgttctgcagagatcatgatgcttctccttgatatgattgcaaggtgtgaacgtctactgcttcgcttggttcccagagcaaaggagccacggtgacatgtcgggctctcgactgccattgcgccggccgtggatagaaactggaaatatcgcaatgtttcgatccctgctggtcgagttggcacgctagcggccccaaaagttcaatgtccgcaatacaatcctgttgcctcggaattcccgaagtgcgtcaatgataaagcatcgacggggatggggcctgcgaaaaccatctcggtatgaatttgtcttgcaaagctcagggctcgcccaaaccgagtgctgattgaacttcagctagttaccggctttcatcagtctgaatagatggaggaccaggggatccggcctggcgatctgtgtatttcttcattcgacgatcatgttgtcgatgcaccgtatgacgaccgacctgaagtgagaggtagcggtccgctcaagatactctagcgatcatctcaggacctatcatcgcaacgcgttgtcatcccgtggtcagatgggttcaggcgaaaccggatcatcggcgctcgcctctcgctgctgaaacctttcctccccaacgcacgacttcatgtccggacgacgaaaccagatcgcgcgaccgcatcgtaatggtgctttgccggctgtgaacacaatctgctcgtccgcgcgcatccgcagcacttcgtgcggctggatcaactgcctggaggcaagttgcttcgagcgagttcgtgacgacccgcgcgattgaaaactgcgactgacctggtcgatctcgaccgtggtcgttccgcatcggcgcgagatatagtcggcggtttccgggtcgttgatcgcggcgaacgagatccagctggcgctctcgaaccacttgctggacgcgtcgcgcccgccataggtctcccgcaattgtccgatcgactggtagatcatcgttagcgtgatgccgtacttccgaccggcatcgcgcgccgtctccagcacccgcatgtaaccgagccttgcgacctcatcgaggagaaagagcgcgcggcctttgatcgctccatcccgattgtagatcgcgttgaggaaggagccgatgatgacgcgcgcgaggccggaatgtgtctccaatgtcttgaggtcgatattgatgaagacgtcggtctcgccatcggccagcgcctcggtggagaagcttgaacccgacaccagggcgccgtagttcgcgtagctcagccagtgcgtttccttgatcgcattggcgtaaacgccggagaacgtctccggcgtcatgttgacgaatgcggcgacattctccttgacgaaagccgacgctgaattgtcgtagatctcctgcaggcgtgcgcgaagctttggctctggctccgacagattggtacgaacctgccgcaaagtttggtgcttcgcgtccgtatggccggatagacaaacgtctgatatcatcgcggtcagtagctgtagtccggatgagcggaagaagtcgtcgcggacgccagtcgcgcgaccgctgtcgctcatgatccacgatgcgacggccgcgatatcctcttccttggtgctgccgtgccgaccgatccaatcgagcgcgttgaagccagaaccagcgttcttcgggtcgagtacgatgacgcgccggcccgccttgcgccggtgctccatgaccatcggcgccacctcgctggatgggtcgagcacgacaagcgagccgccccatttgagcgccgttggcactgtgacagacgtcgtcttgaaacctcccgaaccggcgaagacgatcccatgcgatgagccgaacgagccgtcaaaacacaagagcggcgcggagccacccttgccccaggtcgtcggttcgctagctcgaaacgatgtcgccgctggatcgtctcggtcgacacgataacgctcgccgatgacgatgccccccgcttccgcgaaaagcttctccgcctcctgcatcgtcatccagtccgcctcgccgtgcagggcgcgcttgccccgaatgcggcgcggctcacttcgcgaaaaggccgcattgcccatcctggcgacgcgcagggcgaagaacgtgacaagcagtgccgcgcccgctcctgctatggtcgaaggatcggcataggacagaagcgtctttcccgcggggacctggccggcgaatgccagcaggcgcgatccctccctgatcgccgcgacgacgatcacgccgaggccgcccgtggcgacactccaaccggccgtcttgacattgatcaatcccctggttccgaagaggaacaggaggccgcaggcgccagcgagcgcatagggcaatgccagtccgatccgcccgagcattagctttgcctggtccgttgttccgaacgcggcgagccagcgttcgctgccgagaaggaacagcacaattgccggcattgccacggctggaatggcggcgacgaggatccgcttaggcgtcatcggcaaatgccttcgcgccgagttcactcaggcgggttcgttccgcctcgtccgctttgatccgcgcgcctgcatcgatcagaagcccgagcagcagcgcccgtttctcgtaccgcaagcccgccttgacgatcaggccgcccagctcgatcttttcccgcgcgtccttcttgcgggcttcgctcgctgtcatcttatgcattcgctcaagtctccgcagattggcccgcagcctcgccagcgctgttcggctgcgtggtcgcgggcttgcgtccctggacggatttcgctccctcgagaaaccgaccggcgacctcttcgaacgctgagagtaggtcaacctcgtcgagctcgatctcgccgatccccgcacgcagcgcgatacgcccgatgcgctcggcgtcacgtgtctcggcctgcttgagttgctcctgcaggcgagcaatctcttcccggattttggcggttggcttcttcatgggcgccggttcctcgtggctttcagtccgatgaaactgaagcttgccccgaattttccctcgctggaaaggtgcaatgttgcacctcgccaaagcgccagctttcggcgaatgatcccgccgttccgaaggagcggatccaagggcgcaattatacgtcgctgacgcgacgccttgctttcagcccctggcggggccctccgctcccgacgaacagtctgatcgtgttcgatcttaggagctcgttatcgtcgtggcggtcccgcatttctcagtcagcatcgttgctcgcggctccggccgcagcgccgtgctgtcggcggcctaccggcattgcgccaagatggaattcgagcgggaagccaggacgatcgactattcccgcaagcaagggctgctgcatgaggagttcgtcgttcccgaggacgcgccgcaatggctgcgggagatgatcgccgatcgttcggtctcaggtgcctcggagaccttctggaacaaggtcgaggccttcgagaagcgcggcgatgcgcagctcgccaaggatgtgaccatcgcccttccgatggaactcaacgccaatcaaaacatcgcgctggtccgcgatttcgttgagcggcacatcacggccaaaagcatggttgccgactgggtctttcacgatgctcccggcaatccgcatatccatctcatgaccactttgcggccgctgaccgaggacgggttcggcgccaagaaggtcgcggttctcgggccggacggcaatcctctccgtaacgatgccggcaagatcgcctatgagctttgggccggcggagccgaggacttcaacgcctttcgcgatggatggttcgcgctccagaaccagcatttggcgctcgccggtctcgatatccgcatcgatgggcgctccttcgaaaggcaagggatcgagctgacaccgaccatccatctcggcgtcgggaccaaggcgatcgagaggaaagctgagggagcggaggagaaggtcgcgctcgagcggttggaactgcaggaagaacgccgcgcggagaacgcccggcggatccagcgcgatccggagatcgtgctcgacctcatcacccgcgagaaaagcgtcttcgaggaacgcgatgtcgcgaagatcctctatcgctatatcgacgatgcggccgtcttccagaacctgatggcgcggatcctgcggagcccacggacgctccggctcgaacgtgagcatatggatcttgtcaccggcgtcagggcagcggcgaagtacacgacacgggagctgatccgcgttgaatcccagatggtcaatcagtcgatctggctgtcgcggcgatcctctcacgccgtcaagccagcggtccttaacggtgtcttttcccggcatgaccgcctatcggatgagcagaagacggcaatcgaacatgtcactggtcccgagcggatcgccgccgtgatcggccgcgccggcgccggcaagacgacgatgatgaaggcggcgcgcgaagcctgggaggctgccggatatcgggtggtcggcggggcgctcgcgggtaaggcggccgaaggtttggagaaggaagcgggcattgcctcccgtacgctttcggcttgggagctgcgatgggatcagcagcgagaccggcttgatgacaagaccatcttcgtcctcgacgaggccggcatggtctcctcccgacagatggcgcgcttcgtcgaagcggtgacgacatcaggtgcgaagctcgtcctggtcggcgatcccgagcagcttcagccgatcgaggccggggccgccttccgcgccattgccgagcggatcggctatgcggaactcgagacaatctaccgtcagcgcgaacaatggatgcgcgatgcctcgctcgatctggcgcgcggaaacgtctcggccgcgctcgacgcttatgcggatcgcgatatggttcggaccgcctggaccaggggcgaggctatcgcttccctgatcgctgactgggaccgcgaacacgatccggccaaggcgaccctgatcctcgcccatcgccgcgtcgatgtgcggctgttgaacgagatggctcgcggcaagctggtcgagcgaggcgtgatcgaggccggtgatgcgttcaggacgcaagacggcacgaggcacttcgcggccggcgatcagattgtcttcctgaagaatgaaggatcgctgggcgtcaagaacggcatgttggcgcgtgtggtcgaggcccagccagggcgtattgtcgctgaggtcggcattggcggagaccggcgccaggtcgtggtcgagcagcgtttctacaccaatgtcgatcatggttacgccaccacggtccacaagagccagggcgccaccgtcgatcgcgtcaaggtgctggcgtcgagcacgctggaccgacatctctcctatgtcgccatgacccgccaccgcgagacggccgaactctatgtcggcctggaagacttcgcgcaacggcgcggcggcgtgctgatcggtcatggcatggcgccctacgaacacaagccgggcaaccgggacagctactatgtgacgctcggccatgccgatgaccaggagcgcaccatctggggtgtcgatctcgcgcgggcgatgaatgaagcgaaagccgagatcggtgatcgcatcggcctcaagcacgtcggatcccagcgcgtcacgcttccaaatggcaaggaggtcgaccggaattcctggaaggtcgtgccgatcgaggagctggcgatggcaagcctccatgaacggctctcgcgggccggatcgaaggaaacgaccctcgattatcaggacggttcgcactatcgcgcggcgctgcgatttgccgaggcacgtggcctccatctcatgaatgtcgcccgcacgatcgcgcacgaccggctgcaatggaccgtccgtcaatcgtcgaggctcgccgagcttggcgcacgccttgccgccgcgacagtggagcttggccttggcggagccaagtcgagagcatcgacgtcgtccgcaatcaaggaggtagaacccatggtctcaggtacgacgaccttccccagatcgatcgctcaggcggtcgaagacaggctctcggccgaccccgtcctgaaggacagctggtcggcggtatctgctcgcttccattacgtctttgcggatcctcgggccgctttcaaggcggtcaatgtcgatgccatgctgacgaacgggacattggcggcaacgacgcttatgcggattgccgaacggccggaaagctttggcgtgctgaagggcaagaccggcctgtttgccggcagcaccgagaagcaggcgcgcgatacagcactcgtcaacgcgccagcccttgcccgcgatctgcggggcttcatcgcgcaacgggcagacgttgccagccgctatgaggaggaggagcgcgcggtgcgcaccaagctctcgctcgatatccctgccctctccgcgtccgcaaggcaagtgctcgatcgcgtgcgcgatgcgatcgatcgaaacgatatcccagctggtcttgaatttgccctggcggacagacaagtgaaggccgagctcgaagggtttgccaaggcggtgtcggatcgcttcggagaaagaaccttcctgcccctcgcggcaacgaccgcggacgggaaggcgttcgaggcggcgtcggcgggaatgcagccggcccagaagaatgaactacgttccgcctgggacacgatccgtaccgtccagcaactggccgcgcatgaacgcacagcggtggcgctcaagcaggcggaaaccatgcgccaaacccaaacgaaagggttgtcgctgaaatgatgtctcacctgacccctgcctcggcagccggacgccaaaggcgcccggccatcgctctcctcgcggtttcatgcagccttacgctcgcagtaactatcggcggcgtcattggtggccttcggatcaataccacgcccagcgagccgctcggcctttggcgtgtcgcacccctcgatcgcccggttcaggtcggcgacatggtattcgtctgccccccagagaccgacaccatcttggaaggattcgagcgaggctaccttcgctcgggcctgtgcccgggcggctttggccctttgatcaaaacggtgactgcactaggcgggcagcgcatcgagatcgcgggcgccgtcacgatcgatggacggccgattgccaactcgaaccttgtgtctcgtgacggccaagggcgaccgttgcatccatatgaaggcgggacggttccgtccggtttcgtctttctgcattcgccattctccggatcctgggactcgcgatatttcggcccggttccagcctccggtgtcctcgggctcgcaaaggaggtgcttacctatgcgccctgattggctccaaccacttgccctcgttctggcgtctgccgcgatcggttgtatagcttggagcggacatgtgttggcgcttcccgcagctgtagcatttccggcgttgtggtcgatggcacgcagtcgctgcgctgcaggcgtcctatcggcagcctattttctggcagcctcgcgcggcttgccgcaaggtgtggctgccttctatcaatcggatatctggccagggttgatcttgtggcttgtcgcatcgatcggcttcgtcttcgtgcacgcggcgctgtggtcacgccaatccggctgcaaaagagccttgcgatatgcgatcgcgatggtgctcatggccataccgcccttcgggattgtcggatgggctcaaccgatcacctcggcaggcattctttttccaggatggggttgggctgggcttgcggcagtcacagccggtcttgcgttcatgacgacgcgatatagaccggctgcagccgtgaccctcgtaggtttctggctctggtccgccgcatcttggaccgctcccgacatacggtggagctggcaaggcgtcgacctgcagctcggaaataatctcggtcgcaataccagtcttgctcggcatagtgacctggttgcaacgttgcgcttaatgcgtcggccggacgtcgccaccatgctcttgcctgaaagcgctctcgggttctggacgccgtcggtcgaaaacctttggcagcagcagcttaccggcacagatctgaaccttatcgccggcgcggccgtcgtcgatgctgaaggatatgacaacgtgcttgttcgcgtgtcggccaccgaaagcgagatcctttatcgggaacgcatgcccgtgccgggctcgatgtggcaaccttggttgccagtgatcggaagacccggcggagcaagggcacacttttttgcaaatcccgtcgtgtccgtcagcggcaagcgcgtcgctccgctcatctgctatgagcagttgattatttggcccgtcttacagtccatgcttcatgacccggatctcgtcatagccgttggaaacgactggtggaccaaaggaacctccatcactgccattcagcgcgccagcacagaagcctgggcacggctgttcgataaacctctcgtcatgtccttcaacatctgatcctggagcccaaatcatggacccggcctttatcaaggagtgcgccgatccgacgctcaagccagctatcgttgagcagttcgtgtctgcggtcggctcaggcgacccactcgccgtcaccgtcaaatcgggtggccgcctcatcctcattcccaagcccaaaacccccgacgaggcgatgggtatagtccggcagtatgtcggccaggcggtggtccgggtaggactgacgcagcttccggccggtgtgggcgtgaaagatagctccgagatcgcgtccgatctggtcgagccttgtgagaatctccgaaagggatctgcgatgttcgccaagatccttcggatcgtaagaaaatggtatggcaaccccacgagcgcagaggtctttccgcaaatcttcgacgatgcggtctacgcctggaacacaggtcagttcgagggccaaggcgtgtttcaaggcgaggatccggggggcgcagttcccgaggtggacagcaaggcgaagggcgtggaggaagagcctgccgagcccgcgccggcagtaagtgagtccgaaccgccaaacacaagcgatatcgatggggcaagtatcaggatcgatctgtcgaggattggcggtcagagatagcgagcgtttccaatgaatgaccgttaaggcgacgccgggaaagtcagtgctgacgcttctcccggcggaaggaagaacctcttgatgcaggcatcattgcgaacagcgatctgcgtatgggtacgctcgtgaaagcgagcgctatagtagatttcattaccttcggggaatagccctcgaaccgtgtcaaatgccggaagggtggcttccttggcgatctcgtggacatagttgataacggcgcaatccagcttccgcaccagtttgtcggaattcctgtcgcctctggcatcgggattcacaggcatttttccgccagtcgcctcgatctggctcctcagcatacgatagctggtctggatgagagggacgtacttgcgagtaatgaggtcgaggcaattgccaagatcgataattgccccgatcacgaaaggctcttcgtaggcgccagattcagctttttgcgtcgcccattcaagcgcccgctcaggatcgttttcctaaaaatagatgccgaatccgagccagtcataagccttttcactcgggagaacgggtgatgcgccagttagcgcagcaataccgacagccttgtcgcagccgtggtagcccagcgtatgctggataattgaaactcaagcggcggccgcttcctcagcgtcgtcgtcgcgcgcgtactccggagcgagcttgccatcggcagacacaatgccggcgtccatcagatgacggcgcgcgtcatctggagacttggcggcgtcttccgcccgcttttccatgagcgctatgagcgcctccagctggatgtctgtcatcgttaaggccctcctgagctagtttcctaaactttattgcagggactccggcgaaagcgcaaacgccaaccaggcgctgcgccgtattaagtttcctttcgctaagtcgctgcaaacgttcatttcagcgagactttgatgaagcgggaggcttcggttcgcaagacttgcagtgatgacgccgaaattcggtgctcgacctcctctcagaaatgctcgccttgctagaaatgtggatatatgtttcaatttattctcgcgcgatgcaggcggtcaacacggggatattaccttggctcattggcttgacaccttactcgatattaccgccatagcacgcgatcagaacacgctaaaatccgcgctttccgatctagcagaacgcttccaattctccggatatgcctatatcgatcttcgtttcggtcataccctcgcgatatccaattaccatcccgattggcaacaccactatttccataacaattttaagctacttgaccccgttattcagcgggcaaagaagcttcgacgcgctttctcatggtcagcagaaacagatacggcatcgatgtccaagcggcagaaggagttcttcgccaatgccgcggactttaacatccgatcgggaattaccgttccagttgctctgccaaaccgcgggacagccatgctgaccttggcttctagtaagccgcggccggccatcgatggagagatcgatgcagtgatggcggcttccactgtcgcgcaggtccatgctcgcattcaggcgctgcaagtgacaccatcggtcgaggagccctttcatctcactccgaaggaggtgattttcgcacgttggcttgaactcggcaaaacagtgcaagacgtagccgacgtcgaaaacctaaaatacaacaccgtccgaaagacattggaggagttgagagcccgatacgacctttgcaataacacgcagctggtggctttggccatcagacgtggattgatgtgatttgtcttagacattgccgacgacgtagtatcggtcgcggaacgcaacggccatcccgatagtgccgtgttgcagatgggcttcggcatttcgaaagcaggcgcgcacttaccttgacctatcggccacccgatatgatgccgatcgggctgactcgctagatgcgatcgcggtatggctatgaattatcaccttccaaattggccaacgtggtcagcggctgctggatagcttgaacttcgagtttgagcatctttctgaccgtcgctggaggatcgccgaaacgttctcgaaatctgcggatgaagtgcgaggaattctcgaaacctgtcatcagggcaatttccgctaagctcacggcggtggtacgaacgagccgattggcactatcgaggcgcatcgttagataagccgcggagggagaaacccccaatcttgctctgaatgtgcgttcaagctgccgtcgggacaaaccgacatgcgtggcaatgtcctcgatctcaagcagatcctccacatgctgctccatgatcaagagcgccagttcgacccgcttgtcatcggcggcctgtccaagcgggttgcgagtttgcatctccctggcatctcgacgtctgctgatctgaagtatctccaatgcatttctttccgcatattcaccaatatgcctgttcaacaggaacgcggcgagatctgccgcgctgcttccccccgcgcaggtaattatgtctccgtcctccacgaacagttcgtgtgatgagaccgagatttcagggaacctgtcgcgaaattccttgtgatgcagccagctgacacatgcccgcttgcccttcaacaaacccgccgaagccagaacaaagctaccggtgcacaggccaataataggcacgttgtcttcggatgccttttttagatatcgaagggtttcaggatccaacacctcttcttcgttgagacggcctcccacgaccaccagataggtgaaatcattagctggcttcaaaagcgacgttggaacgacctgaacgccagagcttgaggcaatgaaatggctcgtcgaactcatcacggaccaatcacatgcaatccgcccggaattgtctccttggtcacttccgagacgtaaagtgtcaacgaaaagggaaaaggcattcaacgtaaagtttctagccagcaaaaagccgatcttaagtttgaccggcggcttgctactcgttctactttgcgaggtttgatggcggatcatggcgctcccaagatagcacgcatattcttgattttaacgtgggaagcactttcaagctactttgcaacgagagactgtcacccgccacgcgtaagagtccgctcatctgctcgcttgtcagattaagccatttgaagtgcaacgcgatttctttggaaatgtcgaatagtatcgacggccgagagagactagccgatggtcgcaatctcctgctcgaactcgcgcatcccggcatagccttcctgggcgggtatacgacccgtgccgatcattctttccgtacatactttgaagagcttcagatatgcgttgcctttctcgccaagtatgcctcgggaattgtgcagtttcccagacaggatctcggcagacacatgttctgcgatcatcatatgcgcggcatccgccacggaccatccccgcttgatgactaaaaccgctgctagactgtcttgagcaatcagtgttgcaaaaatttcctcggcggcatcatcgaaagccctctcattgggcctcccatttcctcgataccggacacgaaatttctcgatttcggcccaaagaagttgaacctcaggtgaaaacgaagcgtgcttcttccgcttaaagaaaccaaacatgtcacctcccgaattcccctagaagcgaacgtcccaatcacccccaagacctaagctgattcacgtgtgccgtctactcgcacgccaatcgccattggcacgggagcccgtcgcgagagtgcaaggagcagtgccgcccggacgttgcgcgaccgacggcttgcaaggtcgatatcgcgcgtgactacacccattcgataacaagctaatcctcggaacaaacctcggtgaaggcatggccaaccgcctcccgataagtggcgcttggctatctccagttagaacgcttcggtcggctcaatgattggccggtatggagctttcgtcgcaagcggatgacgctggcccggtcacgttcaacagtcggcgccggatcaaggaccgagccgcccagtaaaggaagcctagttctaatccaggccgagcttcttacgaaggtctgcgttttcggcacggagcttctgcgccaacgacttgcgaagcctctgattttcagattcgagcgcaatcagatcagcgagaccggcggctccgacaggagtggaaggttcgaggtttttcttgcctttcgtgaccttgagcgaagctgccttggttgcaaccttttgtgtcggtttcgccacgacgctcacggaggaccccagggacaccgacttggttttcgatgcacgtttggaattcttctcggcgagtgcggcggccatctcttccttgcttcgacggcgcgcacgcgttttcttaggttgttcctgcgacaccgccggctctgcgcttgtcggattttcggaaatttcgtcggccatgaacgtctcctagataattaacagccttgtttgtaccgtacaaagcagagtgtcaacattgtcgtccaccccgcgacggtcttggcgaacgaagagcacgaaggtgggcgggaaaatccatcaaatcgagaacgtttcaagtgccccgtcaagttagctgcgtggaggacaggccatgaaccatcagtttgaacacgaacaggatgccgtgcggctttctctcgatctgctcaaacacaagcatcttcgcgggtatcgcgcattggctccttccgatgtctcccacacggcgtctccttgaaattcgtcgaccccgaagcgcagatcgcaacgccccggggaagctggccgttatgctatctcaatctcggtttggacgggaccagataagcttgagatcgtcctctccctctacgtcggcgagcgttgcgtagattggagcggcgaaactaggatcgtcgagcttgatcgacaggtagtcacggccttggtcggaggtctttttccatgcggctccaaactcaacggcgcctgagtaaatcctgtactgaggtcctttctcggaggggctttcaactcggtcaatgcgtgccttgatgttcattgccagcgtacgaatagagccggtgtagccgctctcggtagcggcaaaagtcccaatcgttgccattcttcgttcctttcaattcttggtgctccggacttcgcgccggcagctgttgaaaagggccatcagaaactagcccgccgatataaggcgcaagggagtacggcgcggcaagtcgcagatctgcgagtagaggtggagcgtgatgcgcgctggtgacattggctcggcgcggatcaggtgcgcgcccagcttaaacacgtttggcgaaacatgttcttggcgtcacgagcagcggcgcgccgcgctactattcgcggacgccctcaagacaagtaacaacatgattgccccttgccgtgtccgcgaagatccgcctccactaaaggcggcgctcgttgacttggcctgcacttatagggccagcgaatgaatcgtcgtaatacgctattggaccggcgccacgcagatgacgacctttcctccgggaacaacgtcaacagcgagaacaaccatgagaaagattcatgccgccatgttggtcgcggtatcgagcctctgcctggctccggcacttcacgccgagacccttgtcgtcaacagctatgggggcccatacgaagacatcatccggcgcgagataattgaaccattcgagcggcaaacgggcatagatgtcgtctacgacgctgtcggcgcggcgtcgcaggactatgccaagatcaaggcaaccaggggccgcccgggttttgatgtcgttgtgatgaccgcctctcaatcgttgcaaggctgtcacgatggcgtgctggaacgacttgatcctgtagccatccctaaccttcgccacgtggcacccaaacttgccggctcggcgggcccttgcggcgctgtccacgagcttcagtacatgtcgctcctgtaccggaccgataagatggcgtcaccgccccggtcgtggtccgcgcttgcatcgccagaactaaaaggcaggatcgtgctgccgacattccagaatatcatggcgctgtatctggtcgagattttcgcgaccatgaacggcggcgatttaacggggaatcttaacccaggcttcaaggcgatgtccgaggttgcaaggcagtctatcggatttgagcagagctcggcaatcttggaaagctatatcaaggacggaacggtctgggccatgccgttctggaacggtcgcgcccaactgttggtggagagtggcttcccggtcgactacgttcgaccgcttgaagggaccattccactgatcgcgacgctcaacattccgatctcggcggaacacaaggcatctgcgaggaagttcatcgatttctttctggacaagaccagtcaggaagcgtgggtgcgtgcttacaaggttggcagcgcacggacagatatcgacgttccagatgaagtgagagcccgacagatcacgacggaagcggaccttgaaagtctgctcttgccggatctctccgttattgccgcacgcctgcgagagtggggagagcaatgggagcgcgacgttgtcgcgcatcaggagtgaggaaggaacatgaccatactcgcacttgatctccccgaccggcgacgcggctcgcgccacagtttcttaccggctttcgggctgtcgcccgccggcctcatgctcgtattcttctttgcaatgcccatggggatgatgatcgggacaagcttccacgatccgtcctcgggcgccctgggcctccaagcttatgaacggttcctaaatgacggcttgacgctgaagggcttttggcgaaccgcgataatgtcatgtctcgtggcggtggccgcgaccgcgctggcatttccactagcctattatctcgcacgtacgaaaagcagatttcgcatcgttgttctagcgctcgcgcttgctccggaactcgcaggggtcgtgctgcgaacctatggatggctcattattctggaagatcgcggcttcatcaatgacatccttctgcactggggtcttattgatcagccgttgcgcttatcgaagaaccttttcgcggtggtggtgggcctcacgcatgtggtccttccttttgcgattctgtcgctcacgacaagcattcaaggcatagatcaaaatctcgaacgagcagctcagatgctcggcgcaaaccggctctcggtcatcacaatgatcctcgtgccattgtcagtgcccggaattgtcagcgcgctcctgttgtcgttcacgatggcggcgagcgcctatgcgacccccgcgcttctcggaggagcaggcttcaaggtcctcgcgaccatgatatccgaacaagtgctcttttacgtggattggtcattcgccgcggtcatggcgaacgcactgctcgttctcatgctcgttgtctcctacgctggcttgaacgtcgagacacgtctgcgcgacaagcgcggtgaaagacacggaggttgaaatgaaccggctgatttccattctcttttggtctgccctcgtgattgttctgacatttatcacgcttccgctgctggtggtcgtggccgcatcgctaagcccaacggccgacgtcaccttcagtccatcggcgtggacgcttcgctggtatcaggacctcgtctcgcagcgatggctggcgccgttcgcgctcagcgtgaaaatcgcgatagcggtgtcgctgataagcggcatcattggtacgctcgccgcttacatcgtggctttcgaacgtatcccaggcggcagcgcggtcatggccgcgcttttgtccccgctttcagttccacaaattgtcaaaggggtcgcgatcgttctgtttctctccatccttggcctgcagcccctgcttggaacgccctccttgatcgcagcccattgcgtgctcgcgcttcctttcgtgattagaatggccgccaccgcgatcgcgaatttcgacggcaaccttgatcgggcgggtcaagtcctaggtgctagtcgctggcagcgggtctggcatattctgcttccggcgattaagccgggtgttctgtccggcatgacgttcgcgttcgttatttccttcaacaacattccattgtccgtgtttctcgtacgtcccggagacacgacgctccccataaccgtgatcaattatctcgaatacagcctcgatccggtcctggcggcggtcaatgtggcgtcgatgatattcatcctcgtcgtcatcctcgcattcgaaaaatttggcggcttctccgcccagcttcatggaggtagcaaatgagcgaacttgatatcgaactggtttgcgtaagcaaggcgtttggcgcgatttcggtcgtcaaggacatcgacctgcagatcccgaaaggcgagttcgtgagcgttctcggaccgtccggttgtggcaagaccacgacgctcaacatgattgccggcttcaaccggccaagccgcggagacatcaaaatacgaggtcgaagtcaggtaaatgtgccaccagaggcgcgaaatatcgggcttgtcttccagaactacgcgctctttcctcatatgaccgtggctgagaatgtcgcattcggcctcaagatgaagcgaacccccaagatcgagatcgcttcaatcgtggaaaagagcctgcgtggcgtacatctcgaaaaactggctgatcgttacccgaaggaactttccggtggacaacagcagcgtgtcgccctcgcccgcgccttggcacccaggccatccgttcttctcctggacgaaccactgtcaaacctcgacctgaaactgcgggaatccatgcgtggcgagctgaaggacatacaacgtgagctcaacatgacctttgtatatgttacccatgatcaggaagaagcgatggcgatgtcagaccgcatcgtggtcatgtcgaacggggtcatcgcccagcaggggaagccggatgcactctatcgacatccagtttcaaccttcgtggcggactttatcggccgatcgaacatcatcggtgttgaacggatggtgaagcgaccgggaggttgcgaggtggcggtcaccggcagccagattacactgagggtggctgtcgcgccctctcatgcaacaccgcactatggcgtcatccgccttgaggatgtgctcgtgttgggggacacgccattcgtggcccaagaacacctcaacgttctggaaggtcgacttgatcgcgtgacgaatctcggggcgtccctggagttgtcaattcagatcggctcgggcctttctctttgcgcggcggtccgatcggcggaagcaggctttctgccggcgacgggcgagccgataaggcttgggatcgatccctcggctgtcacgctcctgaaggagtagcaatcggtcgataaccatcgcttatcaatgcaactgcttctttattggagcacgcgtcaagctcccaaataagatcaggacagcctcaaaaggaggctcatccgcaggagatacgagaatgttgacaagagaaaagataaccgcggtccagcatgacagcaatgtctgcgcggacatcgtgggtttcgacttcgctcgctatgatgagcgcgatatcaacgagatccgcaaatactggctccagtatggggtcattcgtttcaagcatacacgcattacagacgaccagcaggtgaggttctcgcgacacttcggtgaatttgttattcatccaaagcagctgcaggagggtggtcacccgtcccacccagaaattctggtgatcagcaacgcaatgaaggacggaaaaccaagcggcgcgatgggcaacagcgaagcgacctggcacacggatacctggttctatgagaagccgccagcaggcgccatcttgcgcgccataaaaattccgccttcgggcggagatacctacttcctttccacctacattgcatatgagacgctaccggccgcgctaaaggcagccatcgatggccggcagatcttcttccagaacgtttatgacaagaccgggaagatcagactcgggaaagaggagccaagcagccgggactttcgagaatggagcggtattgtccaccctctggtacgaacacacggcgaaacgggacgaaaagccctttaccttggtggcacatcggatggcgcatggattgtcggtatgagcattcatgaaagcaatgccatactcgcggagctgtgggatcacacaacgaacggtagccacgttttcgttcagagctgggacgaaggagacatcatgatgtgggacaaccgctgcaccatgcaccgacgcgattcattcgatccttctttcgtccgcgtcatgcaccgcacgacgacatccggcgaacgcccgatctaagccggacaagagaggttctcggccatggctggactttatcggctctttgagcgccatccacccctgtcatcagagttagttgagctcttgtctctggtcgagacggccacgatcggccacaccgaacatctcgggttcgttggagccggtatcgttccgctattctcggctcgtgtcgccggggtggcggtgaccgtcgcggcgcctggccgcgacggtgccatcatctatcgcgccgtcgaccaacttttgccaggcgatgtattggttatttcccgcgtcgacggcgacgatatcgcatgcgttggtggaggtgtggccactgcagtcaaggccaagggagcggcgggaatcataatagatgggccgtgcaccgacccgcaggagatcattgctactggtctgccggtatggtgcagaggcacgtcttccaaaaccaccaaccggcggttcaacatcggcggatcgctcaacgtcccgatagcttgtggccgaagcgcgatcctaccaggttacgccatcctcgccgactgctgcggtgtcttcgcaactgagcgtcaggccatgcgatcgattgccgagaacgcactcgctcgccagaaacgctccacgctgatccgcgaccatctggccgctggtcattcaatatttgatttcaaggaacctgcacgtgaaaatcgcattgattcagatgagctctcagcctgatcttcgccgcaacctggctgaggtcgaacgcatgatgactgaagcggtcgccggcagtcccgatctcatcgttcttcccgagcattttgattggatgggaggatcttccgacgataagcgcgccgcggccgatttcgtgccgggaggtcaggcgtacgaatgcgtccgagatttcgcgcgaggacaccgcgtctttgttcatgctggcagcctcatggagcgatgctcgcaaagcggcaaggtatttaacacgactgtcattttcgatgctaaaggaagccgtgtcggagcgtatcgcaagatccatctcttcgatatcaccacaccaaatggagcgcggtatgccgaatccacggtcgtcacggcgggagatgatctccttgtctatgagctgaaggggtggaagatcgggtgcgcgatctgctacgatttgcgcttctcacgcctcttcgaccggctagcgcaagaggccgtcgacatcttcattctccccgccgcgttcacacgacagacgggggaagcccattgggaggtcttgtgccgcgcgagggcgatcgagtatcaggccttctttgtcgcatgcggtcaatgtggcagttaccccgccttgaatggcgaacctcgagaaacatttggcacatcgctggttgttgacccttggggcgaggtcattgcaaatgcgggccaaaagccatgcgtccttcatgtcaagcttgaccgaaagcgacttgaagatgtgaaggagctaattcccatggcaagccatcgggtcgacatgaacacgccgcggatgcaggttcggcactccagctgacaatactttccgttcgccggaaaacttcatcaagatttactcctcccttatcccggctcctcctaaccttcttgtacaaccaaggaggtactggagatgcaagaaacccatgctccaaacacgcactcacaattcctttccgcggccgcactgcgtgatgctggcgccgcgttggagaccggtgagatgctcgcggcgatggacaatgcttgggcggatattcgctccggcaaagcgttcggatcaaaggcggttttgtccctcccggaggaagacttctggcgcgatggcgccgttgcacaccgcaaggaggagttcgcggatgaaagactgggttggaagctttcatgcctctacagtgtcaacgagcgctatggaggagtgaaaattattggcgccaatgctttcaaccggcggctgggcctaccgcgctccacctcgacgatcgttctcttggaaaagaagacgttacgggtgcttacggtgatggatggaaccggtatctctgctcgccgcacgggcacctatgccaccatggtgctggatgctttttgccgccgagacaaaccgttgtcggttctgcttttcggaacaggccccacggcccgcgccgtggtggaatgtctcagcttccgatatgccgaccgcatcggcaaattctcaattcagggccgatcgattgaccgggcatcgcagtttatcgatgcgatcgattttccaaatagcctgagccttcagccagccgagaaaaaatcactggctgaaagtgatttcattatcaccgcgacaaacgctcgtgccccgatttttgatagggacgagttggcccgtgacgccgtcagcctgcatcttggcggggacgaggttcccgagagctacctgcggcgggtgttgcggacgggcttggtcgtctgcgacgaccttcgtactgtatcgcatcggaactcgcaaagcattgcactgcatttttcccggcgtggtctctcactggcggaagtggggccgctcctggggcttcaagacctgacgacaacaggagcgacagccgctcggcacgagggacctatttgtgtcacatgtgtcggactaccaatgctggatctctacgcggcacaggctacctacgagaaatatcgccggctcacagcatcggatcgaaggtagccagcgatgttcatatcccaattgcttggcaaacacatagcggacgtcgcccggcgaggaccaccgtcaggcacaagcgacaccgtacttcgtctcgtgctcgacgccgtgggggcaggagcggccggcgcgatctgcgccgggccccgtgccgcgcgccgttccgttttaccaatctttggattgggcgacgcgccaatctggttttgcggcacgggctcgagcgtgtcgggagccgtacactgtaatgtcgccgcgtgttgtgcgcttgatgtcgatgatggccaccgagccgcgcgcggtcatccgggcgcggcggtcgtcgcgacagctctcgcgcttgcacagttgcatgatcgcccagccgatcggttcttggctgcgatcgtcgcaggctacgacgtcggcgtaagaattgcggcggcacaaaaccccatcgggattaccacgcgacaatcaggccgatgggcgagtctcgcgtccgctgcaacggcggccgcattcttgggacatcggccagaagtgattgcgcgggctctgtcgatcgcgggcgtgctcgcacccaatcagcaggccaatggtagctccggctactcgtcgcttactggaaacgatgtaaaggaaggcatagcatggagcagtgtcacgggattgatggcgctggaactggcctctaacgggcatactggccctgaggatttcctcgatcatccgagcttctacgacggtgagaggatcctgttcgatctgggaagtcgatgggaagtgaacggcctgtatttgaaaccgtatgcctgttgtcgctacattcatccagcactcgacaggctttgcgacctgatcgagcagaacaatatcctcgttgatgacgttcgctctattgaagtcgcgaccttcgcctgggcaacaaaacttggcaatcgaaccaatcctgacaatctgatcgaggtgcagtacagccttccctattgccttgcggtggcaatcgtcgatgggcccaaggcgctgctccctccgcgtactgattgtctcggtcgccccgacatcgaagctgtcgcgaagagagtgaaaatattcgtacgtgacgatatcgacgctctcttcccgtctgagacattggcaatcgtcagtgtcgtgaccagcacaactcgcgtgacatccgcacttggaactccttttggcgatccgcgctgtcccatgctttggccagatgtcgaaaggaaaattcgtgtcctaacgcgagacgttcttgccgcccaacaacaaggagaaatcatcgacgccgtgcttgcgcttgcatcaggagaaatctcaccgctgctcagtgcgctaaagtcgatctctctcgacgaggacgctcaacaacacttgtgacgacatatcagcctcggtttacgacgatcgcgcggaaattacgtccgccgtgagcgaatcgaagtctactcgggaataaactcgccgatcccgccaaggcacaacttgccttattgcgaggtggggcgacccagcgccactccggcgccgggttgccccgttgagtcacgagtatggggattggcaaaccgcgcggacgcccgcgcgagggacatacgtgttgtcgctggctcgataagtcttatagcgcgacgcgcaccattcgtagtgacgagaactgacccgcgcggggcggttggcattattgacggcgccactgatcagagccccggcgccaaaagccgcgagcgggtaccaccagccatcggaatgacggcggtagccccggcgatggtcgcgataaccgcagtggccgtgataccagccctcgcggtgatcccagcgacgatactgaatttggtcgacattggcggtgacctgccttgccgtcgtcggcgcctgaacttatccgataacctacatcacgattgaggtgcgggacttcacttccagcggacagccgtcgctcgggattgaagcgccagacaggatgcggtaaggcactctttccaagtgtcgtgaataaacttcatcgtcgccgcgactttcatgtcagcgatccataatcgcggtgatgggctttggcgttcatcgagctggagggaatgcggcatccgcaccaatcgattgctgaaacggagcatcctgcgttgagaagaccaacacgccagttcaccgtcgaggtcaggtcgtcaaatcgtcgatcgtccctcaaaccaacctcaatatggggtgacattgacctgaaggcgctggtccgtgaggccgaggctgaaatcgcacttgataggagcccggtcccaacgccagtggatcccccggtagaggtagccctggaagagacggtggcgcctcctctccccgtcgatgacaatcacgaacaaaacgaggttggacctgaagtttcaagtgcaggggttgccaaccagatcgacgtcgctctgcccgtgcaggtcgtcgacgccggcgaagaggcgacccagcaggcggcacggccccgcaaaatcaagcctcggcgacgtccggctcgaacggtcgaatctgtgcccgctgttgtccctgtcgatcagactgatgttgaccggctgctggccgaaaatcatgagctcaaattgctactccgccagaagctattgcgagacaacgctttattgcgagacatgttggatcggaactaagcctggcaccagcgctctcgttcttcggcgagataacctgttttttgtccacgtggccgggattgccatgccttcgtcgcagccgatcactcgacgatcgggctaactttcttttgacgaagatagggggtcgtagaaggctcgcgagatgtcatcgactggctgatcgcggagggcaccgccagccgagaccgaccgtcaatcgatggctcgaaagctttcctaccactacgtacgtaccctcaatgcccgctcagttctgtcggcgatctgtgtaacggcgtaggcgatcaccatgtagatcacgacggcgaccaggaaggcttcgaggtagtagaagttcaaagcggcggttagctgcgactgagcgaagatatcgacgacctcaatggcgaagccgagcgacagggccttcatgatcaccatgaaggaattggcgagatcggggatcgccgcgacgatgacctgcggcagcatcacacgacggaagagctggctcctcttgtagcccagcgaataggcggcgtccgcctggccggtatcgaacgagttcaacgcccccttgacgacctccgcctggaaggccgcgacgcacgccgtcagcgccacgatcagcgttacccagttcggcgtcgagtggccgttgtagtcgatgcccgcaagtgcggcgagggcgtgcagggtcgatggaaggccgtaataggcgaggaagatgacgatcaccatcggcacgcccttgaaggcgaccttataggcaacgacgagctggcgaagcaccgggatcttccggtactcaaccatggcaaacaggctgccaacgatcgtcgaaagcacgaagattgcgagcgccatcgccagcgtgagcggcaccgcgcccaggatttcgtggagatcgggaagaagaacttcgctgtcgaacatgatagtttccttccctgatcagacgctggccatcagcggcgcgctgacggtcttgtcgttcgaagcatatttccccgagcggcgctcgaagaagcgcacgatcgcccacgcaacgaggcacagcaccgaatagagcaccgcgagcacgagataggtctcgaactggtattggttgtagtcgcgttccatcaccagatgggccgtcgccatcacgtccgccgcgccgatatacatgaccagcgccacgttatggatcaggtagatgatcgcgtttccatagccgggaagggcgatatggagggcctggggcgcgacgacgcgtagcagcttccgccggaacgtatagccgaggctgtcggccgcatcgtgctgtccgcgctcgaccgagagataggcgggacgcatgacctccgagaggtaaccgccgtgatagaggctgaggccgagcatggccgcaatcgtcggcgagacgaagtcttcgatgccaaagacaccaacaagcaccggaaggccatagaaggcgacgaacagctgaagaacaacgggaacgctgcgggcgtaggatacgtaaagatccgccagctggctgatcaccggaatcctgcgcacccgtaacgctgttgtgatcaaagccagcacgaagccggcgaccatggccgtgaacgtgatcgcaagcgtcagcggcaatgccgagagcagctcggggatcattatggaaaggtccacttcggaacactccttctttcagtctggggcccggtcgccggcttcaaaagcccggcgttacttcatgtacgtggtgatgtcttcgccgaaccacttccgcgagagcttggccagcgtgccgtcagccttgagttccttcaaggccttgtcgatgccatcggacagcgccttgttttcctcggagcggtggatgagcacgaaggtctggttgatcgcgacaggctcgctcgcctgcactttgagcttctgctcgtcgatgacggtctgctcgccgaggttcgacggcagaacgagcgcgtcatacttgccgttctcgacttccttcaggcggtcggggtagggaatgccggcgctcgaagcggtgacctcgatcttgtagtcggggttcttttcctgccatgcggtcgcgaacttgtagatgccgccgccggcggtcaccggcacgatcttcttgccgacgagatccttcatttccttgatgccgctgtccttgcggctgtagattttgatcaggctggcgccgatcggcgcttccggaatgaggaactgcttttcgcgcgccggagcgcggtagtagccgcccgtggcgatgtcgtacttgccggtcgcaaggccggtttcctgggcgatgtcggcagcgccttccatcacgaacttgtactgcggcagcttggcgttgatcgccttcagcacgtcgggctcgtagccctgcggctcgacgccgatagcgccccaggacagcggcttggattcggccgatgtggcgatcttgatggtgcggacgtcttcggcgaacgaagcggttgcgaatgcgatcgcgacgcctgcgacggcgagaccgagaccacggcgagagattgaactcatggaagtcatttcaggcatcctttctttactggatcgtacgttcggaattgaggaactgtgcgaggcgcgggttggaaggcgtatcgaagatttcggaggggctaccatcggccgcgacgacacccccgtccatgaaaacgatgcggttcgagatgttcttggcgaaatgcatctcgtgggtgacgagcagcgaggtgatgccggacgatgtgacgtccttgatcaccttcaggacctcgttgacgagttcgggatcgagcgaggaggtcggctcgtcgaacagcatgacatcgggcttgaccgcgagtgctctggcaatgcccgttctctgcaactggccgccggaaagctgggacggatagttgtcgagcttgttcgacagcccgacccgctcaagctcctgcagcgcgatcgcacgggcctcgtccttcgacttgccctggacgacgaccagcggatccatgacgttctggataacagtcatgttcttgaaaacgttgaactgctggaacaccatcgccgtgcgcaggcggatcgcctggacggcggccttgtcgggacgcgcgaaatccatcttgatgtcatcgaaggcgatggttccggatgccggcttcgccaggtgattgatgcacttcagcagcgtcgtcttgccggtgccgcttgggccgataatcgacaccacgtcgcctcttttcacggagagatcgacgccgttcaggatctgggtggtcccgtaggacagcttcaggttcttgatctcgagcattgcgggtctcagttcctctggaaagatggttcggaatgcgcttcggcaccgtcgtcggcccattcgtcgccgaggagttccggcgtgtcgaaggcttgcaggttggcgaaatgcgcttcgcggtcctcgacgaagagcgaccgaacgatgccgcgcgccagacggtcggcaccttcgctgatcgccggaatgtcgccggtaaccttgccgtggcttagcgtcgccgggaaattgaagcagtggattttagacagcgtcgggcaggaacccggccgtttttcgagaaactcgaacgcgccaccgagatccggcgagccctcgagctcaccattcgccatgcccgccggcgtcgggaagcgatcgcgccacagccggatatgcggttcgaagcttgccagttccggccggttggtcaggtcgatcttgaaaccggttccgaagatcaggaaatcgacgggatagctgccgcgcggcgtggtgacgacgatatggtcaccttcctgacgcagggcgctgatcgggctttcgagatgaagatgcgcctgctcgaaggcgctgacgcgcagcacgctcgggcgcggcggcggcgtctgctcgctcatggcatagttcaggaaacgccacttccattcgtccggtagcccggcaaagccatgaaccacgccctggctgccgataccggtgaacttgttgatggcgggaagcttgctgcggcgcacgaacatgtcgagacgggcggcacccgcctccagcgcgcttgccgcgttgtccatggccgaggcaccggccccgatcacgcccacgcgcttgccgcgcagtgcgccgaagtcgacttcgtcagccgtatgcgcccaaaacttgcgatcgatactcttggcgatgtccggcacgaacggaccgccgagcccatcgcgccccgttgccagcacgacatggcgggcaacgatcgtctccttggcgctgccctcaaggcacgtgatatcgagcataccgtcttcacgcgggaggatgctgtcgacagagacgccgttgcgcaccggcagctcgagcactttcctgtaccagatcagatagtccatccagatctcgcgcggcgcgcgatcgagcgcgacccatgcctcgcggccgaagcgcgcttcgtaataggcccgaaatgtgagcgccggcaggcccatcgccggcccggtaagctgctttggcgaacgcagggttcgcatgcgtgcaaaggtgacccacggcccttcctgccccgccgccgccttgtcgagcacgacgtgattggcgacaccgaggcgcttcaacatgccggaggcgacaagccctgccatcccgccgccgatgacgacgacatcgacgactggccgaccattgacgtcgcgcgtgggaacccaggatttcgccggcaattcgagccatgagagatcctgacgcaggcgctcctctaaagctgtgatattgtcgggatgtgcggaaaggtcgctcatacgggcgttccctctgaaataatagtttggccgtagacactgtcggccagcgcgtcggtgccgttcgcctccaaaagacggcagccgggcattgcaagcgactgcacccgcgcggcatcgataacggcggagaccgtcggcgtcagcggcagcgccgcggcggagatcgcaccgaacaggaacggaatgtgctgatcgagccggcgcatgacgacgccatccagcggcatgccgcagacagttgccggctccacgatggcgacgcccaatccggcgcgcacaagcgacagcgccgtcagcgacgcattgacgtcgatgatccgctcgggcgcgacgccggcgcgctcaagcgcttcgtcgacgcggtggcgcaggcggtatgggttggcaagcgtgatcagccgacgatcggcgatatcagacaggcgaacgatgtcgccgctcgcaagcggatcgtcggcgccgatggcaacgacacagggcgcttcagcgatccagtgtatctcgaggccgggatgctcgagcggaaggctcgatatgccgagatcggccgagcgagcgatcacggcctgaaccacattttcggccgcgagcgactggacgtgcaaatgacgggggatgaggtcggcgggcagggcggccagcgcctgtggaaggatgcctgccgcaagcgacggcgttgccgccacggtcagcgtcgccggctcgtcacggccgatagcctcggcgcgctcgcgtatatggatgaggctggcaagatgacgttcgacctcggcgtgaaagcgcaggccgcgcgccgtcggctggatgcgcccgctgcttcgatgcagcagcgcgtagccgagctcggcctccagatcctggatcagccggctgacggctggctgcgaccgcccgagcagacgcgccgctccggtcacggagcccgcggacatcacggccgcaaaggcttcaagctggcgaatgtcaattgagttgctatgcatacttaacatcaaccactatctgtcatgcattaaaagcatgagttttctataaatgcacccgagaatagataattattttgcatgacatcaaggggctcatgctaatttgacatgactggcagcccgatctaactggcgctctccagcggattgcaaaggagcctcttttgacactcatagaaacgcttgccgacgtaaaacctggctcggcgctcgccgaggcaatggagaagcgcgcggagatcctgcgtctcagcgaggccgcgcacgatgccgtccttctgccacgtgatcccggcggactgtcgcatggcttgcgtgcggcacttgccgcgcgcatggcgcggcacaacggcaacgaagcgcttgccgaccactatgatgaactggtgaaacgcgccgcggaaaacgaaaccgtattgctcgcgcagcccggcaccaatgtcggcgatccccgtaccgccgagatcgtccgccacgccgaccgcctgaccgtggcaccgcgcgaggccacgcgcggccatatcgaagcattgcgaagcgcgggcattaccgacgccgacatcgtccgcctgtcggagcttgccgccttcgtgaattatcaagtgcgcgtcatcgcgggcctgacactgattggagcaagaaaatgagcgagacggtccacagcttcaccacaacggttcctcgctggcagccttatgtcgttcctgttgatcttgagaccgcgaccgaggagcagcgcgaggccatgcaggtcacgccttcgaacaagggcatatcgacctatgtgttgacgctcgcgcacgatcctgaatcgcttgccgttcgctcgcccttgttcaatctgatcatgtacggcaaggacgggctttcgctcggcgagcgcgaactgggcgccaccgccgcatccgtcgtcaaccgctgcgtctactgcgccgccgtccacgcgtcgcgcttcataaattacaccaagcgcaccgacgtcatcgacaccatcttcgccgacgaactcgacgccgaactcgacgagcacctgcaggcgatcttcgacttctcggcgcatctgtcgacgacgccgccaaaggcgacgcaagccgatgcgcaggatctggccgacgtcggcctgtccgagcttgaatccctggacctggtcctgtcgtcggcgatcttcggctgggcgaatagactgatgcataccctgggcgagcccttaagggactaagtcaggctcaagggtgcgcgccctcccaagcggatccacggagggcgcggtatcctgacggtaactcgaggaagagaaccatcgaaggtggaattcggctcaggtcgttgacggaatactcgacgaaagtttcaggctagcctaccatcgcatgttcagatcgattgaggctgctgtcgccgttcatggcggccgaggatgacgccgttgcgaacgacaattctgcctttcttgatcacatgtcttacccttgagagattgtgcccttcaacgatcgcgatatcggcgagccgtccaggcacaatcaatcctctatcggaggcaagttctggaagggcgcgggaaacgttcccggtggccagggcgacggcacgcgcaaggctcgaatggccgagccgcaccattcgattcaccgcatcaagaataggatcccagtcgccaccggcaaaatcggtcgacaaggtatcgacaagtccttccgaaacgagagcatcgagattcgtcggctgattgcgccagcgcgtggagacgcaatcaagcgtcgacacatcgattgttaccccaattgagcgaaggcttctcgccgtggacacacattcgtcaggctcgaatgacggatgattgctgtgagccgcgatcattcgcgccctgggatgagtgacagccaggcctatcagcgtttccgccgtcggcgtcgcattgtggaatatcgctggcaacccaagtcgactggaggcttcggcgatctccgcgagaccccgcaatgaagccgacacaggcggcatgacagtggcgcggatgagtgcagcgagcgctgaagcatcgatcacggggtgaagcatcgaaccaagcaatagatcatccaaggccttgagatcggtgacggtttggtcgagtttgcggccaacaaccgcctcttttagcgcgcgtgcaagatttggatgaatgcgtatggccgtcgcttcgtgaatagcgtcgggaatgaaccggtaatcctgggcgccaccgccgagcgtctggccaccgcccgcctcgcccaaggccttcgcaccggccttgatcatggcttcaatcgtcatcttgtggtggcgttcacccaggcccgcgccatcgatggcgatcgcggccgcgagattggcgggagtatgagctgtcgagaccgccacctccaggggatgatcaattggcgccgtcgcgatctcatcggtcagtggaagcccgcacacattgagaagcgtggtcgtgcccgagaggagatgtcggttgagatggtattcgatatcacttggcgcgaaagggcttgatccactaggcatggtgggtcccaacgtgcatccatgagcatggccgttgatgatacccggcaggatcgtgcaaccagtggcgtcgatgacccgcgcgctagtgggataatcgatgacgcccgcgataacgtccacgatcgcttggccggcgatcagaacgtttccagtctcaatctcggttacaccgtcgcccgtgacgatacgtccgttgacgatcatcgtgtccagcctttgcttgatcatgatgcttcacctccatctggggtaccggccagcccgtaaccgagaccacgcaccgagcggatcggattgccatgaaaccccggtccgagcagcctgcgcaacgtggcgatgtgaacattgacggttcgtgggtccacgaagacattgcttggccagcatctggcaatgatttcgcgcctagagaacacgcgccccggatgacgcaggaagatgtccaggatcatgaactcgatgcgaggaagctcaaccatcgccccgtcatgccaaacccgccaaagagctggatcgagcgagattccgccatgtgaaagtcgcacctgtcttcgttgcggcgccaaggcaaacgcgatctggcgtgcggcgctggacgcggtgaacacgcggttggcaccagcgtctcgataggttcgacgctggctaccacccagccgagcaaccacgacaaccaactgaaggcgacttgaggtccggctgtcacgaatttcccggcaggccgtaagcgaggcaggtaggcgggcgtcaatcagcacgccgtcgacatcaagccgcctcacggcggccacggtttctcgcgcggttcgacgaaagaccgtgttcaaacccgatcgctcgaggacctggacgaccgctgaaaatacgccaggctcccgcgatccgataattattatcggtcgcatggtggtatttgctcaaatgttgttcagatggccaaagatctcacgaggtcgaacggggttcaatcgctctttgcaaccgggggattaagaattgtatcggtgtcacgaaggtatgttggattgaagaggcccttcccgcgtgttgccccgctcttgaatgcggtgcattggtcgggatccgggatctaatcgcttgcttttcccatcggctggggctcccgctcccgcgaaaaagcctccgtgggaggtacggaggctttttcccgacgccggttgtcggctggacgtccggatagcaccggcgtccatttcgccaaccagcgacaatcaagaaggttccgcgattaacttttccgtcgttgccggaccaatcgcgtccaggcgtggtgggaaggcggtgcccagataatgagcggtggggcgcgtctgatcccctcttttttcatccttggcaactcgaatgagtggccgtcagactgatagcgcgcctggatgaatacacgcctatcttgattggtgtttgaacaccgctcagtgcacgatcgttcgcggaccagatcacggagagatcaacgatgtgcaaaagcccagacccgaccgaacgcctcttcccgcacgatgtccggggcaccgagaatggaaggtccaaaccctcttcatgtgccgaatgccgcctgtcgaggttaggctgccctgggagccggcaggccaagatactggcgctcgaggaacgcgagggcggcgcgcgtcacggataacccgggagtacgcaccattaccatcaaatctgagagttggcgccagccgccgcgagtgcaactataggtacagcgccggtcgccgggaccggcgtatgcaccgactggaagccacattggatgacgcctcctcaagcgccggcccgcgggccggtgtcgccatgctatccttggaacactcagcaccagatgacaatctggtctcagccattcgagccatgtcgctcgatgcttttcacgtgtcctcgatcctcaagctcagacgcctgctgatctcgactcgcgttgatctggtgatcatcgttgcgtcaggcgacgccgaggctggtatccgactgtgcgggcaagttcgcgcgacgagcgacattccattgatcatcattcttccggggaaccgggaagatatgatcgagatggcattcgatatcggggtcgacgactgtttttccgcctctctcgccatgtcgcaatgtcaggcgcggatcagggcgcttttgcggcgcgccgcctatgctctcggtcatcgagccgaccccacggtcattcgttttggcgagttcatccttcatcctcgagagcgggtcctgagggacctgaagggaacaaccatcgatctcacctcgacggagttcgagctgatgttgaccttctgtcgaaaccctggacgcgtcatgacgcgggaggagctgctttcgctcacacacaccgggctcgcggggccggtcacacgcacgatcgacgtgcatgtcagccggctgaggcaaaagctcgaaccgcgaagtaacagtccgacactgctcaagacggtccgacttggaggatacatactggtcgtcgacgtcacatcggactaacgcaacgcctcgccctggatttgttaagttttgttgcggcttcgcgcacgtgttgaagctcaagctagccgacgatattcatatcaaaatggatatatttagccggagaagctatcaatggcacggtcgaacgtgccggctggcgatatttttccagctcgctcgacggtgtccggtcacagcgtcctaacttgggagagatggatgagttcaagggccttacttgcaggtgtcatcgactgtgccttctcgatcgggtccgaacccgcgcttcaaaaggccattgggcgtgtcgccaagcgcaatgggtatgacagttttgcctatctcagcctgcgcgcggcaaccgcgcaaaatttcgcgatctcgaactacgcggccgagtggcagtcgctctatttcgatcgctcctacatgatcgttgatcccatcatcacgatgggaaagcgcttgatgcggatttttagatggtctgtcgacgccgagcgcaaactcgccaacgccgatcagcggggtttttgggaccaggcatccgactttgggattcgaaacggtctgacaatcccgatcacaacgggatacggccaggtcgccatgctgacattcgcgacgtcgtcgaaaggaccgccacatgatgtcgtggcctccgacattgccctggccgcgacggcggtggccttcctgcaccagcgctttaggaattcctcgaacccaacaatgatgcgcaaacccggccttacggatcgcgaagcactttgtgcgcgatgggcgtcgactggaatgccaatgcatgaaatctccgcgataactgggtactcattccacactgtcaggtttgacctcgataacgtcagggcaaaactgggagtcaggaacctgcaggaggcactctgcgtcgcaatagcaatgcgtctgatctgatcatacgcagtgttctcgcacgtcttgatggttcgccgcaacgtgggcgaaccatcggtctaggctaggcggcttggcggctggttggtgaaagccgtgaacgataagacaccggtcgcaacaggtcgaacgtatcggtattgatcacaaggcgaccggctatgctatttgtctcgtttatcaagcggggttttcccagtcttgtgatcggccaaccgcgctgcctcagcagacgctccatgcgaagatcggtggccgtcacaaggtctgtccaaccgttttggagacaccactcgataatcccggcaagcaggcaaaatgtggcctcgtgcgttgctccacgctggctagattgcgtggtcgtgtccacgcagaagcgcgagctttcgatcgtcgtcggactggtggcgaggtgcccgtcctccagcaattgccgaaacacccccatcaacatgttcggaccactcgtcggaagcaggcgaaccgatccaaccacccctgcccggtcatcaaggacaaggatataggtcggcccgcagtcgtcgaactgatcgaactcgcggccatgctgacactcgacatcccagccaagtcgcccttggaaaaccttcgcccgcaaccggtgcatttcgtcaagcagtgcctcttcggcggatgtccgcggcacgcgaatatctatgacttccatgtcgtcactctcccttgttgaacagggacagagtgatggccttcgatactcgcttccagtcgcacatctgtgggtcgaccctctctcggtttccgcgagagcggctgtcccgataggaaaccagatgtaggtgctagtcggcggacggacatcgacgaaaattggaattactcgcgaaaactcaggaacccgcgacgactgacacgtcaatcgcccaccttcagtttgcaacgtccctggagtcgatgacccgggcgtccgcgacgcttttactgatctctggagtgccgcccgacatcgcttggccgaaaaaataaagaacaccgcagaggaatacgacgagggcaatgaccgatatattcaccgtgaagggaatggtggacgtccctgggctcttgctcatggcgaaactccttgtcgttggctatggatgaaacggacatgaaaggcccgctgttcccgatcccggaccttggtctgaccgctttccgacggacatacggttaaaggccaggcaatcggctctaaaatcggactttacccaggctcaggtcccacggtgagcggcggccatcatggggccgttggtggtgtcggtcgctggaccggcgatgatccggcgccgagcgaggtcatcacttatgttgagcccgagcatcgaccgcccgctcgggtcaaggaaaagatagtcgtcgcccaagcgctgccggcgaccgtgaggggtgctcctacgcctggcggccaatctctccccaatgagagcaatcaacaacaagcacaccggaatgcagaggcattggacggtggtcctccaaaaggcaacaggcgccggggtgagccggcgcccgcgatcattcggctagaggcaatgcctccgcgccgaatgccactactgaatgacctggactaccttgcgggtctgcggttcgacgatgacacgctcctgacccatgatgacgtaaccatacttcggattgtcgggaaccggcgtcacgacaacatcagagggcagcgccacgccgaccttgacccgctcctgaaccaccaccggctgttccggcaccggcgcctgctgtacgtaggtaacgacttcggccggcggaggatcaatcgcggctccagcaacgccaccgacgatcgcgccgacaccggccccaacgggaccaccaacgatggcacccgtggcggcgccgccaacggctccggtgaccgcgccatcggcgtaggccgaagcagcgacgcagctcattgctgccgcaagaataatgcgtttcatttccattctccttctctcatttagtgcatgaaaaaggcgatcgcgcggtatttgttccgcatatcggacttaggtcgggggtgtcgtcgtaggtacgcggcacgcggtcaccagcgcactttgagaggcgcgagagcgccgaactgatcgataagaattcctcagcggtcggacgcaggacgatttcgttggtattgacgacatcacccgcacgatcgccatgtcgtggaagtgctgaacgtcgtccccagtgcttattgccctgcggcgatgctcgagtcgcttgcgatcgcgccaggcttgattgacggcgcaccgcgctgcggacgtcagcgaaggccttccgcgaccgcgctcactgccaacgcagtgacggagtggagaatgccgcagtgcggatgggaatgccaaccaacgagttttgactcactttcgcgaacgtcaaaagtctttcgctcgggctttcgaccatcagccgttggtgccatgcgctccaccggtgtcgcccctaaccccgataattgcctgggaaaataatgtcctgatcgacgagcacattgaaccggtaaccgggcctgatcttgatggtcggctggacgttcagatttttcgagattgtctgctcggcgacacgtccaaacgtttcggcaaaattccgacgcgccgcgtccgaggccgtgtaccgcgtggaaagggtcgagctctcgggcatcgacatgtcgatccccgtcccgatcagcgcgaccagcgcggccgaaccaaaggtcctgacatagtggttatcgaccttgtcgttgaaaccgccgtagccctgcgagtctatcccagccatgccgccgatctgcagggtcgagccatttgggaagatgatgtcggtccagacgacgagaacgcggttctgcccgaatgacaccttgctgtcgtatcggccaagaagcttcgtgccctgtggcatgagcgtgtagtggccagtcgcgctgtcatagacgttctggctgatctgcgccgtgatgcggcccggcaagtcggaattgatgcccgtgaatagcgtggcaggtatcaccgatccacgtttgagctcgtatggtgaacgctgaggcacgacctggttgggcaaatagccgagatccttgatatcagcgttgaagaactcttccttggatgtttgcccattttgatcgacctgacctgcagcacccgccttcaacactgcggcatagagatcctgcgcgccgctcgacgcggtgttcgattgacgcgctccagcagattgagcgaccggcgattgtgccgagacatctgacatgtcgaccttgagcggcgagtcgagagccgcccccctcgcctgcaggctggccatgcgctgacgttgctgctcgcgaaaaatctgttctcgctgttcgcggagcatcctggcgttccactcctcgtccgattccatgcgagaccgactaggctgccgtggttcgacctttgcttctgcttctaccggacgagtagctttctgctgctgcgggacaggggtgggctgaaacaccggctgctgttcctcgcggtcgccgataatgccatccttgacaccccgcttcagctggtcggcgaaggtcgaggccggggtgccggatccgccagcgttcggatcgtgctgaccaaacctcagcccacgcgaggaaaggccgtagaccagaacggcgaggaacagaaccaagatgccgatgccgacaaacagaggcacgcggttgagccgcttcatccccttctcgtcagcagactgatttgatgttcccagttgcagcgattggaccatgatcgtctcctcctgtcagtttcgcttcatgagggaaagcgggcttgccggcgtcgccacgccattgctgaccgagtaagcttggccgagctccatcgtgtcagtcgaaagcctcgccaacacctgtccgtctacaacggcgatcgaataggccagctcgagcggcttcgccccatcctttgcgcctgtgctcttttgatcggtgacaatggcaaagccccagcctttcaacgcggcctcgagtgcgactgagaattcggacgtgtccttttgcagtttaatcggcgtggacgtcgatctggtttgctcggcgaaacgtcctgccatgtcgccagcgatagcgcccgcggcaggtccggtaatgtcagcgggtgcagcgctggtagacagcccatcggttgccgtctggcatccggccaggccgagcgcgattacaatcgtaatgaggcgatggagctgcatggttcaccctctccgccggatcgtgatcttctgctgtttccagccgacccctgatatcaggatcgccttgtcgatattgtagtcgacgatcatcatgtcgttcttcatccggtaattgacgatacggttctggccacccgagacgacgaacagcaccggggcgtcctgacctgagattgcgcggggaaactgaatgtaggtcttctgcccatcggaatagacccgcttggggcgccatggagcgcttccgctcagggcataggagaaggccagctgttcgggggcgacaccgccctccggtccagtcatggcctggaggcgggcgttgatgtcggatagtttcgtggcggcatcctcgggatattcgaacccgacacgggccatgtattgcatgggatgtgacttcagctggatatggtaggttcggcgcgaagtggtcaccaccatggacgtgacaagccccggctctgcaggcttgacaatcaggtggatggcctgaccaccggcggcgccagacgttgccggttcgactttccaccgaacggtatcgccgaccagcacgtcgcggacgatttcgccgccctgcagctcaatatcgcagacctgaaggggtgagcagacgacagacggctgcgtctcaccgaagaggaaaatcaccttaccatcaggccctcgtgtcaccagcccggcctgccctcgccatttgccggagaggttcgtcccctttgcctcgttgcccgtcaagctttgcgcgatcgcggtggatgagacttcggccgatacggcgagcaccagcatgcagacaagcgccacgcgtttacgttttttcctcattgctgatcctgccctcaaagttgcgcggtccagtcgaaatcggtcacatagacgccgatcggattgagccggattgttgcttcgtcttgtggtgaggtgatagagacggtggcgatccctcggaagcgccgggtcgcgacctccttacctttccgatcgcgctcatactcggtccagtcgatctgataggtctggttcgaaagggcgacgatgttgttcacttcgatcgccactgtcgcgttgaccgccttttcgaacggcgagttgccgcgaaaccaggcgttgaccttttgcgtcgaagcgtcactcgtcctcagcagcgcataggtgcggtcgatatattgcttctggacaaccgcatccggcgtgatcgaacggaagctggtcacgaaattgccgagcgttgctcggacgaccctggtgtcggcatattcgatctgctgcgggaagccgccagaaaccgtgttcccaagtttgtcgacctcgacgatataaggaacgagcttgacctgagtgctgagataaagcgcgtagctgacgccgataacggccaatcccaggctcgagatgccaacggcccgccaggcggaggccgccttgacgtaggagccgtaacgttccgaccattcctgccttgcggcaagatacgggttctcaggtgctgattgccctgccatgtgtgtgatcctgtccgtgaactatggtttgtccggtctttccggaggaggtagcggagctgaaggattgccccttgcctgatcaagtttcgcgttggccaaaccaagaagagagccggcataggcaccgggcgacccgatcgccttttccttggcagcggatccggcagccatggcaccggagctgaaactcgcgcccatgcctcgaagcaccgaacctgcagccgacgagccaccggcacgcgctgcctgcgcggcggcaaaaccagcgccaaccgctccggcgccaagaaacgcgccacccgctgcgaacgaggccgcctgtccgccatggcggattgactccatgccgccggagacggaagctccctgcacgacgccctgaatgatgttcgggacatacatcgcgatgatgaagacgacgacggaaatacccgcgatcgcaagcgtcgttatgaactggtcgctttcggctgtcggcgcctgtgcaaggccaagcaagacgttcgatccgatcttggcgatcatgaccaaagccatcagcttcatcccgacaccaaaggcgtagacgaggtatcgcaccgcgaaatccttggtgaaggacgagccgccgagccccagcatgatcatgccggccagcagaccgacatacatctcgaccataaccgaaacgaagattgccgcaacgagtgagaaacagacgacaacgatgcccatcgccaacgtcgcggcgatagccagggcattgtcttcaaaaacaccaaacttcgcctgttgcgacatctgggacgcaacgcgaataccggcgtcgaaaatgtctgctggcgacgctgagcctccgccggaaccgatctgaaacagactatcgacgaccgctttcgcgaatgtcggaccctgcgtaagcacgaaggcaaagaaaccgataaacatgatgcgccggacgagctcggcaaaccaactgtccagcgatgctgcttggatcgcaagccacacggctgcaatcccgacctcgatgcccgcgaggatccagaacagcgatttcgccgcatccatgacggtggtttcccaccccttggcggccgtcgagacctggttttccaactccgtcaggacttgaccgtgttgagcgaaggccggcgccgccagagcgatgaaggcgataccggtagccaggattttgcttccgccaccgcgcttcaccatctcggtcaaatttcccgacccttttcgattggtgacggcgtctcctcccaaggcgaatgacgtctcgtggggcgcttgccgttcgtcactcaccggcggacttgcggcgcactgtccccgcatcaaaacgactgtggtgatcgcggcaattaccgcgatcgcgttgaatacgaaggggatcaatacggggcgggtcaccagcggggctccattttctgtccggaaggaatggattggatgtcggcattgaagaacttctcccgacgcgcctgtgcgaggtccttgtccgtctgctcgctctgtagccaggtccccatcatcgtcgtctgctgggagacgatgccgcggagcttctgcatctgtgccacctgctgagccgcgatctggtggccgacctgcaacgctttcatctggccatctgcagattccgacatcgatcgtagctggctcatcgtatcctcttcgctatcaaactgatcggcggtgaggctcgcggccttgagcgtgctggaaatcgtgtcgcggttcgtgttcgaccatgtcttataggtcgacgaaaagctctcggcgttaagcaggttcatcctcaggtccgaatagctcttgaagcgctgctttaggagatcatccgcattgcccatggagaaggcgatgccctgaccctgattgacaacatcgcgcagctgcttcagatcgccttcgacctggccccagatgtggttcggaagctgggcagtgttttgcagcatgttctggtagatattgagctggttctggatctgctcggcaagctgggtaatctgcttaatctgattgttgatctgctcagtcgactgaccgacaagatggatgagttcaccattgttgagcatctgcgtcatctcggtcgcgccggtgaccgcgcctcctgcgtaggagagggtgggcgtggccgacagaccggcggcgaccaacccggtcaccaacgatttgccgagtttcaagaactgaattgcttcactcatagcggttgatccccctttcgatgagccactgacccggccactcgtggccatgggtcgaaaagagcgtccggatgcgggctagatcggccttcccggaggcgccgacaaaggaaagcgtgactgggccaagcgccatatcgaaaagcctgcggccgtcgggcgacgtcacgtagtattcgcgtttcgggatggcgttcgcgacgatctcaatctgccgctcgttgaagccgatccgctcgtagaattcgcgggtaccggtttcccgggcggcgccattcggaaggcagatcttggtcgggcaagattccttcagcacgtcgatgatgcccgagcgctcagcatcggagattgattgcgttgcgaggatgacggcgcagttcgccttgcgcagcaccttcagccactcccggatcttgtcgcggaacacaggatggccgagcatcagccacgcctcgtccagaacgatgaggctcggcgagccgtcgagccgcctctcgatccgtcgaaacagataggtcaggacgggaacgagattgcgctcgcccatattcatcagctgctcgatctcgaagcactggaagcgcccgagcgtcaggccatcctcttccgcatctaggagctgacccatcggaccatcgaccgtgtagtgatggagagcatccttgatctcgcgcatctggaccccactgacaaagtccgacagcgagcggccaggagccgtggccatcagtccaatctgccttgagattgcgtttctatggtccggcgctaccgtcacaccttgaagcgaagcgagtatctcgatccactcgcaggcccaggcccgatcagcgccggtcgaaagctctgacaacgggcagaaggcaagactggccccctccccgctttcgccaccaatctcgtaatggtcaccgccaacgccgagcgtcagcggtagcatcgaattgcccttgtcgaaggcaaagacttgcgccttttcgtatcggcaaaattgcgcggcgatcagcgcgagaagagtcgattttccggacccggttggcccgaagatcaaggtgtggccgacatcatcgacgtgcaggttcagtcgaaagggcgtcgagccggatgccacctgcatgaggggtggcgcatcgggcggatagaacgggcatggcgtcgacggctgtcctgaccagacagagttcagcggaacgagatctgccagattgcgcgtattgatcagcggttcgcggacattgcagtaccagttgcctggcaggctgccgagaaaggcatcggtcgcattcagcgtctcgatgcgagctccgaagccttccgcctggataaggcgacgaaccgcctccgccttttcctgcagcgccgaccggctctcgtcgaagaggatgataacaggggtgtaataaccgtaggccaccaattgcgatgaggcttcggcaatcgcatcctccgtctctgcgaccatggccatggcatcctggtcgatcgatcgggattgcgtctggaacaactggtcgaagaacggccgcactttctgctgccacttcttgcgggtccgctcgaggcgctgcttggcttcctccgcatcgaggaagatgaaacgcgacgaccaacgatacgtcagcggcatgaggttgaggctattcaagatccccggccaactctcggccggaagcccgtcgatcgcgatcacgccgagaaatcgaccttcgacccgtggcgtcagtccgtgttcgagctctgccgtcgccaaccagtccaagtacatgggaatttctggcaggcggacgggatggttctcgccggtgatggcaaaccgaatgaactggaagagctcgtcgtagcgcgcgacgcgaacaccatcctgttcgggaacctctcgggtctgcatacgctgcaccgagagaacattgccgagatattgctcaatctcccggatcgagcggcggaaggtatcaaggacagtatcggcatattttgctgagcggctttcgttgtccgagtaaatgtagcgggtcaggcccgatcggcgccgctccggcggccgataggtcaggatgagcgcgtgccggcattcgaaatgcccgcgttcctgtccaaaatgccgtcggcgctcgtcatcaatcagccgcgtgacagcgtccggaaagtagcttcgttgagcggacgggtactccgtcgtcggcacgcgcacggcctcgacctggatcatccagcctgtaccgagccgcgagaggatcgcgttgatctgacgggaaagctcgttgcgctctgtgtcggtcgcgctttcgctgtcaggaccagcgaaataccaaccggccatcagactgccgtccttcagcagaaggatgccgttatcgacaagacccgcatagggaacgaggtccgcgaatgatggacctgtcgatcgaaatgtacgtaaagcgaccatcgcgaggtcctcagtaacggcgccagggcgccgaggtcggaaggtaatgcgcccgatagcgcatgtggcgggcgtaaactttacgcatcatgggatcggatttagccattatgcggagcgcgccaaccaccacgatccagatcgcgacgccgaacatggccgaatagagggtcagaacaacgaagatgaggatgaccgccgcgagcccggtcagaagcacaagctctcggtccgctcccatcaagaggttcggccgggacaaggcgcgatggatccggttacgatgaagcccggcgccagtgtcagccatgacgcccctcccctcccccgacgcgatttgtgcttgggaccgcggtctggtcggcgacgaaagagccgccgatcgaagcaccggtcgagccgaagagaccgacgatcgtcgtcgcgccaagcaggatccccgcgaccagcaccacatacaccaatcgccgcgcgaaatcgttgagctctccgccgaagatcagcataccgccggcgatcgcgaccgcggcgagcgcgatatagccggcgactggtccggtgatggactgttggatttgctccagcggcccttcccaaggaagcgacccgcctgagcttgcgaaagcgggcgatgccacaaacaaaactgccgcgaggatacaaagccttgatctaagcagcatgacgggtctcattttcgcgagcctcgatgtgatagtgcccatcgctgaaaccggcgacgctcagaatttcgctgacccgtcgccctgtcggtgttcgctggatggcgatgatgagatcaaccgcgtcaccgatgaccgcctgcatcggttgcgggcttgcttccgcggccagttgctcaaggcgccgcagcgccatgcgggccgagtttgcgtgcacggtggcgatgccgcctggatggccggtgttccaggctttcagaagggtcagcgccgcgccatcgcgcacttcgccaacgatgatgcggtcgggacgaagccgcatcgtgctcttcaggagccgcgacatgtccacggtctcactggtatgcaggctaacgacgttgtcgcccgcgcagcggatctcggcggtgtcttcgagaatgatcaggcgatctttgggtgagcaggcgaccgtctcggcgagtatggcgtttgcaagcgttgtctttcccgatccggtaccgcccgcgacgacgatgttcgctctccgcgcgaccgcctcgcggataatatccgcttgccacggggtgatgttgcgcgatcttacgtactcatcgagggtaaccagacgcgatgctcgtcttcggatcgagaaaatcggtgccgtaacgacgggaggcagcaatccctcgaaacgatggcctccgattggcaactcgccggagatgattggcctactcgtaccgacctccacgccgaggacatgcgccacgcagccaatcaccgtttcggccgcggaaaccaccatgtcgccgagtgtattgatcgacccgtcctgacgctcgatgaatagcttgccgtcggggttcagcatgacctcgatgacgtcgggctcgtcgatcacacgacaaaggtccgggccgagggcatgttcgagcttgctgatcaggcgtaacattgaatgacggctgctgtcggtcatggaggtaatcccgtcgcaggtttctagttgcgggctgtccaccatccaccgcaatgaggtcgttctggattggcggtgactggttggtagctcgccaacgccgcgggcgtctactcgcagatctgtgggtaggcagcggcgagcctgggatgtcatgtgaatggtctccgccatccggccggagaatattcagggtggcctgttcgatctgaagcagacagaaaaagcctgatccgcaaggtgaggaacacatggtgcggaaattgatgggcatcagttgagcgggcaagtcgccgatctcgcggctcgcggggggttgggcacgtcgagacatcggccatagacataatcacgccgccgagcttgtttgccaatgcgccgagcagacgattcgcacgaagcaggagttcggctggcctattattttgtagccgtcttgcagaatggagctgcttcggtctctcgacggtgacttcgcagtgtgtgcacggaaagcgccgagatcgcgataaaggactgaattctcgaggaaatgttgctactcgctatggaaagctgtgcaatccatgggtggagcaagatttcgttaactttaaaaggcttgcaagggtcagagaatcgatgcactcctcagatgcgtatttttcacgtttttcgggcgttttccgcatacgtgccctgatggacgaaatgatgaccaagaccacaaacaatggcgacagccgctcttcaccactccgatcgaagatcgcgagtcattcggcgtctctttcggccaagcttcaagagcaccagtcgaatatcttcacgccgcatgcgcgcaagaccattcggtcgttttctccgtccgaagcagcaaagctgctcggagtggccgaaggttaccttcgcacaagtgcggtcgaattggaaaagaaagcgtccggcggctcggagcgcgacttcagtccggcgctcgccggtggcaggcgcatgtactcggtgcaggacatcgccgccatgcgcgtccatctcgacaagccggcccgttcgaacggccgttacctgccgcatcgccgtgaaggtgaggacctgcaggtcatctcggtaatgaatttcaagggaggctcgggaaagacaacgaccgcggcccatctcgctcagtatctggcactacgcggttaccgcgttcttgcgatagacctcgacccgcaggccagtttgtcagccctgttcggcaatcagccggagttcgacgtcggtgaaaacgaaaccgtctatggcgctatccgctacgacgaggaacgccgccctatccaggaaatcattcgcggaacctatattcctgatcttcatgtcatcccaggcaatctggaactcatggagttcgaacacgatactccgaaggccttgctgcaacgcaaacccgacgatatcctgttttttgcccgtctacaggctgcaatcaaggacgtcgaggacgcctatgacgtcgttgtgatcgactgcccccctcagttgggctttcttacgctgtcggcactcacggccgcgacgtcggtactgatcaccatccatccacagatgcttgacgtcatgtccatgaatcaattcctcgccatgacaagcgcgctcttggatgaaatcgccgaagctggcgccgaggatcgcaacaactggatgcgttatctgattacccggttcgagccgaccgacggcccgcagaaccagatggttgccttccttcgctcgatgttcggcgaaaacgtgttggtcaatccgatgctgaagagcacggccgtatccgatgcaggcatcaccaaccagacactattcgaggtggaacgcgcccagttcacccgatccacgtacgaccgggcactggaatcgatgaacaacgtcaacgccgagatcgaatcattgatcagagcgacatggggtagatcatgagccggaaaaacctcctcccgatgcttcacaatgaagccaaggacgggcagcaagctgctccgacgccgccgtcgcgaccacacctcgacgcgccgagatcaaagccactggccgcgatcagcaagtcgctcggcgacctcaacgatcgcagtcgccgtgcgaacgaaatcgagcggaagctggctgaaggccaggttgtcatcgagctcgacgcttccaccatcgaaccttccttcgtgcaggatcgaatggagggggaccttgatggtctcgtcgcatccatacgagagcaaggccaacaggttccaatcctcgttcgccctcatcctgaacaatcgggtcgctatcaggtcgctttcggccaccgacgtttgcgggcactcactgagctcggccttcaggtcaaggcgatcgttcgagaactgagcgacgaacagctggtcattgctcagggccaggaaaacaacgagcgtgaggacctgacgttcatcgagaaagcccgcttcgcggcgcgtctcaaggaacgattcgcccgtgacgtgatcacggcggcgatgtctgtcgataagagcgatctgacgcggatgttcaacatcgtcgatgcgctgccagcggatctgatcgacgctattggtcgggcacccggcgtcgggcgccgcagctggatcgaattgaccgagctccttgagaaagcgtcttcaccggaagatgcaacacgctatgcacaaacgctcacgagcctgtcgtcgcaggatcgcttcaaaagcgtgattgcccatctgaagccgcgtcgaatcacacgcggtgctccagacgtgctttcagggcctgacgggcaacggcttgctcaagtcaaacagaacaagaccaaggtggaactgacaattgacaggaaggcaatgcctgactttgccgccttcgtattggagcagttgccctcgatctacgccgaataccgcacaaaacagcagccaaaaaaggaagcgtaacccgcaaaagaaaagagcccccaaaacgtcgccgtcctggaagcccctatctgtctaagcaccagtagaatcgcatttccgggattcatcgtcaagagtctttggcatcgttttgatgagcgaattgcttttgcctgaagaaaggtgaaggacgatgcatacggaaagtgtggcgacgccgtttgggcggcggccgatgacgcttgccttgatcaggcggcaacaatcggttgccgagctgaaggcgggtaagacctgtgacaagtggaaagttaagcgggacgcctctgccgccatggagcagctgggccttcaatcgaacagcctcgcggtgctcgacgctctgttgagcttttatcctgaaaatgaactgcgccaggatggccagttggttgtctatccttccaacctccagctctcccttagagccaatggcatgcccggttcgacgttgcgacgtcaccttgccctcttggtcgaggcgggtttgatcgtgcgcaaggacagtgccaacggcaagcggtatgcacgcaaggacggtgccggcgacgttgaacgcgcctttggctttgatctcgcaccccttcttgcacgagcggaagaacttgccgccatggcccaggaggtgatcgcggcacgcaccacattgcgtaaagcgaaagaagacctcacgatctgcagacgcgatgttcgaaagctgattaccgccgccatcgaggaagatgtcgagggcggtgattggcatgccatggaagcagcctatggagccttaattggacgtctgccgcgcgttgcatcgctcaaagacgttaccagcgccctggaggaaatgctcgccttgcggacagagatcctcaatcgattggaaaagcacgataaatcggttttttcgggcaccaatgatgctcatattgagcggcacatacataattcgaatcccgaatctcctaatgaatttgaacaaagctctgaaaaggagcaggaagcgaaatcggtggaagatactcgggcgaagaaacaatcacgtgaacctctcaaggttttcgcgctgggtaccgtgctgagagcatgcccgcagattgtagactacgggcctggcgggagcatcacgtcgtggcgtgacttcatgtccgccggcgtggtcgtccgatcgatgttggggatcacgccttcggcatatcaacaagcttgtgatgtcatggggcaagaaaacgcagcggtgtcagtcgcttgcatgctcgagcgagccaacatgatcaattcgcctggtggatacctgagaaatttgaccggccgggcccaaagaggtgcgttttctcttggtccgatgctcatggctctcttgaaggcgaatgccaatcccgagcggagggtttgagttcgatcgaagaaacgttaccagcagcaagacacatggtgcggggagattgatatccctgcaggcactgggatttatttggttcacgttcgacttggacgcagtgcggcactgcgatgcaggtgtggagccgttgcgcggtcctataggtcggatccatcgggaatacgagcaaggttggaggctttgaccgctgttgtcgttgcggtaagcagcaagggaagcggtcattggcggcaaacactactgaagatggaagagatcaaggcagcgcttgcctcgggtattgtttcgcaaggaaggagctccgcgtgccgcagattgttcgaaatacgccctggaagagcctggcgactctcgtcaagcttttttagcggttgctgtcgatcggggatacgagcgtcggagttttattgggctcgccccaggtcgtccaggcgggatcatcatgtcacattattggcaaaacctgcgacctaatgccaggccgatttgtccaaagtcagagttccgtcgtggtgagttcgtggcactaagcctataaaagaatgagataattattggtttcgaagaagaggaacgtcagcgacagagcccgcagtcatggttggtctgaataacatcgtcctcgcaatagcttgcatgacttagcccgcgaatggtcttggcaccaaggttgcaatggtttgatcaatgctttgggcgggacgggctccgggacagcttcgcttcacattaccgcaaaacaacataacgattttgaagcggcttttgggatcgcgcgtgtggcccttttataggttgggaggcaaaggctgaccggagcgggcctgtctggcatcgggtacgaggttttgcgtagcgaccgagctccagggagacctgcgtttcgcgctcaagcggattcaatctcgtgcagaggttggcgagatccgtcattcttccaggcgagagtgatcatactccgcgctgaggcattcacgggtgatcctgatgacgatcgaggtccttcagccgatagtgagaaactggttcctgtggtgaggccaacgcttcgcaagtacctttcctcgacttggggtcctggactagtgccaagatgagcgcgtgtcgaccgcgatgcttccgtcgcggtttccgacccaatgctgaacgggatcgtgttgggtgatcgtgacatggcggaacatagcactgtgatgatacggctgtccgcgatgggagtcgtagtaccggtcttcttctcaatgcttccaggatttttggagctcttttgcctggctcgattgcagagcggcgattgggatctttcgccgatctcgaagcgaggatcggaaaaaggagccgccgttgcgggatgatcgtcgtgaaatccttcaaatggcagtgacgtttgccgctcaaaggaaacgaagaaagccagcgacgctcaatcaagctgcgaccggggcagcagctgggacttcggtggaaatgtggcgcgcggtgtttcttatgattcatttccagcgcgtttgggatcgacacatcgagtttacgtggggcatgacatccaattgcaatccggcggtttggtggtgtaggagaccgtccaggaagttcaggaagagccgaccgacgtgagatgcttacgggtatggaaggtcaacgctcgttccaaattcttgaggaatgttatcgggccgcgggatggcggggcagcgatacgaagcccggcaatatgtccgctgcaggatcacgcctctcccctcagccaacaacaagcgccgttcgacaccgtacggcgcaactagagttgtttcttccgtgtcttggagacgagagttcctcgcgctgccgtcacggagttttgagaatctcgatcctgctgagatggcgttcgaacaagctggggttcagagagcgcccctcccctctcgccttcttctcttactgcaatcggcacaagcgcgtggcctgtgattgtgcccagctacgcgcgaggtcgtcggtatcggttaggccagacaggaggcctccaagaccatcatcaatgttgaggtgagcgtcggtgatcctgcaagttgacggctccaggctaacgtcaacgcttactctgccctccacggcatcgacctggaacaacgaactgccttcagcctcacatgtcagataggcctgcgcccgcacggttgtcatcccgcccgcctgcggacagacttcggcagaagcaacctcgagactccttgttttgttaggtccgaccggcagttgttcgcagagccggacattggagatcgcgcgagcaatagctggccagttttcgttttggataatcgacacgcagttcgccgaggctgaggcgtgccccagtccaataagcccggccgctgcccacatgattgcgcttctcgtccgccccgcttccatgatcatctcccgtgagcttccgccgacgaatcaatagaaacgtcattcccgggtttttgatgacgacgtcgaagttcatccaaccccggcggtgtgaatggatcgccgagaggttcgagcgacctcagccaaacatccagttgtcgcggtcccggtcgcggaccgttcttctgacgagcaagatacggcgtttccgcgcgaggcttatgcgcgcaggtctcgtgcgacttgcggcagcgacgaatgttctccgtgggtggctggcgatggggacgtgtccgatcgcttgctggtttttagcgacgtcaccggttccactgatcgctggtcgctgtttgttacgtggccaggtctccgtcgcccctcccctcgccgctcgcttgttagagcgcgcatttgactggaacgccgaccagcctttatcgacgtgccggttgaactcacgcgagcctttacacgattcgtcgccttgaatgtggtaggaggcgagtggttgatcagtcgttggttgggcgccgttcgcgaacgccaatgaaggctgcgcggctggagaacagagcgtgaagaagccgatttgcgatcgacggcagaaaatgtcgataattcaatgagttgagattgtgggccgcggcccacggaggcaaactaaaatcttagcacatttcattgtctcagattatgtagcaaattcatatggttataaccgtgggccgcggcccacgccggttctggccagtttcactctcgggatgccgggaaatgtcgctgcacgagcaacgcccggccggaccaacaaactactccctgcatgatcgcctcgcttctttgcttgccgttgtgtggcggacgctctcagctattcgatctttgcgagaagtatatggggacacctgtaaacggccgaacaggtgcggggcttttcagcgggcgtcaggcagtacttccctccgcgcacacatggtgaagcgtgtgtcatggtctgtgcgctcgcgaggcccttctttgcgaaagggcgagttctgtttgtcgctatcggcccagttttgcacggcgcctgaagcctgcttcctgctcctccgcaactgatcattggatacgcggccgctgcactgaggggctgactgccccaagtctctgccgttaggcggatgggcatactggcttcgagacgacgcaggaatcccatcaatttcagcgcaaggcaagcgatcctgaatgtgaaggtttgggctcgcgggaattggtgcatcccatgagtgatgaactttgaggctgagtctcaacagaacccggtgtcagcttgcgggacgttcggcaatggggtgtgcggtgtaggggcgttttcggaggttgggctgaatgcttactgtccgacgagagactttcggccgagagctagcttcgcgaggcgtgctcgggtgcgccagtttgctgacgttggcgccagtgtgtgcgacggctatttggcggggccgtcgtgtctgttcaggtcccaggatggctaatcgtcccgtcgcaacatgcgctccttggacggcaattgtaacggctgtttgtgcgtgtgtctttctggtaaggtacggcaaacgaagcttacctccgtcgacacaaggagccaggttgctggggaaaccttcgcatgccgttgcgaacgcgccattgcagaagaggcgattgggtccttagcaaagcaatgagatcgaacgtatctgagccccgaaatctgcagcgctcgatcttgaggcgcagccaatatggaaccgcatggtttgaaagctggcgctggccacgaatgccgggccatgatgcctcggcgctgatcagcgtttgttcgggtgccgtgtgccctacgtcatgctctagcgtctttgacgctacggctttccagtggtgctcatgggctggcgtttgctgcgttcggcgaccggtatcggcactcgcatgagccgccgcgagggatcattcgaagaacggctcggacctcgggaggctttcgcttcatccggcaggctttggcgatgttgagtcttccacaacatgctgcgcgcttttcgacctgacgtcgaggagcgatcggtagggctggatactgaccagcaaggtcgcttgtacgcggcagaccggggaagatttcccagtcagcagtgggcgacagtgctcgggttgggtcgccaaccacctgtaatgaccaccccgaaaaagctttcggctttgcgtgggcgccgtggcgtgacggacttccagagatgtcggccgagggagcgagacgactgatcaggtcgactacgtctgcaaggggtcagttcttcgcttcgcttgacggacaccgcaacgcccgaaagcatgagatagggtcaagagcaactaccctggtgtaatagtcctgtcggacggaggtagacacaggcgtcgggcatctggatcctaacggcggatgagaccaaatctgtgggccttatccagcagatctcgaacagatgaggcctggaatttcttcccgccacgtgccggtcgttctcccattttctcaagctcacttgcaatgtcgcgcagcgataagcttggatcagcgatcgtgattgccgctactttcttcatcagatggtcttcgggagcgcggcgaggggagcggtcaaggagctccttttctgctagctgctcgcgcaccagacggtgtaccgctcgacggaggcgctctacggtccaatcttggccgcgtcggttgagaacatcgacgacgttatcccagctgtgctttgggcgcagttgcctaacgaccggaagccaggtttccgacgaggcattgagaccatcgatataaagcttctcgcgtgccttggacgcagcttcaatcgcttccgggcgcctttcccgaagaccggggttgccaggaaatcgaccttgagcttttgctgccttgatactttctctcgcgcgctcggcgctttgcgccttttcaagttctacgatcgcgccgagaacttggatggaaaaggcacccagcggcccggtcgtgtcgatgggatcaccgagagatcggaagccgatccctcgaactttgagtttttcaattagccccagaaggtcgctagcagagcgcgcgacgcgatccaggcgggcgacgaccaaagcatctccagcgttcagctccgcaagtaggcggaccaagaccggcctctcttgtgacgaggcggatcgatgctcctgatagatgcggtcacaaccagccgcccggaggtcatcgacctgtcgatcgttagcttgatcgccagcggacgagaaacgtgtgtatcctacgagacgggtcgcggagttgtgattgtctactttttcttgcaccgcagtgggtcccgatctttgagcatgcaataaattgtacagatatagaatgtgccaataacactatttttgcaagagtgtatcagcgtgctaatagctggccatacggcgcgattttctcggtagcgctcatggttactcatttcacgttgacagcgccatctggtggcgctctacagcggaaaaatgcgacgtaaccgacgcactcggggcacctttctctaaatcacatcgaatgcttgtgtttcactgtgaaaaggtcgctcgttccgcagccgctaagcaacatacggaaggcgggtatggccccaggcgttccgggcgaccatttcagatgcccgctctgcaacaaagcaaatccgcgtgttaacgtttcaagtcgcaacgattggtcagctgggaccgacgcttaacgcttcgccttcgcggctgtaattgcctcagcttggatgacgaccattttgagctcttcaggagccattcccattgcggcattagcgaaacgatccaacagctcgctcagccacttttcgctctcggtatgtgcgtcgaaccccagcagccagtttggtgtagtgcccagtgcttctgctatgcgaacaagtgtggccaagtctggttcgcgtcgacctgcaacgtagtgcgcgaaacgacgttcctcgagaccggcacggcgacccgcctcagcgaccgagatcccaaggtgctcacttctttgcttcaggcgttttgccagtgtgtccataggaacaatttgttcatgattgataacaatctggccatgaacgttttggagtgttataactacaatctgtagtgttcgatttttgatccgctcgaggttatcgatggaactgcgccaactatccctttttcgagccgtagccgaggaactgcattttggtcgggctgcgatcaagatgaacatcgcccagccagcgctgagcaaccatgtcatggcgctggagagggagcttggctgtccgctgttcatccgctccacacgtcgggtcgagctgacgagggcaggggagaccttctatgaccgcgctgttcgcatcctcagcgagatggagctgacgaccgagctgacacgggccgcaggtggtagtcgcattcgccagatcaagatcggtaccgtctatccggccaccatgggcatgctgcccctgttcctcggcaagatcggtcgcaagtttcccgatgtccgcatccacattgcttcaggcaacactggagacatcatccgtggcctagaaaccggacagctcaaccttggcttcatcaggccggtcgagaacatcggatcgctgcgcttcttctcggttgcccatgaacgctatcttctggcggtggctgagagcaatcctctggctccgctcaacgagatctcgatcgaggacctacgcgatcagaagatcattgccttcaaccggcagaacctctccttcaccgaacgatacttcaatgagaagttcgaagagtacgacctgagcaagaacgtcgcctatagctgtgacgacacctattcgctggtctctctcgtctccgccggtctcggcatcggctttgcaccggagtggacgaccgacatcccgaaccggagctttgtgctcaagaaggtgagggggatcgacttcaagatcgggcttggcattgcatggtcgaaggaagatccgacggcgtcgcgagacgatatcgtcgagatcgcgaaatcgatggtacggcgagggtgatgttgggaaggcgtgcgctaaagacaccgaaggattgaccaagcacgtctaaaaggcgattctcgaccttgagaatcgcaatgaattgatcggtctcggttgcacacattaagagatcagctgtgcaccgttttcctatcgataaccgatcattatcgttagccaggcgtggcctggaccatcatacggagtagcgaatagtaattgcgctatagcattcgtttaacgaatgatttaccatgaattcaatgcgttacgatctcgcccatctgcccatccagagcctgctgaagccaatcacggacgcgacagcggcgctgtgccgcctcgacgagcgcatggcccgctcagccgtcggcgccggcgtcctcgagcgccagaattttgccgacgcctgcgcctcgctgtggctcgacggcgaactcgtgcatctcgaggacctcgtcctccacgacgccggcgctgacgtccgcgccccgacccacgaactgaccatcgcccgcgacgtgctgcgcagccgccgccgcatcgccagtcagctcccggcttgggcccttagccccgacggtctgcgcagccttcgccgggcgcaggccgggcctgggtccggaccatcattggctgacgacggcgggcgtggggctgatgagattgacggcgaaccgcccgggggaggggagggggagagtgctgccgacgcgagcgacctggactccgagtttgccgcgatcgacgcggtgctcgctcgctccaacgccgcgattgaggaggcaaagcgcccgagccacgtggcaagccaccgcgacgcgaacaccaaggcactggtctacgatctcgactgggatgaagaggcgcggctcgaggaatggcgtgacgtgctgcggcaggcgcaggacctgccgccggtgctggcggcgatcgtcgccctcgatgcctggaacgatttgtctgtgtcgcaacacgccccctggctcggccggctgctcgccgcggcactgctgcgccaacatggcattgccaccggcggccacctggtagcggtcaatgttggcctgaaaaccatcccggtcgatcggcgccggcatcgcgaccgcgacgcacggctgctggcgatcgcccacggattgctggcggccgccgagaatggcctgaaggagcacgaccggctggcgctggcccacacgatgatggagcgaaagatcgctaccgctttaatctgccgctgaccatccgttcggggctgtacccgctgcttaaaagccgggtcgatggcccgattggccacgccgtcgatatttttgccattgtcggcacgatgttcggtatcgccacctctcttggcgtcggcgtatcgcagattaatgctggcctcaaccacttgcttggtattccgatcggcattgaactccaacttcccctgattgcggtcgtcaccgcaatggccacggtctccgttgttaccggcctcgacaaaggcgtgcgtatcctgtccgagaccaacctcatcattgccatcctgctgatggtgttcgttcttgtcgtcgggccaaccagccaattgttgcgcgattttgttcagaacctcggtctttattttgacaccctggtgctaagaaccttcaatatctacgcctatcagccaacgccctggatcgatagctggaccctgttctattgggcgtggtggatatcctggtcgccattcgtcggaatgttcattgctcgtatttcccgcggtcgaaccgttcgcgaattcgtcatggctgtgctcttcattccagcgggttttacctttttctggatgacagtcttcggcaatacggcgatgttcatcgataccggtgtcgcggccggtgctctgggcacggccattgccgatgacgtctcggtcggtctgttccgtttctttcaatacctgccgctctccggactgacgtcgacacttgctgtccttctggtttcgatctttttcataacctcggccgattccggtgcgttagtagtcgattccatcgcggctggcggcgagacgcaaacaacaacggggcagcgtgtgttctggtgtgcgatggagggtatcgtcgccggctgcctactgctggcaggcggacttacggccctacagtcggcgacggtcgccagtgccctgcccttcaccatcgtcatgttggcactcgtcctgtcgctctacctcggcatgcgggaagacctggcgcagcgagatgcccatcatggacagaacccgcttccggccgcccagcctgcgtcggggcaaacgtggcagcgccgtttggcgctcatgctgacggccgcgacggagaaggacgttcgacgcttcattgatacacaggtgcgaccggcgcttgatcaggttgctgctgaactcagctctcgcggcaggcatactcaggtggtggaggaagagggtgatagggccattgctcttcgctcgcctgcagacggtgttcgcgactttgtctacggcgtaagcgtcgttggtcaccgaattgccagcttcacacccgttcgcgccggctcggcagaacttcgttacgaagcgcgcacatacttctcgagcggaaaccgcggctatgacgtgatgggcatgtcacgggatcagttgataagcgatgtgcttgcccagttcgaacgatatctgcatctcgtccattcgccggagtttcagttggtccacagcgccccggaacatcaatccggtgtgtagtttcagacagtgcgtggtggcggacgggtttagccgctcaccacgcattgctttctgttgcatggtttgaaggaacggtcgcatcccagcctctctgtgaaagaggtgcaacaatgcagagcggcacagacatacactacacagcgaaagagctttccggtcattacgagtgaaggcgaggtagatagcaaggaggataaaaaagacaaacgcaatcgcgcgagcaaatgcacgtccgattctgaccaaaatcaggaaaggtctgacacaccgatcacagattgacgttccttgatgctttttgtcgaggcaagcgccaaccagtcggccacaacgaagccggaaatcatggctacataggcctgcgcatttgcgacaaggacaccaactgacgttcggccaggccgatcaaagccacgaaaaaacaagaaggtgacgcgcaaggacccgcagtgccaacgccgcgcgacaaatcgcacgcgtctgtggcggggccgccggcccataccccaacgcgaccggctgcgtgaggttcggttgcagcagcagctgtccatcgagaatgctgaattaacgatagaattcggctcgtccgtctggctgcggtatcagacactcgcatgagcaaagttcagacgttgcgggcgtccgcatagcaaccttggccagctgcaccacagaaacacatcgaggtacagtgtctgctgaatatcgccgcagatcactaaagtcgtcagggcggccaggtatcccgcccttcagaaggccgtggatcgagaaattccatcggacatttcggcatcctgagcgaccaagcagcacagtgtagacgttctaggctcttgaaagtcgttcttccccatcaccggtttggattggattgaacgccctagattccgcacttgccgttcttctgctgccaactcccagattagattgacgccggtccatttacggaccggcgtctggatggttagtttgtatactcaggctgcgctttcaacttctccttagtggcatcgacataaaccctgacgtcgtcgcccttttcgttgcgcatgatgtttgcctgattgagaggcacggcaatacgatgttctcccatcccgagaaacccaccgatatctagcaccagctgcttgaccgttccgtcggcgttgaggaccagcttgtcgacctcaccgatgtcttcgtctttcgcgccgtaaacatgcgctccggtaagagtttcagaggtgagatccttcatatccgatgcgcggtagccgtctcgcttaatgtccggacggatcatcgcggtgttgtcagccgttccggtctgggcaggagtcgtcgccgtattgtttgccatcgtggtgcttggcgccttgtaagcgggcgcatccgtcagcatctgcttgtttgcattaacgacgaggaaataatcatccggaccgtcaccatcgcgcacgaacttgacgtccttcatcgcgatggcaacgtccttttcgccgatgccaaggaacccgccgacacccaagacgaccgccttcacttcaccctggcggctcagaatcacttcgttgatctcaccgatatcatcccagtccttctcagcgcccgatttgaccatcatgtcagccgtaatcggcgtttcggtcgcataaaggcgcatgccaatgaacttggatgccatgatgtcggttggctgttgctggtacatagccatcggtgccatcgtcgccgcgtaagcggctccgctaagcaatgctgcggcgagggctgtggctgtaacaaactttttcatgggaatctccccgtttttcggttggcccgatcgcaaaaaatgcaacggagattttttgcactgcgataacacaaatccgctttgaaatgagcgagccggatgaactccgcttactgtgaactgccaagggtccgaatagttccgatatttggtgaacggggaccgtgaagcgagcaaccacgcggcatgaggcgatcaggccgacaagagaacaagtggacctgatcccgcattgccagggacatcgcatgtcgctctggcatcgcatcctggtccgccgctgccgtaatggtcgtgtggctgttgtcccattgatttttcgtcaatcggtttgcggtagtcggggcatgatgacagctcgacgccgaccgaaacatcgcgtccctatcgaaatcgtcgcccgcgcaatctggctgtcctttcagttcaatttcagcctgcgcgaagtcgaggaaatgatgctggaacgcggcgcggcagtctcgtatgagacgatccgtcgatggtgtaggtccgcatgagttgatgatgaccgcgcggtcgcaccgaaaagcgccttcatgcagcgacgtgtggca

SEQ ID NO: 20 - DNA, 73354 bp, Rhizobium matallidurans
  source 1..73354: mol_type = genomic DNA
cgccgccgccgccttctacgtggttcgcagcatttccggcccgctgacgcgcatccacaccgcgctccaggccgttgccgaggaaaacgtcacgatcgccatcccccacaccgacatgaacaacgaggtgggcatgatggccaaggcgaccaagtcgctgcaggaaaaggtgcgcgagcgccatgccatgtccgagcgcgaagccgcccagcagatggcgctcgaaggcgagcgcgagaacaaccagcgtctgcagcgcgacgaaaccgccgtgcaggctcatgtggtctccaccatcggccaggcgctggagcagatcgcccgcggcgacctgacggtccgctgcgctgatctaggccagaaatacgccgctctgcgcgacaacttcaacgatgcgctcggccatctcgaggccgccatgtccaaggtctcggtcaagggcggcgatatcgccgtcagcaaggaagagatccgccgcgcttccaacgagctgtcgcagcgcaccgagcgccaggccgcgagcctggaggaaacctcggccgcgctcgacgagcttagcgtcgcggtgcgccagaccgccgaaggtgcccacgaggcaagccagcgcgtccactcggtcagcaccgaggcgagccgtagcgacgccgtagtcacccaggcgatcgaagcgatgggcgggatcgagaagtcttccgaggagatcggcaagatcatcggcgtcatcgacgacatcgccttccagaccaacctcctggcgctcaacgccggtgtcgaggccgcgcgtgccggcgagagcggcaagggcttcgccgtcgttgcccaggaagtccgcgaactggcccagcgctcggccgccgccgccaaggagatcaaggatcagatcgcccgctcttctggtcaggtcgaacagggcgtccgcttcgtcggcgaggccggcgaggcgctgaagcgcatctccgaccagatcaaggccgccaacgacatcgtctcgaagatcgcccacagcgcctccgagcaggacacgacgctgcgcgcgatcacctcgtcgatcaaccagctcgacgccgccacccagcagaacgccgccatggccgaggaaaccacggcatcggcggaatcgctcgccagcgacaccgacgatctcctcaacctgatccgcggcttccgtgtcggcacccaggccgagtacggcgccacgcagacccgccgcgcggcataagcctcgcgacacgtgcgataggatgacgacagccgccggagcgatccggcggctgtttcgcgtttattgagggccgcgatcagtggcgcggtgacttggcgtgagagccattcacgctgcattcctggagacgtgcttagatcctcggcacgaggccgaggatgacgtcggagaacggggaatgcctggcttgccaaaggcgacgccccacactccgacgtcatgctcgggctcgtcccgagcatctgctgccgtgtcggcgggctcgacttgaatggagcctgccgagaacagcgctatatgcagccagacccagcctcaagccgccgcaaccgccagatggacgccggtctcctcctggaggcggctgatcacgccgaagagattgtcggcgcgcggattgcctttcgggccgaacatccgcatcaggctcttcgccggtgtgtcgacaagttcgccaagcttctcgaatccgatcgtggcattgatgaagtcgcgcagtacggctttgccggtctcgacatctccggacagcagcagttccacggcatccgtcagcagtgccgcccggaaagccgcatcatcggctgcgcgggctttgattgtttccttgaaatcgcgcgtcagaggcatctcaacggccctttctttgcttgtaatcgacccaacgcgaaagcgccgtggcgatgtcggactgctgccgcttcttcgttccgccggccagaagaacgatcaaccgatcgccatcgcgcccgaaatagatgcggtagcccggcccatagtcgatcctgtattccagtaatccggatccgacgccctttacgttcgagaggttgccggcctgcatgcgcgtcagggcaatggcgaccttcgatgcagcgcgtgcttcgatgccggcaaaccacagcgcgaaagggctcgacccatcctcatccagatattcgaggatcttcatgcttatatggtatcatatatgttactaatttcaaccgcctcaacgcttgcgtccagcctcgcaacatgatcatgaaagcccaaaagccaaccgtcgccatttgaaaggcccagcatgcagatcgtcgagaccagcgcgacatgaccaccctcgcagcctatgccggcctcttcgccatcgccttcgtcgccgccacgatcctccccgcgcagtcggaggcggggctggtggcgcttattctctccgggaaatactcggcgctgctgctcgtcgtggtcgccagcgtcggcaatattctcggttcgctggtcaactggctcctcggcgtcggcatcgagcgctttcgccacaggcggtggtttccggtgaaggaggcggcgctggatcgggcgcagcgctggtatcgacgttatgggaagtggtcgctgctggcgagctgggtgcctgtgatcggtgatcccatcaccgtcgttgccggcgtcatgaaggagccgctgccggtctttctgcttctggtgacgatcgccaagaccgcgcgctacgcggtcctggcggtgatcaccctgggcattgtcggctgagagggatcagccggcgatcttcgagaagtcggcaacggtgccggtggcttcgcggatgaggcgcagcagcgccaggcggttggcgcggatcgccgcgtcctcgtcgttgacgagcacgtcggtgaagaagcgatcgacaggcgcgcgcagcgtcgagagagcggccatcgccgagcggaagtcttccttctcgatcgcgccggacgcctcggccgaaaccgtctggatcgccgcgaaaagctccttctcggcgtcaagcttcagaagcgcttcggagacgccatcggcgaccacggtgcccttcttctcctcggcggccagcagctgcacggcgcgcttggtgccggcaagcaggttcttgccgtcctcggagctgacgaaggccgtgagcgcctcgacgcgacgggcgaccatgcgcagatcgtcggtctcgggcgtcaggacagcgtcgatcaggtcgtggcgggcgccctggtcgcgcagatagaccttcaggcggtcatggaagaaggacaagaggtcgagctggcgcgacatgtcgtcggcggcaacggtgttgccgatatccatgtcgatgcgcgccatgtggctgacgatgcgcggcagaagcgtcaggtgcacgccgcgctcgaggatgatgcggatgacgccgagcgcggcgcggcgcagcgcgaaggggtccttcgagcccgtcggcttctcgtcgacggcccagaaaccgatcagcgtgtcgagcttgtcggcaagcgccaccgtgatcgccaccttgtcctgcggcagctggtcggatgggccctgcggcttgtagtgttcctcgatcgcggtcgagaccacggcctcttcgccctgcaaaacggcgtacttgcggcccatcacgccctgcagttcggggaactcgccgacggcctcggtgcgcagatccgccttggcgagaacgaccgcgcgatcgaccagcttgtagtcggcaccagcggggaaggcgaccttggcggccatggcgcggatgcgctcgacccgttcgccctgcgtgccgagcttggcatggaaggtgacgttcagcgcatcgagcttggccatgcgctggtcgagcggctttttcaggtcgaggccgaacttcttggccgaagcttccagcgtttccagatccggcaggtcgccctggtcacgcttccagaagtgcagcgcgtcggacagacgggcgcgaacgaccttgccgttgccgtgaatgatttccttgccgccatccgtcgcttcgatattggagacgaggatgaaattgttcgaaagcgtctcttcacccggtttgcgggtgacgaagcatttctggttggtcttgatcgtcagtcggatgatctcggacgggatcgacagataggcttcctcgaagcttcccatcagcacctgcggccattcgacgaggcccgagacctcttccagcagcccttcgtcctcgaccagttcgaggccgttcgcgaaggcgacgtcgcgcgcgtcgtgcaggatgatgtccttgcggcgctcggcgtcgaggatgaccttggccttctcgaggctcgcgacataatcgtcgaagcgcttgacggtgatcgcctcgggcgcatggaagcggtggccgtaggtgatgttggaggcgacgatgccggagatctcgaacgggatgaccgtcgtttcctcatgctcgggaccgaacatgcagacgatcgactgcagcggccgcacccagcgcagcgaacccggctgcgacgaggccttgccccagcgcatcggcttcggccaggggaaatcgcggatgataccgggcatcacctcggcgatgatctcctcggcgccgcgaccggtcctggagatgatcgcgacatagaaatcgcccttcttcgggtcgctctgcacctgcgcctcggagatcgaggtcagcccggccgcgcgcaaaaacccttcgatcgccttttcgttggcgtcggtgcgcgggcccttgcgttcctcgcgcacatcggcggagcgggcggtcagtccgcgaatgtcgagcgtcagccggcgcggggtccagtattcccgcgcgccctcgtaggaaagtcccgcctcgacgagcgcgtcggtcacaagcttcctcagatcgccggcagccttgcgctgcaggcgggccgggatctcttcggagcggagttctaacagcagatcgggcatgtcactttccttgcctccacggggaaggcgctaccttgcgggtctgaaaacggtcgcctctgctagcaaagaatggcgcaggtttacaagctgcaaaagcgggatggagcgggaggggaggggatttgggtaagcggagtgcctttcggcagcctttgatgttcggaaacaggctgtgcctcggggtcgagtatcaatgtcgtctatcggcccgttgcggtcattggtaaccgcaccatttggtcgtgaacggcaacttcatgcgcttaagctgaaactgatcagctatcggaacactacttgcacccttcaagccaaacatcagtgagtcgctcgggtgcgcaacttcctgccatcaaccgttcaatgcggccgacacgctcgtcgagcgtaggatcgctttctgcaagcttgtaagatccgggcgagataagaaccgccaccagccgtatgaactccgtgtcgcttaggtctgccggtggtcggccgtagattactgaacttgccttgtgaaacccagttatccacccctccggccctttccccatttccagagtgtcaagccaaagggcaaggatttgttccttggaaagcttgcgttccaagcccaacgcgtagccagtttgtcgaaacttgccgatacccggatgaaactttttaaatgcgaggcgcttggatgcagattgggtgatcgttgtcgctccagcaccgggggtcgaaaaatcgactcctgcatgatttgcgaagtttggatcttcgaccttcagtaagattgtcagatgtcccgcgccaagggaggctccccctcgaccctgcgctatcagctcgtccgcccgttgacgcaaatggggagcgtcagccaaggcgtcccagtatccctttccaccatatagaacgaccccgacgatcaacagagccaagaaagaaccagctaacttgaaaaatcgtctcatctaatctctcactggaatcaaatggcgcgggggctggaagctagaagacaccaaattattgcggaaattggacgatacacgacatgcgtttatttcagccgatctgtcacgttttttgagatgaccgctgtaggcgccaatcatcccagccttgcgccgatgacaccccgaccattccagttccgctgtggaaacccatctccatccttgccttgccgcttttcgccgctatggtccgccacctctataaaaacgtaggaaccatcatggccgctgatatccgcatgctctccgcagtcatcgcctccgagatcaatgcccggcccgagcaggccaaggccgcgatcgagttgctggatgagggcgcgaccgtgccgttcatcgcgcgttaccgcaaggaagtgaccggcgggctggatgatacgcagctgcgcgatctcgccgaacgcctcgtctatctgcgcgagctcgaagcccgccgcgatacgatcgtggactccatctcgggccagggcaagatgagcgacgagctgatggcaaggctcaagggcgcggccaccaaggccgagctcgaggatctctatctgccctacaaaccgaagcgccgcacccgtgccgagatcgcccgcgagcgcggcctcggtccgctcgccgaagcgatcctcgccgaccgcgccaaggagccggcaacgctggcggaagcctacatcacatcagacgttcccgatgtgaagacggcgctggaaggcgcccgcgatatcgtcgccgaaggcatcgccgaaaatgccgacctgctcggcaagctgcgcgcccatatgcgcggtgcggccctgttgaaggccagggtggtcgatggcaagcaggcggcgggcgaaaaattctccgactatttcgaccattccgaacgttgggcgacggcgccgggccaccgcgcgctcgccatgctgcgcggctggaacgaggaagtgctgacgctgacgatcgaggccgacgccgagacagcatcaccgaacaagccggtcgagcggatgatcgctgccgcctacgagatcggcaacggccgcccgggtgaccgctggctgatggaggtcgccagctggacatggcgcgtgaagctctccatgtcgctgtcgctcgacctgatgcgcgaactgcgcgaacgcgccgaggaagaggcgatccacgtcttcgcccgcaatctcaaggacctgctgctcgcggcccccgccggctcgcgcccgaccatgggccttgatccgggtatccgcacgggcgtcaaggtcgccgtcaccgatgccaccggcaaggtggtcgcgacatccaccgtctatcccttccagccccgcaacgacgtgcgcggcgcccagatcgagctcgcctcgctgatccgcaagcacaatgtcgagctgatctcgatcggcaacggcaccggcagccgcgaaaccgaaaagctggtggccgacatgctggccgatctgccgggcgcgaagcccaccaaggtcatcgtctcggaagccggcgcctcggtctattcggcgtcggccaccgccgccgccgaatttcccaatctcgacgtgtcgctgcgtggcgccgtctccatcgcgcgccgcctgcaggatccgctggccgagctcgtcaagatcgagccgaagtcgatcggcgtcggccagtatcagcacgatgtcgaccagcagaagctgtcgcgttcgctcgatgccgtggtcgaggacgcggtgaatgccgtcggcgtcgatctcaacatggcctctgtgccgctgctcgctcgtgtctccggccttggaacctcgatcgccgaagccatcgtcaggcatcgcgacgagaccggccgcttcgagacccgccgcgatctcctgaaggtcgcgcgtcttggccagcgcaccttcgagcaatgcgccgggttcctgcgcatccgcgatggcaaggagccgctcgatgcctcctccgtccatccggaagcctatggcgtcgccaagaagatcgtcgccgcctgcggccgcgacctgcgcacgctgatgggcgacagcgcggtgctgaaatcggtcgatccgcgccagttcatcgacgacaagttcggccttccgaccgtcaaggacatcctgtcggaattggaaaagcccggccgcgacccgcgcccgagcttcaagaccgcgaccttcgccgagggcatcaacgagatttccgacctgaagccgggcatgacgcttgagggaacggtaaccaatgtcgccgccttcggcgccttcgtcgacatcggcgtccatcaggacggtttggtgcacgtttcgcagcttgccgaccgcttcgtcaaagatcctcacgaagttgtgaaagccggcgatgtggtcaaggttcgcgtcgtcgaggtggatgccaagcgcaagcgcatcgcgctttccatgcgcaaggacgacggcgccgcagcacccgcgccacgcggcgaaacccgttcaaatccagcccctcgcggcggcaacgagcggcgttcgtcgagccccaagcaggagagccagggggcgttcggggcagcacttgccgaggccatgaagcgaaaataagggcttacgaacagccattgcagaaatgtcacacttcggcgctcatcgtgccgaggtgtgaaatacggcgcttgtaaggcaggaaggacggcctaagttgatcggactatcctgtcacattgcgaggcctaccttatggcgtcggctttcttatcgatcgtccagaaaatcatccgcaagggtaatctgaaactcacgctcgccaatggcgagacgcatgcaatcggggacggcaccggagatctggtcgtcgcccgcgtcgccgacgaggaagcggagcggctcatccgccgcgatcccaccctcaagctcggcgaaatgtacatggatggccggttcattctggaacagggcaacatctacgatttcctggccatggtgaaacagaacaccaccaacgaaatcttcgacatcccgatggcggccctgctcattggccgcatcgccctgcagcagctgaagagccgtctgcccgtcaaccacagcaagcgcaacgtcgcccatcactacgatctctcggaaaagctgttcgagctgtttctcgacgaggactggcaatattcctgcgcctattacaatccgcccggcatcagcctggaggaggcgcaggtcgccaagaagcggcacatcgccgccaagcttctgctcgagccgaaccagcgcgtgctggagatcgggtccggctggggcggcatgggcatgtatctggccgaatccaccgatggtgtcgatttcaccggcatcacgctcagcgaggagcagttgaagatctcccgcgagcgcgctgaaaagcgcggtcttgccgaccgcgtccgcttcgagctgcaggactaccggttgctgaagggacgaaagttcgaccgcatcgtctccgtcggcatgttcgagcatgtcggcatcggaaatttccccagatacttcaacaaggtccatgagctgctggccgatgacggcgtcatggtcctgcattcgatcgcccggccgaagccgagcttcgcgaccaacgccttcatcgagaagtacatcttcccgcagggctacatcccctcgatcggcgaaacgctgccggccatcgaaaaggcgaaccttctggtgcgcgacgtcgaggttctgccgctgcactatgcctacacgctgcgccactggcgcgagcgcttcgtggcgcgcagggccgaggccgtggcgctctatgacgaacgcttcttccgcatgtgggagttctatctggcgggctccgaaataggcttccgctgggacgaactcttcatcatgcagatccagatatccaagaaccagtattccacccccaacaatcgcgactatatcgcgcggaacgaagcgaagctgagggaattcgaggcaacgcgccggccgctcgaaaagatcattctctgacaccatgaagaaggcgcggcgaattccgcgccttcttcgtcccggctgtttcattttgaaagggttacgagatgagcagtgcctaccccgagatcacgctggtgcgccatggcgagacggaatggagcctgtcgggccgccacaccggccgcagcgatatcccgctgacggaaaacggcgaagccgccgcccgacggctggggccgcgtcttcaggaattgaccgtcgtcgaggtctggtcgagcccatctgggcgcgcccgcaacacctgccgccttgccggcttcggcgagcggatggtggtcaaggacgacctcgccgaatgggactacggcgcctacgagggcgtcaagaccaaggaaatcctggccaaccgccccggctggcaactcttccgcgacggctgccccgatggcgagaaagcccccgacgtcggcacccgcgccgaccgcatcatcacggcgatccgctctgtcaacgccccgatcctgatcttctcctcttcccacttcctgcgcgtgctcgccgcccgctggctgcggctgccgccggagggcggggcgcatttcgtgctggatacggcgagcgtgagcgtgttgggctatgagcatgatttgaccgagccggtgatccggcggtggaatgggtaggtttttgtggggggatagcctaggctgacgtcgtgcgggtggcccctcatccccggtgcaactcgttgcacctgaactcttcgggcaccttctccccgcgggggagaaggggatgttggagcgagcggccacctcaagtcccttctccccagcggggagaagatgccggcaggtcaggtgcagctcgctgcaccggagatgagggggctacacccgcaaacctctccaacccacgcccaccaacctctccaccctcaccatcccacaccacctccaccatcccgcttgaccccacatcccccacgtcgctagatgaccgcatgcaacagatcgacggaatcaacgggcgcgttgcggatgcgccgtccaacaactgggtttaccgggtgctgccgccatggctctggccctatgcgcagctggcgcgctgggatcggccgatcggctggcagttgctgctgtggccgtgcttctggtcggcggcgatggcggccaatgcggcggcgcaggtgggtctcttttccggcggccagctgatctatcatcttgtgctttatttcatcggttccgttgccatgcgcggtgccggctgcacctataacgacctcgtcgaccacaagatcgacatggaagtggcacgcacccgctcgcgcccgctgccgtcgggccgcgtcacccgcacgcaggcgaagatcttcattgtcctgcaggcgctggtgggccttctggtcgtcctccagctcaactggttctccgtcatcctcggcgtggcatcgctcggcatcgtcgcgctctatcccttcgccaagcgcttcaccgattggccgcaattcttcctcgggctggccttttcctggggtgcgctgatgggctgggccgccattttcggcagcctctcgctggcgcccatcctgctctacatcggcgctgtcgtctggacgatcggctacgacaccatctacgcgcaccaggacaaggaagacgacgaactcatcggcgtccgctcgaccgcccgcctgttcggcgacaacaccaagccatggctggtcggtctctatggcctgatgctggtcctcaccttcctggccttcctgctgtcaggcgtcggcatcatcgcctatctcggcctggctgtcgcagccggcatgttcgcgtggcagatcatcacgctggatatcaacgaccccgatcagtgcctggtgctgttcaaatcgaacaaccgcgtcggcatgatcatcttcgccggcctgttcctgtcgctgctgttcgttctgccgtaaggccgtaccacactccggaaaacgaaaaacccggcgcgccggccgggtgtttccgtattgtcgggataaggtcgccgctcagctgcgggcgatgatttccttgccttcgatcttcatggcgacgccgagcgtgccggtcgagcggcgcacgagaaagcgtgggcggcggttggcgaagtaggagtggcggcggcgcggcttcaggtggctggtgcgcagttcgccgagatgttcttccagcgggcgggcgatgccgtctgcctcgaccatcagcatcggaatgcggaaggcttcggaccagccgcgccagtcggcggcgatgtcggagaggtcgtgcgcgaccagaagcggcacgcagagatcgggatcttcgtggtgcagttcgagcgtgacggtcacttcgccgttgccgtggtcgatggcgcgagcggcgacgcccttgaacgcccgcttcggcagcgcgatggagagcggcaggccgcttgaaggcaggatcttgcgcagaatagcgccacgttcgtcaatcgttatgctcacgtcgctcgtggaatcgtggatggcgtagctgacttgctgcggaaaacgggaaggatcgagacgcagtgttgctccagcccatgcgggcttcataacggtgttgttcatgttcatttctacccttgtcttacctgagagccggtttccggtcttctcctcgggacttttcgtcctctatggccgacaataggcgcgcccccttccggacagcttaaaaatcgcggttaagaagaccttgcctccctggatggttatcaaaaccgaacgtggcagggtttccgagaggtgaacgataaggtgtgccaaaccgcgacgccgggcgggtaagtctcgggtaagcttttcatagcaaaatagggcgaaaaccgtctgtcattcatccaaggccattgccggaatagaacgccatgatctccgcttcgttgggctatacgataatatcgggcgatatgcagaagagccttgagcgcgtcgcctcgcagacgacggtgaagcgcgaggcgcagtattacgaagacaacatcaataaagtcaaaacggtagacgacttcctcggcgactataagctctatagctacgcgatgaaggcctatggcctgcaggacatgacctatgccaaggccttcatgaagaaggttctcgagagcgacctgacggatgccagcagcttcgccaacaagctctcggacagccgctacaaggaattcgccgcggcattcaatttcggcacgacggcgaccgacgcgcaaagcgacagccaggaaaccgatatgatcggtctctacacgcagtccttcgcggacgagggcaccaatgccgctaaggaatcgacctattacagcgcggcgatcgacaaggtgcagagcgtcagcgggctgacgtcgaacgagcgtcttcgcacctacgtgctgagcgccttcgggatcgatccgacctacgcgtccaaggactttctcgccaaggtgctgaccagcgacgtcaacgatccgagcagcttcgtcaacaccagcggcaacgccaagtacaaggcgctcgccgcccagttcagcttcaatgccgacggcacggtcaacggcacggcacagaccgccgcgcagaagaacgcggtcatggaacagtacaatatcaccgttccttcgatcgtcaccaccaaggcggccgagtacaacagggcctatttcgacgccaacatcagctcgatcaccaatgtcgatcagctgatatcggacaagcggctgacgtcctatatcaaggcagcctatggcgcggccgccgatttcagcgacgcggcgttgaagaaggtgctgaccgattccagctatgcgagcctgctcggatacgacacgatgtacgccgccttcaatttcaacagcgacggcaccgtcgacaccaccaaggcgggctacgccgcgcagacatctgcccagatcagtgcgacgacgacggccgcaaacaacatgtctggcgcctatccgaccaagatcgccggcatcaagacggtcgaccagttgatcgccgatccgcagctgacatccttcatcaaggatgcctacggcatgccgcagacattgagcaatgccgacctgaaaagcgtgctcaccgattccacctatgccggcatgctcggctttcagggcgtgtacgatgccttcgacttccaggcggacggcagcgtaacgtcggctggcgcgcagtcggcgagcgagatccgcaaggtcggctacagcgcggacgacaatctgaactattaccgcggcaagatcagcacgctctccaatgtcgacgaactgatcgccgacaccaggctgacgagcttcttgaagagcagctattcactgccgtcaaacatgagcgatgccgatctgaaaagcatcctgaccgattccagctttgccgccgcaagcggcttcagcaacgtcaacgccgccttcagcttcgccgccgatggttccgccggcgcgatgtccggaccgcagagcagccagcagaccaccagcgtcgacgcgctctacgccgtgaattacgacaatgcgcagcaggccgagatcgatagcgccgtcgccaattacaagacgcgcatggccgacgacaaggtgacgaacgtcaacgatttcctgcgcaccaacctcacgtccgacacggaccggagcaacgacaaacttccggatctctaccagatggcgcttcgcgcctacgggctgacggagcaggatgttccgcgcagcatgatgcgcaccctgttgcagagcgatccttacgaccccaagggttacgtcgcctcgttgaaggacgaacgcatcaccaacatgatgcgcgcgttcaatttcggcacggatggcaaggccacatccgaggttcaggccatatcgacggccgtgcttgcgaaatatggcacgagctacgcctcgctcgccacgctcggaatgagcaccggcccgttgcgagacaaggccgccaaggatgcgacggccgacgtcgatgatttcgccaagaagatcgtgacggtgaagtcgctcgacgatttcctggccgacagcaagctcaccgatttcgttctgaaggccaatggcctggagccgaaggattacgacaaggcgacgctgaagaagatcttcacctcggatccgaccgacgccaacagctatctgaacaagacggcgccgacgaaattcaaggacatcgtcgccgacttcaacttcgataccgagggcaacctgacacggtcgaagatcggcgcgatccagaacgtcggtgccgaggagcggacgcagcagggctatctgcagatgacgctcgagacacagcagggcgagacaaacgacggcgtccgcctggcgctctattttgcccgcaaggcgccgagcatcacatccatctactcgctgatcggcgatcaggccctgttccaggtgatctcgaccgccttcagcctgccatcgagcatgtcgaacatggatgtcgacaagcaggcgaccatgctgaagaagttcgtcaacatcacagattttcaggatccgacgaaggtcgacaagctgatgcgacgcttcaccgccatgtacgatcttcagaacaataccgatacgtcgccggcgctgacgatcatgagttcctacgcctccaacacggcggccctcaacaggatcagcaagcgctaggcgcgttagtcgatattgacgaccttgccggggttcatgatgccaacggggtcgaacgccctcttgatgcgccgcatcaggtccatctcgatcgcgggacggatcgcggcaagctcgtcgcgcttcaattggccgatgccatgttcggccgaaatcgacccgccatgcgcaagcaccagcccgtgcacgatctcgttcatctcgtgccagcgctcgagaaacgcctgcttgtcggcgcccacgggctgcgagatgttgtagtggatgttgccgtcgcccatgtgcccgaaggcgcagatgcgcgcgccgggcatcgccgccatcaccgcctgctcggcctcgtgcatgaattgaggcacggtcgagaccgggaccgacacgtcgtgcttgatcgatccgccttccggcttctgcgcttccgacatgctctcgcgcatgtgccacagcgccgtctgctgggcaacggaagaggcgatggccgcgtcctgcacgagcccagcctcgaaaccctgctccagcagagccgtcatcatccgctcggcggtctcggccgaatccgaggtggagatgtcgatcagcacgtaccaggcatgttcactctcgagcggatcgcgcacgccctcgatattgcgggcggtgatctccacgccgaagcgcggcatcagctcgaagcccgtcagcgacgtaccgcacaggctggaggcgagattgaacagcgatagcgcgtcttccaccgagttcagtccggcaaaggccacctgcttgccgagcggctgcggaaacagcttcagcaccgcgccggtgatgatcccgagcgttccctcggcgccgatgaagaggtcgcgcaggtcgtagccggtattgtccttcttcaggcggcgcagcccgtcccagatctcgccggtcggaagcacgacttcgagcccgaggcagagctggcgcatgttgccataggcaagcacggcggtgccgccggcattcgtcgagagattgccgccgatccggcaggagccttccgagccgagcgacagcggaaacagccggccgtgcgcctcggccgccttctgcacgtcggcgaggatcgcgccgccgtcggccacgagaacgttggcaacgggatcgacatcgcggatcttgttcatccgctccagcgacaggatgatgtcggacttgccttcgcgtggcgtctggccgccgacaagcccggtattgccggtctgcggcaccaccgatgtgccggtctcgctggcgagcttgaggatggcggaaacttcctgaacgttggcgggcttcagcagcatcggcgaggagccgtggtagaggccgcggttctcgatcaggtgcggcgcgagatcggcctcgccgcgcagcgcgtgcttgtcgccgacgatggctgcgaaacggtcgagtagctcaggtgaaacgctgctcatcgggcttttatcctctgttattcccgtggggccgcggcgcgccgcagccggtcgttgatggcttcgccgagaccctcgtcgggaatggcgctaaaggcgatcgtcgcagcaccgctggcatcggcgcgcttcatgtagtcgaaaagattggtggccgcctcggcaagatcgccggtctcgctgagattgagcacgatcttggccttctcggcgttcgctatgggagaggggccgaaggcgatcagcgcctcgccgtcgcgcacctcccgcgcatcgagccgcacggccgcgcccggcgcatagtgcgaagccatcatgcccggcgcctcgatcgcggcggacgccaccttcgggcgcaccagcttcacgccggccacacgctcgatctcgtcggccggcagcccgcccggccgcagcagtctgagcctgccgtcctcgaccttgacgatggtggattccacgccgacatcgctcgccccggcgtcgaggatcaagttgatcttctccccgagatcggcctgcacatgggcggcgctggtggcgctgatcttgcccgacgtattggcgctcggcgccgccagtggatggccgaaggcgcggatcagttcaccggcaaatcccttcggcacccggatgccgacggtatcgagcccggccgtcgccagcgcgtgaatgccgctgtcagccttgagcggcacgacgatcgtcagcgggccgggccagaaggcctcagccagcgcccgcgacagcggatcgaaatcggcataggtctccgccatgattagatcggccatatggcagatcagcgggttgaactgcggccgccccttggtctcgtagatacgggcgatggcggccggattggtggcgtcggcggcaaggccgtagacggtctcggtcggaatggcgatcggcagtccgtcgcccagcaccttgcatgcggcgtcgatcgcctgctgcctgctctcggtgatgtcgatgatctctgccatatgccgcccggatagtctgtccggcagtccttatgcccttgcggcctcgcgatcaatatcagagccggcgaatgggctcagagttggcgaacgatctcgcggagctgctcgttgcgggcgccgagcaggagcacgttcctgatcgccacctgcggatcgtcggtccgaaacaggaggccgttgccgcgcacattgcggtcgatcgtcatcttctccggcgtatgttctccgggccggatcgcgacggcgaagtacatgcgcgaatagcgcatgtcgatcttttcgaagacgttgtcgttgtcgctgatgtcggcgtagaagttggcgatgtagaaagcccagctcaccgcttcatactgcgcgaacttggtgcgcgcggcggtcacatggcagtagccgagatgcgggctgtcctcgagcgtgcggtgaaacaccatcttcggaaactggatggagcggtggaagccgttgatatgctggtgcgtcttctcgccggcgctctgcagcttgcggccggtcttttccgccacttcgtcgtgggtcaggtagcgccgctcggcggccagccaatgcgactgctggcgggtgatcttgccggtccgcagaaattcggaatgcggcgcgacctgggcggtcgactgctcgacgttcgctctggcgtcgaagtaacggagtttcgccatggtctcgcttccggctgcctgtctctttcgcgaaagcataggcagttatgcttaatgcggtgttaaatcgggccgggcgcgatggcggctggcatggggcgacgcgggctctgtcgcaaacggaacacccttcgcgatcccggtcccgtgcgtcttgatccatggcaattccggcgaagtcgcaaatagtcctatttgtttgaagcggcgcgcgaatgcgcgtttttattcccgccatagcggcccccgcgcaactgtcgccattttcgaagccgatgtcgctttgcaaccacgcgggcggcgatggcagtggttaaatgcgcgatataggcaatatctccttcgggagaggggacgagcgcttcccgcggctttcgccatccgttatgtggcagcccgaatagacgaggatatgagatggatattcgcagcaacgttttacggcagctcaagaaccgccgcgagggcttcagcctcgagcaacccttctatatcgacgaggactacttcaagctcgatatggagctgatctattatcgcgactggctgttcatgggccatgactgcgaactgccgaaggccggcgcctatttcacggtgcagatcggccagtatcccgtcgtcatcgttcgcggccgcgacaacgtcatccgcgccttccacaacagctgtcgccaccgcggctcgcgcgtctgcaccaaggatcacggctcgtcggtccgcctcgtctgtccctatcaccagtgggcctacgatctcgacggcaagctcgccttcgcccgccacatgggcgacgatttcgacaagagcggcttcggcctgaagccggttcattgcgagagcttcggcggctatatcttcatctgcctcgccgacaaggcgccggacttccagccggttcgcgacatggtcgccccctacatgatgccccatcatctgaaggacgcgaagatcgccttccagagcaccatcatcgagaagggcaactggaagctcgtctgggaaaacaaccgcgagtgctaccactgcgccgccaaccaccccgaactctgccgcacctatcccgaggccccgagcgttaccggcaccgatggcggcgccgatgatccggagatcgcgggccactgggcgcgctgcgaggccgccggccttcccagcaagttccagatctccccggacggacagttccgcaccgcccgcatgccgctgatcgaggatgccgagagctacaccatgtccggcaagcgcgccgtcgcccgtccgctctcggacgacgtgacgatagaccggatcggcaccatgctgctcttccattatccgacgacctggaaccacattctcggcgatcacgccatctccttccgcgtgctgccgctcagcgccaacgagacggccgtgaccaccaagtggctggtccacaaggacgccgtcgagggtgtcgattacgatctcgaggaactgacgcacgtctggaccgagaccaacgaccaggaccgccgcatcgtcgaggaaaacgccttcggcatccactcgccggcctacgagcccggcccatattcgatgctgcacgagggcggcgtcatgcagttcctcgaatggtacgcgctgttcatgaccaaccgtttgcagggtgatcaggcaaagctctcggtcgtcgcctgacgtctggatggtatcgaaaggccgccccgcgcttcaccgaagccggggccgctttcgtatctggcgttcaaaaatcctggtagttcagggcgttgatctctcgcggcggcaccgaggaggtgacgatcgcgtcccgcgcggcgactgtcaccgaggccggggcgacgggcagttgcgcgatcggcggcaggcccggtgttgcggccactggcggcggcagcggctggcgcggttccatctcgatctttgcgaggacaagcggcggatcgggctcgcgcgccggcagaaggttgccctgcgcccagatcttggcgaggtcggccttgttcatggcggcgacattgacgtcgatatcggtgagcgtgcccggcacgcggtaggggcagcgccgcttgctgcaattggcgccggcggagaactgccagagcaggtagttgtcccagttgcccatcgggaacacgcccttgacgtcgggcttgtagcgcgcataccagatcggcagccgcgccagcaccggatagtcgttgcggtaggcggcgatatagcgtgccgtctcgtggttggtgtagagcacgggatagcgcccggtccgcgccttgatgtgtccgacgaagatctgcgcatcctcgagcgacatgaatttcttggggtcgatgccctcgagatcgaggatcatcatctcgtcggccttcggcgtcgcgtagtcgagaaagtggttggcctggtcgaccgggtttcccgggcggccgagatgataggcgccccacaacaggccggccgcgcgcgccaccagccgccgtgtctggaacaactcgcggctgaccgcgtatttgcgccacatcgtcttgcagtgtcccaccgtgtcgccggcatagtcgcccgtgcaggagaagctctctggaagtccgtcggatgccttggaaatgaagccggcgatccgcttgtcggaggtgagcgcttcccagtcgatcgtgttcagctcgtagccgtcgacgacgagcgcattatcggcctttttccaggggagggtgtcgctggccgtggcgtaatgagacagtccggccgagatcgccagaagcaggatacggagaatggctcttccatgttgttgcttcatgtaacgagagtgatgaaaactggttaatgtattgcttatcagtctttacgcataaacaaaaaatcgggatgggtcgcgcaaaaaagatgcgctcaggaacatcttccccatccatgcgttacatcacgggttcatttccgttgagattggagtcttcatgcccaggtcgttcaaacagtttttcgccgcggccatttcgtccctgacgctggtggcgagcgtcgtaccgtcgcaggcagtgcagatgcccgcggcgccgcaggtggaaaaatcggcggatgttcaaaacgtgcaatattgccgctatggtcgttgcggaccgggtccgggctattatggccggccgggtggctactatcccggttatcgcccggcttaccgcccggcctatcgccccggctggtacggcgggtatcgcggctacacctatgcgcgtcccggctatcgccactataacggctattggtacccgctcgccgccttcggtgccggcgccattatcggcggcgcgatcgccagccagccgcgctatgtcgcgcccgccggctccggccatgtcgcctggtgcgagcagcgctaccgctcgtatcgcgcctacgacaacaccttccagccgtataacggcccacgccagcagtgcgtctcgccttattgagggctggtccagcttctaggggtgccgttagcttcgcgctagcggcgccctcatttgccctctggcttctccccgctcgggagaagggacgccagtggccgggctaagccacgccatccgcgatccgcctcaaagaatcttcatccgcttcagcagaaaccatgccagcatgatcgacgcggcgatcatgacgatggcgtattccgtgcccgtcgcgccctcggtgaacggcagattggcggtattcatgccgaaaaagccggttaccagcgttggcggcagcaggaatgcggtcatgatcgacaggatgtagaggtgccggttggtctcggaggactgcttggaatcgatctcctcgtgcagcagccgcgcccggtcctgcagcacgtagatatcgtgatcgacggtttcgagccgcgccgtcagccggccggcgacatcctcgaagccgaaaggcatttcgtcgtcgtcggaggcggcggcgcggcgcatcagggccagcaccgttcgcagatgccggtggatgcgcaccaccgtgcgccggaccggcgccagccgccgccgctcgtcgcgcggcgccgggtcgtagacgaaatcctcgatggcgttcaggtcctcggtcaggtccatgacgatggcgatcagcgtgcgctgaaactcggtgaccagcagttcgaacaggtcgaccggccgggtgaatttcgccgggttcttctccaccagctgccgtgccctgtcgatgctgcgcagcggctgcagccgcgtggtgatgatgaagcgatcggagatggcgaagtgcagccagccgaggtcggcggtctcgtggtcgaattcgcgctggcaatcgaccagcgtgccgtagagcatctgctcgtccacggtgatggccgagtgggtgtcatgggtgatcagcgccgccttggcgtcgtcggtcagacccgacaggctgtcgagcaggcttggaacgcgggcatccgcgaggttgagatgcagccagtagaagccgccgtcggcggtgaggtccgattgcgatgcgttgttggccagacgtgtcggcttgccgccgccttcaggaaagcggtagccccagacgaagcccggcatgctaacaggcagtgtatccattcttcgccggtcctcttgcatttggcggtgcgctccactggcgttttgggtctttacgaccgacggcgccggatcggcggctctgcagagagcatgaacatggcgtcgcaccgaatggcaagaccctttcgagcgatgccttgatccttccttatgacagctatcctgcattttcatgacagcagccgttgcaagtttgaaattgacgtttacgtaaaaatcaattagctctgccggcggaggagagggtagggtaggactgccctgccatcaggcatacgaggagaacagcatgtacaaggcgcccgtcgaggagatcgcattcaccctcaagcatgtggccggtctggcccgggcgatcgatgacggcctgctgggcgatctcggcgaggatctggtcgatgcgatcctgtccgaagccggccgcttcgcctccgacgagatcgcgccactcgccgaaatcggcgaccgccagggcgcgcggatcgaaaacggcaaggtgacgacgccggatggctggcgcgagctctaccgcgattggatcgccggcggctggaacgggctgacggcatcggagacgttcggcggccaggcgctgccgcatatgctcaatgtcgcggcactcgaaatgtggaactccggctccatggcgttcgcgctctgcccgacgctgaccatgggcgccatcgaagccatcgccgctcacggcagcgacgcgctgaaaaacacctatctcccgaaactcgtttccggcgaatggaccggcacgatgaacctgacggaaccgcatgccggctccgaccttggcgtgctgaaggctcgcgccgagcgccgcgacgacggcagctaccgcatcttcggccagaagatcttcatcacctggggcgaacacgacgccgccgacaacatcatccacctggtgctcgcccgcctcccggatgcgccggctggcacgcgcggcatctcgctcttcctcgtgccgaaattcctgatcaaccaggatggctcgctcggtgctcgcaacgatctcttttgccacgcgctggagcacaagctcggcatccacggctcgcccacctgcacgatgatctacggcgacggtcgcttcggcgaggagaagggtgccatcggctggctggtcggcgaggaaaacaagggcctcgcctgcatgttcacgatgatgaacaacgcccgcctcgccgtgggcatgcagggcgtcgccattgccgaagccgccacgcagaaggccgtcgcctatgcccgcgagcgcacccagggcaaggcgcccggctggagcggctccggccaaacgggaggcatgagcccgatcatcgagcatcccgacgtcatcagaatgctgctgacgatgaaggcgctgacccagggcgcgcgcgccatcgcctatagctgcgcccacgccaccgacatggcgcaccgcgcagccgatgccgggaagcactggcaggagcgcgccgctcttctgaccccggtcgccaagtccttcgccaccgatatcggcgtcgatgtcgcctcgctcggcatccaggtgcatggcggcatgggcttcatcgaggaaaccggcgccgcccgctatctgcgcgacgcgcgcatcgcccccatctacgaaggcaccaacggcatccaggcgatcgatctcgtcacccgcaagctcacgctgtcggatggcggcgaggtcaagagcctgatcgccgagctgcgggaaatcgccggccgcgtcggcgcatccaacgctgaaaacttcggcgccacggagagccgcctcaacgccgccatcaccgatcttcaagaggcgaccgattggctcctggcgcaactcgcggccggcaacaccgccgatgccttggccggcgccacgccctatcagcgcctgttcggcctgacgctgaccggctgctatctcgccaagggcgcgcttgccgatgccgaagacggcaaggccgccgaccgcatcgcgctttgccgcttcgccgccgaaaacctgctgtccgagaccacggcgctgaaggacagcgtcgccaacggtgcctcgagcctcgccgccgccagatccattctcgtctgaggagatgacatgaccaaccacattctcgtcgagcgcccggaagatcatccaggcgtccagatcatccgcttcaaccgcccggacaagaagaacgccatcacccgcgccatgtatacggtcatgaccgaggcgctgacttcggccgatgggaacccggatatccgcgccaccgtcctcctcggcggcgaaggctgcttctccgcgggcaacgatctcggtgacttcctggccgcgtcgatgggcggcggcatgccgcgcgagatcatcgatttcctctacgcgctggtgcgcgcggaaaagcccgtcgtgtctggcgtcgatggtctggcgatcggcatcggcaccaccatgcacctgcattgcgacctcacggtctgttccgcccgcagccagttccgcacccccttcgtcgatctcgctttggtgcccgaggcggcctccagcttgctcgcgccgcgcatcatgggcgcccagcgcgccttcgccatgctcgccgccggcgaacccttctccggcgaggaggcgagggaggccggccttgtcttcagggtcgtggaaccgcatctggtcgaggcgcaaacgcttgacctcgccagcaagctcgccgccaagccgccggaagcgctgcgcatttcccgcgacctcatccgtggcgaccgtgaacagatcatcgcccgcatggacgaggaagcccgccacttcgcctcccgcctgcaaagcgccgaagcccgcgccgccttcgaggccttcatgcgcagatgatgaccgggatggcgccgaaatgttcaaaaagtattacttttaatcaaattttaccacttctagtgtttagtggccggcaatgcatgacgcagcacgggcatcagcgcccggccccttttccggcacaatcagaggcgcggacgccagcggatcggttctccgatcgctgacacgtcggtcggccgcattcgagacccgctatgttcaaaatgaagatcaagacgctgcttccggtgctcttcctgtccctcgtcgccatatcgctggttcagggcgccatcgccgccgtcgcgctcaccagtctcgaagccaatacgcgcgagatcggcgcccgcaatatcccgaataccgagcgtctgagcaccatcgtcaccacgctgaacgacgtgcgccgcagctatgccgactatctcctggcctcgggaaagaccgatttccgcaatgccgagaccacgctgaagacccgccgccagcggcttgatgccgccatcgatgctttcgaaaagcagccgaaaagcgagtacatgacccagaatttcgggcggctgcagaaggcgctcaataatgacgccgccgtcgccgacaagattatagcgctcgccctcgacaacaagcgcagccaggccaattcgctctatcgcggcgagctgtcgatgtcggccaacaacatccagacgctgatcgacggcatgatcgccagggaccgtcagtcgaccgacgcggctctcgtctcggccgccggaaactattacgccggcacggtctcgatcgtcgccggcctcgccgtcgctctcgccgccgccatcgccgccgcctacctcgcctggaagcgcatctcgcggccgatcacgaccatcgccgcgcgcatggcccgccttgccgatggcgatctcgaggccgctgttccctattcaagccgccatgacgagatcggcgacatggccgccgccgtctccgtcttccgcgacaatgcctttgcccggctcgatctcgaacgcagcgccgaggacagccgcgcgcatgcccgcgacgaacgcgcccgcaacgaagccgccaaggcgcgcgaggcggccgacatcggtcacgccgtcgaggcgctggcgggtgccctgggcgcgctgtcggccggcgatctcgcccaccgcatcgagcagcccttcgccgatcacctcgatcgcctgcgcaatgatttcaacacctcggtcgccaagctcagcgaagcgctgcaggaggtcggctacaacgcccacgccatcgacgccggcgccggagaaatccgcaacgccgccgatggccttgcacgccgcaccgaacagcaggccgcctcgatcgaggagacggccgcggcgctggaagagatcaccacaacggtcaaggataccgcccgccgcgccgaggaggccggcagcctggtgtcgcgcacccgtggcggcgccgaggagtccggcaacatcgtccgcaaggccgtctccgccatgaccgagatcgagcaatcctcgcagaagatcgccaatatcgtcagcgtcatcgacgacatcgccttccagaccaacctgctcgcgctcaatgcgggcgtcgaggcggcgcgcgcgggtgaagccggcaaggggttcgccgtcgtcgcccaggaagtgcgcgagctcgcgcagcgctcggccgtcgccgccaaggagatcgagaccctgatctcggcctccaacgcccaggtccgctccggcgtcagcctggtcggcgagaccggcaagtcgctggaaaccatcgtcggtcaggttcaggacatcagccggcacgtcgatgcgatcgtcaccgccacccgtgagcagtcgacagggcttgccgagatcaacaccgccgtcaacaccatggaccagggcactcagcagaatgccgccatggtcgaggagcagacagccgcaagccatggcctcgcccaggaagcggccaagctgatgcatctgctagggcagttcaacctgcagccgggcgatcacgcgatgacgcgccgctacgccgcggcctgaccgatcggcgccatgaacgacaaaacgcccgcgcatgtcgcgggcgttcttctggggacttggaaaaatcggtaaagccggttatccgtgcatccgctggcgctctggctgcgccgcgatgaagcgatcattgcgatccgacagcggttccaccggtagaatatcgatgacatcggctgcatcgaatttgcgcttcaggccgcatatcgtggcaatgacgacgcccctgtcaatattgaaggatgtcgccaggaagtttcgttcgtcgccatgatcatcaatggaaataacaaacatataaccctccgtgtattatccattgatacacggagattatttatcatagatgaatttatagatcatccatcttgaatcgttgtagagatgcttggtgtttcattcttgatacaccaagcattcatccattcgtatatccacccgccggcaaagcttcgttcatggcggaaacgctcgacatgcgcctcggcgcgacggcacatgtccgcgaatggcgccaggttgccggccgcacgcatttacgcttcggcggaggaggggatgcgggcgatcaccttgatttcgaaatcgaagcccgccagccagttcacgccgacggccgtccagttcggatagggcttgtcgctgaacaccttcagacgaacgtcgtctaccgccgcgaactggttttcgggatcggtatgaaagctggtgacgtcgataatgtcgtcgaagccggcgccggcggctttcagcaccgccgcgagattgtcgaaggcgagctgtacctgcttcggaaaatcaggctcgggcgatccgtcctcgcggctacccacctgaccggatacgaaaaggagatcgccggagcggatcgccgccgaatagctgttgatttcataaagcgcctgcctgccggccgggaagatcgcgttgcgtttggtcatgtcatgctcctgttttgacaaggcaaaatccaagcgccgccgccacgccaggggcgcgacacgttgctgataggtcacctggatctctgctcttcactatcaagggcgggaatgatatacgccccgtatgtgaatataggaggcatacgcggcgtatgtcaatatgcatacgccgcgtatgttgatttgtggagacaacggtgacggcaagaacgcgggcgcaaatggtcgaggaaacccgggcaaagctcatcgaggccggccgaaaggctttcgccacaaagggttacgccgcctcgtcgatggatgatttcacagccgaggccgggctgacgcgcggcgcgctttatcacaatttcggtgacaagaagggcctgctgcaggccgtcatcgaccagatcgacgccgaaatgctggtgcgccagcgtgccgcgcaggccaagggcaggacgccctgggagggctttctcaacgaaggcatcgcctatatcgagatggcgctcgagcccgagatccagcggatcatgctgctcgatggccccgcggtgctcggcgatccctcgcaatggccgaaccagaccgcgtgcctgcgcacctccacgcggacgatcgaggcgctgatcgctgatggtatcgtcaagcccgtggacgccgaggcggccgcgcggttgatcaacggcgcggcgctcaacgcggccctctggatcgccgcggccgatgatccgcatgcggtgctggaaaaggtcgtcgatgccttcaagcatctcgccggcggcctgttgcggaccgaaggctgatttctatccggtcgcggggacgccggattacttctccagcgtcgccaccacctcgacatgcgaggtccacaggaactggtcgatcggcgtcactgaggtgatgcgatagccgccctcgacgagaatcgcgaggtcgcgcgcgagcgtcagcgggttgcagctgacggcggcgatcttcttcaccgtggagcgggcaagttccttgcactggaactcggcgccggcgcgcggcggatcgaagacgacggcatcgtagaccttcagttccgaggtcatcagcggccggcgaaacaggtcgcggcgctcgacgctgacgggcttgatcccctgcgtattgcgcgcggcgtggtcgagcgctgcaagcggcttgtcttcgctctccaccgcatgcacccggccgatccgcgccagcctgagcgagaaggtgcccgtgccggcgaagaggtcggcgatgcgcttggctttgccgacatgggcaagcaccagctccgccatcgcttcctcggcgggcttggtcgcctgtgtaaagcttccggccggcggcgaaacgttgacgccgccgaaatcgagcatcggcttcaccggctcgatcaggatctcgccgttgaccgatacccgcgcgatcccgcgcatcgaaagcacggtttcggttgccttgcgccgctgctggtccgaaagcgtcttgaggccgtcggcggcgatgtcgaggcccgtcgccgtttcgagcacggtgatacggaacgcctcggcattgacggcaagtgccgcaccgatcgccttgatcgccggcagccgggcgacgaggcttgccgacgagatgggacattcctcgatattgacgaggtggtggctttcggcctggttgaaaccgatcaacatctctttttcggtcttgcgcgccgcgaatgtcacgcgccggcgctcgccgggatgggcgacgacgagttcgccgacctcgggtgtaagacctttggatttcagcgcatcgatcaccagttgccgcttgaaaccgcgatagagcgcgtcgcccgcgtgctgcagcgtgcagccgccgcaggtgccgttgacgccatcggggccgaagtgccgacagtgcggttcctgccggtccggcgagggcgtggtgatcgacatcaccgtgccctggctcttgatgcgcgcgatggcgaccgtttcgcccggcagcgtgaagggcacgtagacgggtccatcagtgccgttggcgatgccgtcgccctgggcgccgagcttctggatggtgacagtttcagtgctcacggcttggttcctgcgagtagatattcctggtttccgtcgccgcccgagatcggcgaggggatgagcccgaggctggtccagcccatgtcctcgacgaaccagcgctccagttcggcggcgacggcgggcgcggtcgacgggtccttcagcatgccgcccttgccgatcgcctcgcggccggcctcgaactgcggcttgaccagcagcacggcggtcgcacccggttcagccagatcgagcgccggcgccagcgccagcttcagcgtgatgaaggaaacgtcggagacgatgaaggtgaggggatggccgatatcctcggcctccagattgcgcgcgttcagcccctcgatattggtcacgtcggggtttgcggcaagccgcggatgcatctggccgtggccgacgtcgatcgcggtcacgtgcgcggcgccgcgctcgagcagcacttcggtaaagccgccggtggacgcgccgacatcgagacagtgatggccggtcggatcgagcttgaagtgatccagcgccgccgcaagcttcagcgccgcgcgcgagacgtagtcctgtgcggggtcgtcgatctcgatcgagacatcctcgccgaagaccgcgccggccttggtgaccaccttgccgtcgaccttgacggtgccgcggctgaccgcgtcgcgggcgcgcgagcggctggcgaaaagacccaggctgacgagcagctggtcgatacgttgtgtattttgatcggacatggcctgtccatgccgggcaaaacggcgcgttgcaagccttttgttggccggcgccgccgaagcgtccgtcccgcgccgtatccgggaccggtcgcgccggcccgcccgtcgccgcgccatggaggtctgcggaagattagaggtctctaggaaagagaaacgagacctacaacctgcgccatgattgcgtgtgtcctgagagcgtcaaacgggtggaatccccgagaattcagtagctgcggctaaaaactgcgaccagttgccgcgccgacttaaacaattttaaattttccgtggctagggtcgccgtcgattgcagcggccgaaagccgcgttcgccatgaaggcaataaatctcaccgtcgatcatgtttcacatcgttgatgttccccccgcacgcgctgatgcgtgcccgatttgccatggcgccagacgcccaggaaagaccgacttatgtttgctggaaacatgtccctgaacggtaagctcgccgcgaccttcgcggctctcattctcattttcgtgtccgtgtccgccttcgtctactcgaaggccggcgccgtgacggatgctgccatcgaggaaaagcggtcggaacatctggtcaaccagatcgacgacgcgctgcaggccatgcttgagcaggccgtcaacctgcgcggcttcctgctcttcaagagcgacagcacctatggcgatctctatgccaaccgcgaccgcatgctgaacgcgatcgccgccgccaagcagacggctgccggcaaggccgagttcgtggcccagatcgacggcatgcagaaggccgccgacctttacttcaaccagctcgcggtgccgcaggccaaggcgcgcaaggaaaccgacatgccgatcgaccagatcgtcaagatcggcgtcaacgaaaccaagggtcagctcgacggcttccgccaggcctcggccaagatcaagcaggccgcgcgcgacgaatccgccgccctctccgcgatcaaggccgacgccaccgcaacgctcaacatgacgctgctcctcggcggcattttcgcagcgcttgccgccgtcgtgcttgcctggatgctgtcgcgcagcatcgtgcgcccgatcgtcggcatgacctcggccatgggccgcctggccggtggccagaacgataccgatgtcccggcgctcgatcgccaggacgaagtcggccgcatggcgcagtcggtactggtgttcaagaacgcggcgatcgagaagctgcgtctggccggcgaaaccgaccgcatgcgtggagatgccgagcgccagcgccagctgggcgacgagcagaaggcacgtgaggaaagcgacttgcgcttcgccatcgacaacctcgccgatggcctctccggccttgccaacggcaatgtcgcgatccgcatcaccaccccgttcgcggctcagttcgaccgcctgcgcgatgacttcaaccatgccgtcgagaagctgcaggcagccttgcagtccgtcggccacaacgcgtccgccatcaatgccggcgccggcgagatccgcaccgccgccgacgatctggcccgccgcaccgagcagcaggccgccgccgtcgaggaaacggctgcggcgctcgaagaggtcaccacgacggtccgtgacagcgccaagcgcgccgaggatgtcggccagctcgtcgagcgcacccgtctcggcgccgagcgctccggcgaggtcgtccgcaaggccgtcaccgccatgcaggagatcgagaagtcctcgggcgagatctccaacatcatcggcgtcatcgacgacatcgccttccagaccaacctgcttgcgctcaacgccggcgtcgaggccgcgcgcgccggtgaagccggcaagggcttcgccgtcgtcgcccaggaagtgcgcgagctcgcccagcgctccgccaatgccgccaaggaaatcaaggcgctgatcaacacctcgggcacgcaggtcaatgccggcgtctcgctggtcggcgaaaccggcaaggcgctgtcggagatcgtcggcgccgtgcaggagatcaaccgccacgtcggcgccatcgtcaccgccacgcgcgaacagtcgatcggcctgcaggagatcaacacggccgtcaacaacatggaccagggcacccagcagaacgccgccatggtcgaggagcagacggccgccagccactcgcttgcccaggaggccacggcgctggacgatctgctgcggcagttcaacctcggcaacgaccgtgccgcgccgcgcgcggcaacggcaaccccggcctcgcgcccggtcgcttcgccggccaacgcgctgaagcgcagcgttgcccgcgccttcggtggtggcggtgccagtgccgcggccgtcaaggaagaatggtcggagttctgatcgaacgcctgattatcgataggaaagggaaggggctgcgcatcgcgcggcccctttcgcgttcagagcctagctcgccagcgccagtccgccgtaccggctgatctcgctctcgatctccgccaccagcgtgtcgagtgcggcattgcgcaccttgcggccccgccgcaccacatagacgagaccgggcggatctgggaaacggtcggtaatgatctgcatctcgggccgcagatgccgttcgttgagcagcgccacccccatgcccgcgctgacggcggcgacgatgcccgcggcactcgcgcattcgaacaccgtctccagcatgatcccgccatcctgcccgatatcgagcgcccagtggcggtagaagcaatcgtcgtggaaggagaggaagggcacggacgtgctctgcggcaagagcaggcccggatgcttcacccaatgcagcgtttcgcgaaacaggacgacatcggtcgggcgcacctcgtgagagaacacctgcacgatcgccgcgtcgagttcgccctgctcgagcatcgccctcaagaccaggctcatgcgcacctgcgtgcgcacggaaacatcgggatgcaggcgacggaagcggccgagaatatgggcgagcgccgagcaggtcgtgtcctccgtcagcccgagcgcgatccgtccggcaagcgtcgtcttcgacaggctgagcagcgcctcgtcgtgcagcccgagaatgcggccggcatagtcgagaagttcctcgccttcggtggtaaaggcggtggcgcccgccttgcggttcaacagttcgcagccaaggcttgtttccagccgcttgatcttgtggctgaccgccgattgcgacaggccgagcgcttccgccgcccgtgtgatgccgccgtgatggcggatcgcccagatggcgcgcagcgcgtcgatctccagtcgccggttgttcaggtcgttcatctcgtcttgctcttctcgttgcctgccgacgaggatgcaacgccgggccagtatttgcaaacatccatgacccatatcgcttgaaagtcatgcggtgatcgaaatttgtcatgtgcctggccgtcggcgatggcttattgcctcgatggcacacgcacgacagggatcacgatgacggaccaggcactgaccgccaccacagcgcagcaacgccgcttcctgtggccgctgatggccacgttgctgatcatcggctggagctccggtttcgtcggtatccgctatgccagcgaggaagcaagcgtcgtgcttgtgctgttctggcgcacgctcctgtcgggcgtgatcctgctccccttcgccctgaccatcggcccgcgcatgcaatggaaggcggtggccgggcagatgtggttcggcgtcatgtcggtgtttctctatttgggcggtttcgcgctggcgatcgagcagcgggtgccgacggggctcgtggcgctgatctcggatctgctgccgctcgccatcgccaccctgtcgcagccggtgctgggcgaacgcctgagcggccgccagtggctgggcacggcgatcgccgtcgcgggcgtgctgatcgtgtcgatcgacagcctcagcttcggctctgcacccctatgggcttacggattgaccgtcggctcgatgctgatcttcgcgctcgcctccgtgctccacaagcgccggcgcgtcggccacatgccggtgcaccaaagcctgtgcatccacacgctgaccggctcggtgctcttcggtatctgcgccctgctgcagggcgacatcgcgccgccgatgacccaaaacttcgccatcggcatggtctggctggtgttgatcgccaccttcgccgcctattcggtctattacaccagcctgcggctcttcccggtcaccaaggtcagcgccgcgatctatctcagcccgccggtcaccatgctatgggcctgggcgctgttttccgagccgctgacggtggcgatgttcgtcggtcttggcgtcacgctggtcggtgtcttcatgacctcgcggggctgatacctcacgcgtcgttcgccttcccgtccgcgcggaaatacaggcgctggatgaccgccatgatcagcgccgtcgcccagccgaagatgatccagccgttgacggcctcgaataccgaaatctgccgccactccttgccgagcacgacatcgccatatccgacggtcgtgaaggtggcggtggagaaatagatggcgtcgtcaagcgacggcagcgccccgatcaggtagtagagaagtgcccacagatagatatcgagactgatcgggatgagcagatagctgatccagacgacggtcgcgatcgtggcatggcggccgagatatcccggctccgcgcgcctgatgaaacgaagcccgatttccatgaaaacggcctgtatggcgacggtggccgcgatcagggcggtggcgaggagaaagttgacaggcactggacctccccgggagagattggcagaagacgtgggtcaatattgcccggcgagcgccgccgctttcaggctgtgcatcaggtggcgagacggcacgtcatgatggacgcattccggccgctcggcacatccgccaccctctatatgcacgcgatggacgagccagcgcacaagctcccttgcctcgcgcggctcaagcaggattgccgtcaccccggcctcggcaggcacgcccgtcgtccggtcgatgacatcgacaaggccatggcggcccggcacgatgtcgtaccgcgctccgctcgccgctcctgacttcattcagaccacacccctcgctttcatccgggccagcctagcatccagcaggcgttccgcattgcgcaggatcaatcttgcaggcgaaacgcggcaatcttcgcggcggcttgatcgcgcgcaatgcaggccggccgccaggctcctatgctcgaccgcgcgaaaatccggatggagcccgccgtgcaggacgttcagcgcaaacatgggccctcggggctggtcgcgacggcgatggccgagcttcgcgccgcgccgcttctggcgctgctcgtattcgtgcccgtcgtgatcctgacggatatcgcggcacccgatgcgcacacgttgctcttcatcctctcggtcctcgccatcattccgctcgcggccctgctcagccgggcgaccgaagccgtctccgcccgaacgggtgacgccgtcggcggcctgttgaacgcgacgcttggaaacctcaccgaactcgtcatatccctcgctgccctgcaggcgggacagtatctgctggtcaaggcctcgatcgccggcgccatcgtcaccaacacgctgttcatgctcggcggctccttcctgctcggcggcctcaagcatcacctgcaggagttcaaccgcgtcagcgcccgcttccaggcgtcgctgctctttctcgccaccgtcgctctgttcgtaccctcgctggtcagccgggcggaccaggggccggagatggtccaggcgctgagcctcggcctcgccgtgatcctgatcgccgtctacgccatgggcatgctgttttcgctgaagacccaccgcgaactcttcgccagcgtcggcgaggccgaggagcaccatggcggctgggggatgtcgaccagcatcatcatcctggtcgtggtgacgctcttcgtcgcgctgatcagcgaggtcttcgtcggctcggtacaggccgccgccgagaagatgggcatgacgccggccttcgtcggcttcatcgtcgtggcgctcgttggtgcggctgcggaaatgaccgcggctttctcggccgcccgcgccaatcggctcgatctcagcgtcagcatcgcgctcggaagcgcctcgcagatagcgctcttcgtcgcgcccgtcctcgtgatcctcagctacgtgatcggtcccgagcccatgtcgctgcagttctggccgggcgcggtggccatgatgttcctcgccatgctggcggcggcgctattgtccaacggcgggcgtggcgcctggtatgtcggcgttctggcactcgccgtctatgccatattcggcctgaccctgttcctgctgccgcccgccgcttcctagaatccggcaaagttcgcagacgtgcgcatccgtgccacatcccgcttcggcgtttccttgtgcacgcggacatagtcgcggttgaactgcgaggggctgtcatatccgacgcgaaaccccgcttcggccgccgtcatgccctcgacgatcatcagccgccgcgcctcctgcaggcggatctgggtgcgaaactgaagcgggctcattgccatcgccgcgcggaaatgctcgtagaaggacgacgaactcatgccggcgatatcggccagttcctcgatcgcgaacgggctcccgaaattgcggcagacataatccaccgcccggccgatctggttcagtcggctctcgccgctggcgatctgtcggatcagcccgccctgcggtcccgatatcagccgatgcaagatctcccgctcgacaagcggcgccagaaccggcgcatcctcgggcgcatcgagaagaccaagcagccgcgccgccgcgtcgaccagccgcggtgtcgtctcgctcacccgcgcggccgccgggttctcgtcgcgcgcaggttgccccgcgatcatctcgttcagaagcgtgcggtcgaactccagccttaggcagagatagggcgcgtcagggctcgcctctatcaccgcgccgatgaccggcagatcgacgccgaccacgagataatgcgcggcatcgtagacatagctggtatcgccgatcgtcgcccgcttgcgcccctgcgccacgatgcagcaggagggcttgtagagcgtatgcagcggctctgttgtcgccgaggatcgtataacgccgacgcgcggcaacaaggtgtcgaagtttccatccacacgggcatggcggtcgatcagggccgcaagatcggtgattgtttccatgacgccagcatcggacgtctcgcgcgctttgccaagggttatcatcccgtttcggaggatcgtgcaagaatttcggaaaagccgtctaccgcgacaggtccagtcagcgcgatcctgtctcggtcaacagatcgcttgaggagcaagacatgaccgatatgaacaacaaggtagtgctgatcactggcgccagcagcggcatcggcgccgctgcggcccgcgaactcggcctcgccggcgcgaaactggtcatcggcgcgcgccgaaccgaccgcctggacgctttgagcggggaaatccgcgccgcgggcggtgtcgtcatctcgagagcgctcgatgtcaccgaccgcaatgatatgcaggccttcgtcgatgccgccatcgcggagttcggccgcgtcgatgtcctcgtcaacaatgccggcgtcatgccgctgtcgctgatgtcctcgctgaaggtcgaggagtgggaccggatgatcgacgtcaacatcaagggcgtgctctatggcatcgcagccgtgctgcccgctatgaacgcccagcaatccggccagatcatcaacgtctcctccgtcggcggcctcgccgtctcgccgacagcggcggtctattgcgcgacgaagtatgcggtgcgggcggtctcggatggcttgaggcaggaaaacaagatcctgcgcgtcacctgcgtctatcccggcgtggtcgaatccgaactcgccgacaccatcaccgaacccttcgccgccgaagccatggtcgcctaccgcgccgtcgcgctgaaacccgacgccatcgcccgcgccatcctctacgccatcgaccaacccgccgacgtggacgtcaacgacatcgtcgtgcgcccgacggccaatgcggggttgtgagggggagggcagcggcttgctttgagcccgtgacacccccctctgtcctgccggacatctcccccacaaggggggagatcgacccgttgaaaggtctacgccaaacaatgagcgtggagcgagcgggcaagcccagccaatctccccacctgtgggggagatgcccggcagggcagagggggtaattcttgctccgggttagcttactgagcaacccgcaaaggccgggcgttcactcaacccgcttacccagcgaacccgacagccgccggccggccaagcgccctgaacacggtgccgacgatcccggcccggtcgagcccggcctgtgcgttcatcacctcgggcttggcctgctcaacccagagatcgggcatcacgagcgagcgcaccttcagcccgttgtcgagcagcccctcggtcgaaaggaactgcagcacatggctgccgaaaccgccgaccgcaccttcttcgacagtgatcagcatctcgtggtgacgcgccagctggcggatcaggtcgtggtcgagcggcttggcgaaccgcgcatcggcaaccgtggtcgaaagccctgcggcatcgaggtcttcggccgcgagcaggcagtccgccaggcgcgtgccgaaggagagaagcgccaccttggtgccctccttgacgatccggcccttgccgatctgcaggatctcgccgcgaaccggcatctcgacgccgacgccttcaccgcgcggatagcggaaggagatcgggccggcgtcataggcggcggcggtgcgcaccatgtgcttcagttccgcctcgtcggcggcggccatgacgacgaagcccggcagcgtggccaggaaggtcgtgtcgaacgagcccgcatgcgtcggcccgtcggcgccgacgaagccggcgcggtcgatcgggaagcgcaccggcaggccctggatcgccacgtcgtgcaccacctggtcgaaggcgcgctgcaggaaggtcgagtaaagcgctgtgaacggcttgtagccctcggcggcaagtccggcggcgaaggtcacggcatgctgttcggcgatgccgacatcgaaacagcgcgacgggaacgcatcggccagcttgtcgagcccggtgccactcggcatggcggcggtgatgccgacgatcttgtcgtcgagctcggcctcctgcaccagcgcttcggcgaacacggcggtgtagctcggcgcgttcggcttcaccttcgcctgcgcgccggtgatgacatcgaacttgttgacgccgtgatacttgtcggcggcggcctccgccggcgcgtagcccttgcccttctgcgtgacaacatggatcagcaccggcccatgcgcgttgtcgcgcacgttgcgcagcaccggcagcaggtgctcgaaggagtgcccgtcgatcggtccgatatggtagaagcccatctcctcgaacatggtgccgccggtcacgtagccgcgcgcatgctcgacggcgcgggtgatggcgcgatcgaccgacttgccgagatagctggtcagcttcttgccgacttcgcgcatgcccatataggtgcggcccgaggccagacgcgccagataggcgctcatggcacccgtcggcggcgcgatcgacatgtcgttgtcgttgaggatgacgatcagccgcgcatcgagcgcgccggcattgttgagcgcctcataggccatgccggccgacatcgcgccgtcgccgatcacggcgatgacgttgcgcttggcgccggaaagatcggaggcgacggccatgccgaggccggccgagatcgaggtcgaggagtgcgcggcgccaaaggggtcgtattcgctctcggcgcggcgggtaaagcccgagagcccgccttcctggcgcagcgtgcggatgcggtcgcgacggccggtcaggatcttgtgcggataacactggtgcccgacatcgaagatcagccggtcgtccggcgtgttgaagacattgtggatggcgatcgtcaattcgaccacgccgaggccggcgcccagatgcccgccggtcttcgacaccgcgtcgatcatctcgtcgcgcacctcgcgcgcaagctgcggcaggtcgcgatcctccagctttcggaggtcggccggataggtcaccttatccagcagcggcgtcttcggcggttgtgtcacgggaggcactctttcttgtcgttcttgttcttgtcgtcttttccaggcgttttggggcacatagcctttaggccataagttgcggtgaaagaagtcgatttcaagaaccgcaagccacctttctagaggagaacgctactccggcaaagggacgaattcctcttcatcccccggaacgatgtcgaagcgcccgctgcgccactcctccttggccttttcgatccgctctttcgacgaggaaacgaagttccaccagatgtatcgcttcgagttcagcgccgccccgccgaacagcatgagatgacagccttgggtaccgccctcaagcgtgatcgcgtcacccggacggaaaaccagcagctggtcggccgcgaatcggtcgcccgaaatcaccacctcgcccgacagcacatagatcgcccgctcctcatgcgcggcggaaaacgggaacttcgcgccggcatcgagattgatatcggcatagagcgtgtcggaaaacacgctcaccggcgaggtcatgccctcgaacgcgccgatcaccacccgcccgcgcaccccgcgctcgtcgatcacgggcatttggctcttttccgtatgcgcgaaggagggatcgatctcctccttgtcgtcgggcagcgccagccacgtctgcagcccggacatcaaaagcggatggccgcgcagattgtcgggcgtgcgctccgaatgcacgatgccgcgccccgccgtcatcaggttgatatcgccgggccggatcaccttttcggtgccgaggctatcgagatgccggatctcgccgtcgaacagataggtcacggtcgacagcccgatatgcggatgcggcttcacatcgagcgcctcgtccggcttcaatatcgccggccccatccgatcgaaaaagatgaacggccccaccagccgccgctgcctggtcggcagcgcccgcctgacctgaaacccgccgatatcgctggtacgggggatgatcaggttctcgatggcgtcgcaggcaaaggcatcgccggggagggggtctttgccggggaagaaggacatggggtgtctccgttggcgaaagcggtgagcttatttgtcagccgcatcgtgagcttcgatcgccaattctatatctctgagaagcgggcggatattcttttcgatcagctcccatatgcgcggcagcatgacgtttgcataatcgtggcgaaggatattgccgatgccccttatcccttgccagtcatggccgggcaggccagacggagccacggtttgatagaaggcaacttggcggtctctttcgatctctttggcgaggcgaggtttctcgatcggttccgagacgacgtcgacaggccggccggtgatatcttcaagtctctctttcagacgatacagtgtcccgaaatatccgaagccggaatgcagcacctcgtccgtaagctcgacgatgacatcgatatcggactccgctgtcgcttcgccccgggcgaccgagccgaacaacgaaagaccgaggacgccctcagccctgagcgcgtcctcatgcttgcgaatgatcgctatgacctgatccttgtccatgccgccaatataagcgacctctgcgacttggtcgagacgccgccccgatcggccaagtcgccctatcgctcacatcgccgtaaacccgttgtcgacgaacagatgcgcgccgttgacgaagctcgattcatcgctggccagataaagggctgcgcgcgccacgtcctccggctctccgatccgcccctgctgcgcggcgatcgcagcgtccgagacgtcgacgccgagtttttgcaggtcggccacttcgcgcaggccgtgcggcgtgcggatgaagccggggcagaccgcgttgcagcggatgttgcggtcgcggaactcgacggcgatcgcgcgcgcgaacatgtgcacggcgcccttggtcgtgtcgtagagcacctccatcggcgtcgccgccaccgccgagatcgacgaggtgcagacgatcgacccgccgccggaagcaatcatcttcggcagcaccgccttggtcatcaggaacatcgagcgcacgttgacggcatgcagccagtcccattcctcgagcgtcgtctcgaggaatggcttgatgacgatcgtgccggcatggttgaagagcacggtgacggcgccatggcgggcctcgatgtccgcgaccgccgcgttcaccgcggtctcgtcggaaacatccgccgtccagaaatcggcctcgccgccggctgtccggatgtcgttcacggtctcggccgccgcctcgccattgcgatcgatgatcgccaccttcgcgccctcggcggcaaacagcctcgacgctgccccgcccatgccggtcgccccgcccgagataatcgcgatcttgcccttcaacctgtccgtcatgccgtctcgtcccctctggtgtttcggggatgatagaccgccattcgaccgctggccaagggggataacgagcgaaagcggacgcccgggtaacgggcgacccggcctgaacatgtcagaggcgacgccatgcgaaaattacaatctggaggtcgccattaacggcggttttaccgcacgggaacttcgccgctccatggcgttggtatgctcttgtctcattccgggattgatgcaaccaaggggcgcattcgaacctgaaagccattattacatgcaatataataaaagtggaccaatccgaaggctggcgaaaagcgccgcgcttctggcgacagtcgccaccctggcctcctgcgccaccaatccaaactcaaccaaaatgggcgccgacggcaaggatgccgccaggcaggcggacgccatggttgcggaaaagggcgccgctgccgtcgtgcgcgtttcgctcaatggcagctattgcctgcgcggcaccgttcgcctccagaacgtcgtcgatggcaagatccgttcgggggcgtttaccgaaatcggacagcccagcggcatttatggtgccgatgcgatcgttaagaagcttgccaagacgaccgcgcaaatgctgacgctgaacgtgccggcgctgatcaaggagaatggcgttcgagatatccgcacctccttccgccccatcgaacccggtcgttatgccgtgaccatgatcacctgtgagaacggcaacagcaccgcatccatggggacggggaatggcggcctgttcggggctcaaggaaaagagccgaacacgctgtttggcgacaatacgatcaccatcggcaagggccagatcgtcgatgccggcgtcattgatatcgttcagatcagcagcggtggattctttaccagcgcgcgggcgcgcctggcaggctcggaggcgccgcagacattcaaggatgccatccgcctgaacgttccggaaatctatccacgcatcacctacacgaaattcacggccgattacgtcctgctgttgtcggccctaacaccgaagcctgaggcaaagtaaacctatgaagatgatctccacggaccgcatttcccaccgccccgcacggttcggtgccgcactggctctcgtagcttgcctgatcgtgccgcaaaccgcgtcggccgcgccaaagagcagcaagggcaacgacatcgcaatcgccgccttcaaggatgtctgccttgcatcggcgccgacattcgccaccgccgccgcaaaggcgaaacgctatggcgtgaaggatgcggatcagcagttcggcggcatgaccgaagacggctccatgtccgttcaggtcaaacccaaaaaggaatgcgcggtcacgagcgaaaatcgttccgacccgacgctctatgcgcagtttcttcgtgtcatcgcaagctccggggtggatgcgccgcaaggtggcaaatccggaaagcctttcgtcgcgacgatcaagggaaagcgctttgttttccagcacgacaggagaggcggcgaagcctacgtgatgatcagcctcgacaattgaggccggttcgcaaccgggcggggcgagccgatcaagccccgtccaaaggctccacgccctgcgccttgccggcgcggtcgagcctgatcttctcgatgcggttttcggcggccgacagcagcgtctcgcaatgcttcttcagcgcttcgccgcgctcgtagatctcgatggattcgtccagcgccacgtcgccgcgttccagccgcgcgacgatgctttcgagttcggcgaccgccttttcgaaggagaggccggaaacctccggcttggcgttgtcggtcatactcaacccttcatcattctcaaaacgtgcagcccggccgattcggccagaccctcgagatcatagccgccttccagcaggctgacgacccggttgccggcacttttgtcggccacttcgagcagccgtccggtcgcccagtcgaagtcctcgccgacaaggttgatctgcgccagcgggtcgcggtgatgcgcgtcgaagccggccgagatgatgatgaggtcgggacggaaatcgatgagcgccggcagcacgcgggatttgaacgcctcgcggaaatgctcgctgccgacattgggtgacaatggcgcgttgacgatcgtgtcgtgcgcgccggtctccgtcttggcgccgctgccgggatagagcggcatctggtgcgtcgagcagaacagcaccgacggatcgtcccagaagatgtcctgcgtgccgttgccgtggtgcacgtcccaatcgacgatcgccacgcgctcggccccatgccggcgctgggcgtggcgggcggcgatggcggcgttgttgaagaagcagaagcccatcgccttggatttctcggcgtggtggccgggtggccgcgaggcgacgaaaacattgtccgccttgccggtgaagacgtcgtcgaccgccgccatcgcgccgccgatccccgtcagcgccgcctgcaggctttttgggctggcataggtgtcggcctcgagctggttgatctcgccgtcttcctccggcacctgccgcatcacggcgaagagatgctcttccggatgcgccagaagcacggcgtcctcggaggcctgcggcgcctgctggcggtccagccggtcgaaatgcggatgccccagcgccacgttcagcgcccgcagccggtcggatcgctcggggtgtccctcgggcgtgatgtgttccagaaagatcggatgttcgtaaaggcgggtgctcatgcaatcactctatctgcctgcctcgtgatgttccacagcagatgggacagggcgcgatgatttcaacaatcgcgcgttgtcatacgcctttcgccttcatttacataatattagcgcgacgttattcttggttggcaagagtaagagtaggggtcagagcagggggaaacgatgaacgccgcgatgcgctccaatatcgtgcagatccacgtgccgttccgcgatgtggacatgaacggccagatgttcctcggctcctacatctcctacgccgaatccgcgctggcgaaattctggtccgagcgcccggagcttgccgacgagccgctttatgtggcgagcaagatcacctgcatcctgcatcgtcctttgcgctatgacgaaatggtgctgttcaccaccgccgtcgacaagatcggcgtgcgctccgtcggcttcatcatcgcggtggacacgggcgacgagcgcgccgccgaggtcgagatcgtctggcaggcgcagacccgcgaggacaaggcgccggtcccgctgccggaggtgacgcgggactggctctacggtttcatgaactagcttctggcttggctcttgccttagcctttgaccggcagcagcggatagccggccatgaccgcgcggccgaccagtgccgccacgaaggccttgatcacgtcgccgggaatgaaggccatcgatccggtaaacgccgccgtgaggccgatctgcgcggcaaaggcgagatagacgatcccgaatgcataaagcacgacgatcccgcccatcatggccgaaaagaagaagccggtcagctgcatgccggccgcctggccgtgcttcaccagccgctcgctgagatagcccgtcgtgaaggcggcgaagacccagccgatcaggaagccggtggtgggggctgcgaaagccgccagcccgccacgcccgcccgagagcacaggcaggccgatggcgacaagcaccagcacgatcagcaccgccacggtgccgcgtcgggcgccgagcaccacgccggccatcatcacgcccagcgattgcgccgtgatcggcaccggaatgaagccgagcgtgatcggcggcaggatgccgagcgcgacgatgatggcggcaaacagggcggaaagaacaaggtctcgggtgctcatgatggctccgtggttcaacatattctaattcacatgccgccgaatgccgcgcgcgtcaatcgcggccgcgatgttatcggcatccttcagcgtcaggatgatcagcggcaccagcaccgttgatggccgcaccttcagcccgcgcgcgcggtgcgcctcggcgatcgcgtggtagcggccgataatttcaggcacgaagcgcacgaccagcccgacggcaagcccgacatcgtcggcgcgcaccagcccgagccgctccagcggccgggcggccagcgtgatctcgtccatgaaggcggcgatcgtcgtggtcgccgtgacgctcgcggcaaacagcatcagcgccgtcagcctgagcagcgccaccaccgcgccatgccagggattgaaggcgaggctgaagacggcgacgatgacaatggtgagcaggatcggcttcaaccgggcgagcgcggagcgaaccggcatgccgatgccgaaatagacgacgccggtggccgcgacggcgatggccaggagcgcgatgttggcggtggcaaagagcgcgatgccgagcacggcaagcacgatgagcttcacccgcgccgatatcaggtgcagccggctgttgccctcgacgtaaagcgattgcatcaggccgcgagctcccggtagcaggcgatcgccgcagctgccggcgcatcggccgccagctgcccctcgtgaaacacgagcacgcgcggataatcggcgatgagctccagatcgtgggtgatgacgatggcgctttcgtgcaggctctcgatcagccccttgacgaggccgcggttgcgcaggtcgagctggttggtcggctcgtcgagaatgaggatatcgggaccggtggcgagaaccgagcacagggccgccatctgcagttccccgccggaaagctcgtgcgcgcgccgctcggccagatgcccggcattgaagcggtcgagcacctccgccaccttcgcctcgatttcagccttcgaaagcccgcggctcttcagcccgaaggcgatgtcgtcgcgtacgacgggcaggatgatctggttctgcggcgactggaagatgaagccgacatcgccgcgtgccgccttgtcatcggaagtgtcgcgcccgttgacgatgacgcggcctgacgtcggcttggtcaggccgttgatcaggcgcgcgaaggtcgtcttgccggagccgttcagcccgatgatggcgatgcgctgttcattaagctccagcgtcagcggctgcagcgctgtccgcgacccgtagctgacgccggcgctttcgaaacggatattcactgcgtccccccgagatgaagcgccgttctataaacgaatcccgccggagggaagatcaaaacgcgacgcgaccttgaccccattgcatcctcgcccgaacccgccatattcgggtggccagggcatgtcgcgcaaaagtgtgaagcggttttgcgataagggcatgcggcaaaacagggacctgaagcgcaacgcgcttcaggaacattttccggattatcatcgctgtcatgaccaagctgatctccaatgccgacgcccgccgcatcttcctggccaagcagggcctgagcgccccgcccaaccgcgtgctcaccaaatccggcctgttgcagctgatccacgatctcggcttcgtgcagatcgacagcatccagtgggtggagcgcgcccatcaccagatcctcttctcacgcaaccagacctacagacgcgagcacctgacggcgctactcgaaaaggatggcgcgctgttcgagcactggacgcacgacgcttccatcctgccgagcagcttcttccgctattggaagcacaagttccggcgggaggaggaagtcttggtggatcgctggcgcaaatggcgcggcgagggcttcgaggacgccttcgacgaaacctatgagcgggtgagccgcgacggcgcgatcatggcgcgcgagatcaaggccgatggccacgtctccggcggctggtggaactggcaccccaacaagacggcgctcgaatatttctggcgcaccggcaagttcgccatctcgggccgctcgaatttccagaaggtctatgatctggtcgagcgcgtcatcccggccgagttccacgagcccgaggtcagccgcgaggaattcgtggactgggcctgccgcagcgccctgacgaggctgggctttgccacccatggcgagatcgcggccttctgggcgctggtctcgcccgatgaggccaagggctgggtcaccgcccaccgcgatgagctgaccgagatcctgatcgagccggcactgggcggcaagccgcgcccctcttgggcgtttacggatttcctcgatacgctcgatgactatcccgcggcaccaccgcgcatccgggtgttgagccccttcgatccgatgatccgcgaccgcaaccgcaccgaacgcctgttcggctttttctatcgcatcgagatattcgtgcccgagccgaagcgcgaatatggctattacgtctttccgctcttggaaggcgatcgcctgatcggccgcatcgacatgaaggcggaccgcaggaagggctcgctcgacgtcaagcgcctgtggctggaaccgggcgtaaagccctccgccggccgcctcgaaaagctcgccgccgagcttgatcgcgttgcccggttcgccggcgtcgaacgcgtcgagatgctggaggggtggcgcagctaaccggttgtcatcgttgagatagttcggattttagatgattaccgcctgttaatcttgacgggggtttaccatgcttctcgcgaacttcttaagcaccgcccttctacgatggcggcatgaaaacacgagcgatcagatacgccgcatggacggcatggaacagcctcgcccgcagggtcagagcactgatgcgtaaccgtcgcgacgcgcgcgccgccgcggcctccatcgtctcgcgcagcgaacagcgtgcgcggatgaagcccgttaccgtcaagtcggccctgatcgacgcggtctatttcagccaggaagacggcagattgcgggtttgcctgaacaatggcgaggagcgcatgttcgaaggcgtggccgaggctcatgtcatcgccatggtgacgtctgaatcgccgggaaaatattacatgcagaacgtcaggacacgcttcaagcgcatcgccgcctgacgacggttcaaaccggcgagccttgcccgccggctgatcatttgatcggtctcagccgatctccgtttcggcgatcttgatgccgaagccttcgaggccgacatagtggcgctcgctgcgggtcaaaagcttgatcgagctgacgccgagatccttcaggatctgcgcgccgagaccgatttccagccattcgctttcacggttctgcgcttccgcatgggcttcgcggccttggccgagagccttacggccgttgtcctggtggccgacgccgaccgaaccctcgcgcagatagacgatgacgccgcgacccttctcggcgatcttcttcatgtagtgatcgacggagcgcttgccgaacagatcgtccacgacgctttcggtgtgcaggcgcaccggaatgtcgacgccgtcgcgaatatcgccgaagaccacggcgagatgctgcatcgggtcccagggcagcgaatagctgtgcgccttggccttgccgaacggcgtttcgacatcgaagctcgcctgcagctggatcagcgtttccttgcgctggcggtaggcgatgaggtcggcgacggagaccagcttcaggccgtgctcgtcggcgaagctcgacacctgcgggccacgcatgacgctgccggtgtcgttgaccagctcgcagatcacgccgatcggcggcaggccggcgagcttgcagaggtcgacggcggcctccgtatggccggagcgcatcagcacgccaccctcgcgggcgaccagcgggaagatgtggccggggcgcacgaagtcggacgcgccgacattcgggtttgcgaggttgcgcaccgtcagcgtgcggtcgtcggcggaaatgcccgttgtcgtgccgtgcttgaagtcgacggtgacggtgaaggccgtcgtatgcgcgctatcgttttccgcgaccatggcgttgaggccgaggcgcttggcttcttccttcggcatcggcgtgcagacgatgccggaggtgtggcgcacgatgaaggccatcttttccggcgtacagtgaacggcggcgacgatgagatcgccctcgttctcgcggccgtcgtcatccacgacgacaacgatttcgccggcctcgaaggcccggatagcgtctacgacgcgcttctgatcataagccatggcaagcgtcctatttcagccggccggtctggccgcggtcacggagatagtggtcggcgatggcgcaggcgatcatcgcctcgccgatcggcacggcgcgaatgccgacgcaggggtcgtggcgacccttggtgcggatgtcgacattcttcccatcggcgtcgatcgactggcgctccgtcaggatcgacgaggtcggcttgatcgcgaaacgcgcgatgacaggctgccccgtcgagatgccgccgaggatacccccggcgtgattggacaggaagatcggctggccgtcattgcccatgcgcatctcgtcggcgttctcttcgccggtgatctcggcggcctcgaagccgttgccgatctccacgcccttgacggcgttgatcgacatcaaaagcgaggcgatgtcctggtcgagcttcgaatagatcggcgcgccgagaccggccggaacgccgtcggcgacgacttcgaccacggcgccgatcgacgagcccttcttgcggatgccgtcgagatactcttcccacactggaacgatcttaggatcgggcgcgaagaacgggttctggtcgacctgatcccagtcccagttgtcgcggttgatcttgtgcttgccgatctgaaccagcgcgccgcgcacgcgaacgccgggaacgaccagccgcgcgatgccgccggccgccacgcgcgccgccgtctcgcgcgccgacgagcgcccgccgccgcgatagtcgcgaatgccgtatttcagatcgtaggtgtagtcggcatggcccggccggtactggcgggcgatctcgccgtagtccttcgagcgctggtcggtattctcgatcagcatcgagatcggcgtacccgtcgagatcatcgtctcgccgtccgcgtcgagcataacgcccgagagaaccttgacgaggtcgtcctcgcggcgctgcgtcacgaagcgcgactggccgggcttgcgcttgtcgagccatacctgcagctcggcgagcgtgaagcgcaggccgggcgggcagccgtcgacgacgcagccgagcgccggtccgtggctttcgccccaggtggttacgcggaagaggtgaccgaatgtattgtgtgacataggctccgaccggatcgcgccgccgggcgtcgcctggccgcgccattctttaaaaaggcgcgacactcataggccaaaaggcgggagggcaaaaggctttctttgcgccaaaccgtctcgatcgggaaacggtgtttcctctcatgcgcgaacaagcgcccacggcggcgctatgaggcgatgcgccaggccgtgccgatggccgcttgcgtgaaatcgtcgaaggacagcgggcgcgagaaggcgtagccctgcagcaggtcgcagccgagttcgagaagcaggctcgcatgcgccacggtttcgacgccctcggccacggtctcgacgccgagcgagcgggcgatgtcgatgatcgaccgcaccagcgcgcgttcctgcgccgaggtgatgatcggctgcaccagctgccggtcgatcttcagccgcttcggcttcagtttcagcaggctgacgatggaggtgtgacccgttccgaaatcgtcgatctcgatgtcgatgccgagcgccttgatcttctcgagattctcggcggcgacgtcctcgctctcgtcgaggaagatcgattccaccagctcgaacgagatttcgccggggctgatctgcagcatccggagcgaatcggccagcgcgtcgtcatgcaggcgccgcgccgaaacgttgaccgacaccttgggaacgcagacgccgagcgccgcccatcgcatcttgtccttgagcgctgtttcgagaacgatgcggtcgagcgtttgcacgacgttgatctcttccgcgatcttcaggaatttgtccggcgtgagcagcccgcgggaagggtgctgccagcgcaccagcgcctcgacgccggtaagctgcatggtgcgggcactgaactgcggctggtaccaggtggtgaactcgccgttctcgatgcccgacaggatctcgtcggccagccgcttgttgttgatgatgtcggcctgcaggttgtgattgaagaactggaagcggttgcggccctggctcttggcgcggtagagcgcgatatcggcgttgatcagcaccttgcgggcatcgacgcgcaggccgctcgccagcgcgatcccgatcgacacgccgcagcggcaggcaaacccctggaaatcgatgggctggcgcatctcctcgacgatccggcccgccagcgccgacatctcggcgtcgttggcgttgagtgccagaatgacgaattcgtcgccgccgatgcgcgccacgatatcgctcgggcgaatgctgcgcgagagcacgcgggacgcatggacgagcatggcgtcgccggccgcgtgccccagcgtgtcgttgatctccttgaagcggtcgaggtcgatgtgcaggatcgcgaatttctgcctggcgtcctggccggcctgggtcagctgctccagcgccacgtcgagcttgcggcggttggcgagcccggtcagcggatcgtgcagcgaattgtgctcgatcctggcattggcgagttcgagctcgatgttcttgccgatcgcctcgtccttcgccgccttcagctccgccgtcatcagcgcgtcttcggtgatgtcgaaggcaacgccgatgatcttcagctggccgttcgccgtcgcgtgcaccttgccggtcgagcgcacgtaccgcatccccccgtcctcggtggggacgcgacagacgacggtgtgggtatcgccgaccttcttgaaatatcgcgcgctctcgatcgcgagcggccggtcctgctcgagcacgcgcgacagccaggtctcctcgtccatgaagccggcgcgcggctccagcccgtagagctcgtgcatccggtcgtcccagaaggagccgggcttgccgagcgtggcgtcccagatgccgcactggtaggaatcgagcgccagatcgagcttgcccgagagttcggcgagttccgcctcgcgatgagagagttcgtcgagcgcaagttcgagctcggcgttcttgatgtcgctgacatcctttgcccggcgcatcgtctcggccgcgaccgcatcggcggtcacgtcccagacgatgccgatcgtcctggtggtgccggccgcgtcgttgtagaccgagccgaccgatctcaggtagcgcgtgccgccgtcggaaagctcgatccggtattgcgtcgtataggaggagccggaccggccgtccttcaagaggtggatcttcgccaccctgcggtcgtcgggaacgatcgtttccagccagtcgtcgagcgggtagctgccttcgatcggcagcttgccgtgcagcgccgcggcccggccgtcccagaacaggctctgcccatcgttcctgagctcccagatgccgatattggaggtttccagcgccaggttgagccgctgcgaaagctccagcagcgttgcctcgcgcttttccagctgcttgatgttcctgttgcgctcgccaagcagtagtgtcgcgaagaagacgggaatgatcgtgagacaggcggcggccaggatgatgaaccgcagcgtccgctggttttccggcggggcggtccagcctgtcttcggcaccgccgcgatctcccagcgcccgcccgcgaaggttatcttgcgcgtcagcggccgctgcgccatgacctctggcgcgccaaagaacggggtgacagcggcgccggccgtgccgagatcgcgcagcgcgatggagaggcggtcgagctgcggatatttttcgcggttctcgctgtcgcgcgccggcctcaggccggtgttttcgtagaacatgtcggcgtcgatcaccgcctcgacggcgccccagacgcgtcgctggccattctccttgacgaagacggggaagaagatcgcgaaggtatccttgccatcgggcgtgcggatcggcccgtagaagcgcgcctgctggctgcccgtggtgcgcgcgaccgactggcgatccgagaggaattcgcgcacgtcgcggccgagcctctgcttggccgacgtcgaggggaacaccgactgcacgacgaaatcgggcgccacggcgatatgcacgaaatgcgggttctggatcagcagccagttgatctgccgttccatctcctcggagcttatcttcgagctgatcgcgaccaggttggagaggtcgcgtacgatggtgatgtccatgttgatctgcgcggtgacgcgcgcgcggatcaggccggtctcgttttccgtgcggatcgtcagttcgcgaagattagccgcggtattggcgcggtccaggctgaagccgacaataatgacgacgacggcgacgaggcaggaaaccagaaacgagatatgggtattcctcaaagcactccgcgttgcctcgttatgtttccggcggaatagcaaaaccccagtctccctgtttccctatgactgtaagtagcgggggttaatttacgatttcttacaggtagtattggagacacgttttaagtgtgcgactgtattaacgaagcctcttgattgttgttaaaatgcgcttcatcaattgggcgggaaaggtcacggttcagggcaacttttgccatattcgggaggttatctgtgcgccattggatgtttgagtcgtgttttcgaaggaatgccgttatgcgcttcgtagttgctacacttttggccacagcgagttttctgtcgccgatcagcggctttgccgaaagcgccgacgtcgaggcgacgatcaagaacatcgacatgagcaatctcagcctcacgctcgatgacggcaagacctatcaggcgtcggaagagttcaatttcgaaggcttgaaggcaggtgtgaaggtcatcgtcttctacacggaagtcgacggaaagcgcgtcatcaacgatctcgatatcgtacagtaattcggccggagatcagtttcagatccagccgatctgcttcgtgtcggtctcgatcttgagaatccggtcctgcgggatctcgccctcggccgcttcatccttcggcacgtcggcgatcgtcctgaacaggctgcgaatgaccccgccatgcgtgacgcagaccgtcggccggtccacctcgttcagccaggacgccacccgccacgacatgatctcgtagctctcggcatccgcacccggcggaatgaaatcccacttgttgagattgcgctccgtgatccggtcacgcgcggtcgccttcagttccttgaccgtgaagccttcccagtcgccgaacgagacttccaccagccgctcgtcggtgcggtagtcctcgggcggcaggttcatcgcttcgcgggcgatttccatcgtcgcgcgcgtgcgcccgagcgggcttgcgatgaagtcgaattcgatgccttcgactttcaggatttccgccaggttgatgccgttctggcgcgcctgttcacggcctatggcattgagcggaatgtccttttgcccttgcaggcgacgttccgcgttccaatctgtctggccgtgacgaatgacgtagataagcaatgatcggctccatattgcaaacggcccctgatcgcttccgcgaggaggggccgcgagcatgactcataagagagtacgatcagtcttttatgacggaaatatccggcgcgtccacagccttcatgccgataacatggtagccgctgtcggcgtgatgcacttcgcccgtgaccgagcgcgacaggtccgaaagcatgtagaggccgacatcgccgacttcttcgatggtgacggtacggcgcagcggcgcgttgtattcgttccacttgagaatgtagcggaagtcgccgataccggacgccgcgagcgtcttgatcgggccggccgagatcgcgttgacgcggatgttcttcggtccgagatcgaccgccagatacttcacgctggcttcgagcgctgccttggcgacgcccatgacgttgtagttcggcatgaccttttcggcgccgtaataggtcagcgtcagcatcgagccgccatccgtcatcagcttctcggcgcgacgtgcgaccgaggtgaaggaatagacggagatctgcatcgtcttggcgaagttgtccgccgtggtgtcgacgtaacggccggtaagctcgtccttgtccgaaaagccgatcgcatgcacgatgaagtcgatcttgccccaggtcttctcgatattgtcgaaaacctcgtcgatcgatgcttcatcgctgacatcacagtgtccggcaagaatcccgccgagttcggctgccagcggctcgacccgcttcttcagcgcatcgccctgataagtaaaggcaatctcgccgccctgtgcatgaatagccttggcaatgccccacgcaatcgaccgattgttggcaacgcccatgatgacgccgcgcttgcctgacatgaggccttgtgcctgagccatgtttcgccccttaaataattgatcgatcctgcctatggcatagccggccaccctgttcaagattggcagcaatcatcaactgttagggagcgtaacaaagggtgctattgtcacctaaaattcacaaaaacagcccgttcttcataattcgcatcagatccgtgaccttatcgtcgggtttttcccacaggataatgcgcagttcgaccacgagatcgcccttttcgccatccgttttgggcaatccctggccttcgaaccggattgatttgtccgatcccgaccatgccggcacggtgaccgtcagcggtccgttcggcccgtcgatgcgcgcgtcggtgccgagcacggcgttctcgatggtgacgggaaggacggtgtgcaggtcgaacccgtcgacggtgaagtctgggtgcggcgcaatgtggatgttgacgaccgcgtcgccgcgctgcatgcccgtcagcttgtggccctggcccttgaggcgcaccgtctggccttccgtcatgcccggtgtcagcgtgaagccggcgtcgcggccatcgccgagatcgacgttcacccaggcgcccttcaggatatcctcgatggtcacggtcgcgatggccagctgatccggcgccttctcgggcaccggtgccgcgccgccggtaaagcggcggacgaaggaggtgagcaggctgagcggctgcaggacggcgctggtggcggccgctgcctcttcggcgtgctcgtcttccgtcgccttgccggcgacgccggccttggcgctctcgtttggcttgtccgtctgcctgtcggcctcggtaccctcggtctccggacgcttggtcttgccggaagcaaagccgcgcgtccgtccgccgccgctggcggtgcgggcctgcgcgccgaagatccgttcgatcatctcttcagccggttcggcggcgccggtctgctgctgttgctgttgctgttgttgcggctgcttggcggcctccgcggccgccttctgcgccgccgcgcgcgccagctcttccatcacccgctcggcgttttcctgcgcctgcttggcgcggatcgccgcctcgcgcgccgcctggcgctgcgccatgatggtgttttcgttctgcttttcgttctgcttggcttcggccgcccgtgcggcgctgtcgaaaagactgcgcttcctcgggtccttcagcgtgtcgtaggcgcggccgatctcggcgaagcgggcgccggccaacgggtcgccctgattgtgatcggggtgcaccaccttggccatgttgcgccaggctgccttgatctcgtcctgccccgcatcgcgcctgacgcccaatatcttataaggatcgcgcatgttccaaacccgcccggtgtccaaatgcgggttgcccgtttccgttgagcgccccgcagccccgattaaactcatttggtgcgccgaagttcgcttcgcgggcggaaaatctgcgcacatatgcgaagcacagtcccgtaaacttgctaatcagtccttatttggcgccaggacactccacggttttacgcgggatggttatcttttgctaaatcttgaaggaaaggccggagcagccgttaacgcctgcccaaaaaggccggtcagctttccggctggaagctcagcagctgccagttgccgccgccgacgaggcaggtcttgccgtagaatttcgagatgccgacataggagtggcgcgtcgtcttgaactggcggcagacctggccggtgtcgttgttctcgacgatcgtgtcgatcacgccggcgctgcctgttgaggcgttcgcccagggaagcggccgtccctcaagtccgcgaatatccgccgatgtcacggcattgcccacggtcatttcgtcggagatgctgtcgctcgtcggcgccggctgcggcagcgtgccggtcaccaccgaacggtcgaccttgttgccgctcagcatgtcgagcccgccggccatgcagccggagagagaaagcacggccacgccgacaacgcagatggccgcgcactggcgcatcaggccctttgtatgacgaactgactttgctatgacttccaccctgtgtcctgtccagtggttttgggctgggcaattatcgaataaacccggggcatttgagctaatatgtcggaaaatgagttaacaaccagtgacttcaccgagcaaaacgagccgttccagctcttcgcggaatggctgaaggaggccgaggcttccgagatcaatgacccgaatgcggtggcgcttgcgacggtcgacgaagacggccttcccaatgtccgcatggttctccttaagggattcgatcaagacggatttgtgttctacacgaatttcgaaagtcagaaaggccgcgaagtcctcggccagaaaaaagcggccatgtgctttcactggaagacgctgcgccgccaggtccgcttgcgcggcccggttgaagtggtgagcgacgaggaggccgacgcctattacaagacccgcgcccgcggcagccgcatcggcgcctgggcctccaggcagtcgcgcccgctcgaaagccgcttcgcgctggagaaagccgtcgccgaatacacggcccgctatgcgatcggcgagattccgcgcccgccgcactggtctggctttcgcatccggccgacctcgatcgagttctggaaagaccagaagttccggctccacgaccgcatcgagttccgccgcgccgcgcccgagggcggctgggacaaggtgcggatgtacccctgagcgccacgtccggcgggatgtccgttggcacaccaggaggtcgccgccgatgacgcaaggaaggagtgccgtgcaccacggcgcttccgtttcgaattttcatcctaggttgaaaaaaacgagccgccggagaggcgccgccgctcgcgaatggcgcgcgagctcaaaataacgtgatcggtggataatagtcgggcggggccgatcgtcagccgcgatcgcccatcagcttcaatggaatccccgaagcgaggccggagacatagcgcggtttctggtaaaggccgttgatcgacaggcggggcaggtaggtggagcgcgcaagcgattgccggccgatgacgccgggctgcgtcgtgaccgcgacggaaaagccgaggtccctggcgatcgtcgcctgctgctgcgtcaccgcctcgcgcgttccataaggataggcgaacgcccccgggcggtggccgctgatcgcctcgacataatccgaagagtgcgccatctcatcgcgaacctcggcgtcggacagccgcgccacggcgcggtggctgacggtatgggcgccgagcgaggcgagcggactggcgtcgagcaagttgagctccggcgcgcccatcaccagatcatcgacgatctcgaccggatcgaccccgtgcgaccgcgccagcgcatccaccgccgatacggccgccgtctcctcatgcgcgtgaatatagcgcgcgaagcgggcgaaggcgcggtgcttgtcctgaggggtcgcggtgtcgatcgtctcggcgccgtcgccgaaatcgaagctgatcttctcctcgcgcctcaagagcgccgtcagcgtctcccaccagatcgtatgcgtccgctcgaccagccccttggccacgaagatcgtgaacggcgcctcgtgccgctcgaagaccggcatggcgtagaccagattgttgcgatagccgtcgtcgagggtgaacgcggcgaagggctgcgagggcttcggctccgcgagcgcatcgggaacctcggccagagacacgaagcgatagccgtcgctcttcagtcgtgtcagcaccgcgtcgagaaattccggcgtgatctccagatgcgcgttcggcgaaaaggcggaaggctcgtaggggcggacgtgatgcagcgtgaagatcgcgcccatgccgcgcgcgccgcgcatcagcccgaccgagcgcaggaggttggccacctccagcccgcctgttatcgcgattcgctttgccagcattctggcgttcatcgtctccgctccgttcgcgggctcgtgagaagggcaaactctagcaagtcgggggttaagccttgctgaacacccacttcgcacgcgtggtttacggttttttcaccataaaggataaaatttgacaaaaatggtccacgttgccgcaaagtcgcgccatattgtgtccttctgtacaagaacgggacaaattccgggcgacgagggtcggccgttcatcgaggggaagtgcatgagaaagctgttggccgcgattataaccgcgacgttggtcgttgcggcgccgttgtcggccatggcaggcaacgcttcgctcatcctcgatgcgagaaccggcaaggttctgtcgtctgaaaacgccgatgtcctcaattatcccgcgtcgctcaccaagatgatgacgatctacatggccttcgaggccatcaatcgcggcaagatgagttgggatacgccgatcgtcatgtcgaaatacgccgcctcccggccgccgaccaagctcggcgtgcggcccggcacgacgatcaccgttcgcgaggcggtcctcggcatggtcgtcaagtcggccaacgacgcggccagtgcgatgggcgagaagctcggtggctccgaagccaatttcgcgcgcctgatgacgcagaaagcccgtcagctcggcatgagccgcaccgtgttcgccaacgcgtcgggcctgccgaatcgccagcaggtgaccacggcccgcgacatgtccacgctcgccatcgccctgatgaagaactatccccgcgaatatcgcctgtttgcgaccgagagcttcaatttccgcggccgcacgatccgcggccacaacaacctgatgtaccgttaccagggcatggacggcatcaagaccggctataccaacgcctcgggcttcaacctcgtcagcgccgtcagtgacggcaaccgccgcttggtcggcgtggtgctgggcggccgcaccgcccgcagccgcgacgacaagatggccggcctgctcgacaaggccatgggccgcgcatcgtcttcgggcggcgcccgcctggttgccagcgtcaattcgcgccagccggtcgaagtcgcttccgcggcagccgcgagcgacctgccggttccggcatcggcgccgcgcgtcgaggatgtcgcgccggccgcgccggagattgcccgcagcgagctgacgccgagagccctcggctacctcaccgacaccattccgcaggagcgtccgtccgcgctcgacgccgtgaccccgccggccagacttgccccctcggcgaagccgcccgcatcggtcgcctcgacgggcgactggcagatccagatctccgccgccccgagcgacgacgccgcccgcgcgcttctcgcccaggccaagtccgaaggcggcgccgcgctgaagttggccaacccctataccgaagccgtcggctccggcgccaacaaggtctaccgtgcccgcttcgtcggcttccagagccgcgacgccgccacctccgcctgcgacgcgctgaagaagcgctcctacgactgcatgctgcttcccgaccgcggctgatcccgcccacctgagagcatggacattgccgatgaatcagggttctcctacgtaaacgaaaggagaacgtgatgctggatgatcttgccctgaaattcgagcgggcctcgcgtgcctatgtcgaggaaaacggcatcacccgcgatgccgactggttcttgctgaaactccaggaagagatgggggagctgacccaggcctggaaccgcgtgagcgggcgagggcggcccaaggggcgctccggcgaagagatggtccgcgacctcgaagacgaggcggccgacgtgctcggccacatcctcctcttcgcgcacaggaataacctcgacctggccgccgcgatcaagcgcaagtggctgttttcattggaagattatggtgcgaacagttgaagacagcgcccgcccggtcatgcacgagcgctgcttttttcctgtaatcaggtttgcgtgccgccgacggtgacctggtccatcctcagatgcggctggccgacgccaacgggaacccactgtcccgccttgccgcaattgccgatgccggtgtcgagcttcatgtcgttgccgaccatggaaatccgcttcatcgcatccggaccattgccgatcagcatggcgcccttgacggcgggaccgatcttgccgttctcgatcagataggcctcggtgcagccgaacacgaacttgccggatgtgatgtcgacctgtccgccgccgaaggagacggcatagatgcccttcttcaccgaggcgatgatttcttccggcgtcttgtcgccaccaagcatgtaggtgttggtcatgcgcggcatcggcacatgcgcgtatccctgccggcggccgttgcccgtcggcttcatgcccatcagccgggcgttctgccgatcctgcatgtagccggtgagcttgccgttttcgatcagcacgttgtagcccgaaggcgtgccctcgtcgtcgatggtgatcgagccgcggcggctgtcgatcgtgccgtcgtcgaccacggtgacgccgggggcggcgaccatctggccgagcaggccggcgaaggccgacgtcttcttgcggttgaagtcgccttccagcccgtggccgacggcctcgtgcagcatcacgcccggccagccggaggagagcaccacgtccatcgtgcccgcgggcgcgtcgatcgcctcgagattgacgagagcctggcgcagcgcctcgtcggcgccatactgccagttgccctcggcgatgaagtcgccgaagccgatgcgtccgccgctgccgtaggagccgctttcctggcggtcgccctggccgaccatgacggagatgttgatgcgcgtcatcggccggatatcgcggacccggtggccgtcggcgcgcaggatgtcgaccacctgccagctggcggcgaccgaagccgtcacctgccggaccttgtcgtccttgccgcgcagataggcgtcgatgtcctgcagaaccttaaccttctcctcgaaggtgggcgagccgatcgggttctcgtcgctgtagagcttcttgttggtgccttgcggagcggccgcatagctgccggaatagccgcgcgtcaccgcgcccaccgcgtcggccgcccgcttcagcgccgaaaccgagagatcgcccgcatgagcgtaaccgacggcttcgcccgccaccgcgcgcagtccgaaaccctgctcggtgttgaagctgccgcccttgaggcggccattgtcgaacatcagcgattcggcctgcgcgtgctcgatgtagagctccccgtcgtccgaaccggaaagggcctcggcgacaagcgaacgcatcttcgcttcatcggcgtcgaaaagcgtcaggagatcggtattcatggcgttatgctccgctgcggcaggaaatgcttcctgccgatgtaggtcccggggacggttcgagcaagtgtcgaattggtaaggatcgcacaagcgaccataagcggatagcaggccctgcgatcagggaagcgcgtcgtagccttccgcgaagcccttgaggtcgacgggaatgccaatgccctcttcaggcgtctggaagacgatgaaggtggcgctggcgccgctgcggaaggtcttcagcagctcgtcctcaagcacgacttcggcgtagcagccgtcggcgaagcagcgcacgaagtaggcgcggccgatatccttgccatcgacgttgaggccgaggccgttcggcagaagcacgccgagcggtgcgagaacgcgcagaatcttcgatttgcggtcggcggtcttcagtaccaccaccgagaggcccacttccggccggtcctcggcgatcacgttctgcatcagcgcgcattgctcgacggaagcgccggccggcttgtcgcagaccacggaccatgcgccgtgattggagcggacggtgccgggtgcctgcggttgcgtctgtcctggtgtcgcctgcgcggcaggggcgccgggagcgggctgccctggcgctggctgctgtgcgaaagccggaacgatcgccgcggcggtgatgcaagccgacagcacgaacggccgcactcgggaacgaaaacccatgaaaacctctgcagttcgaatcagtgccgctaagttggggcgggccgtccaaaatgaaaagccccaaccgctgaaaagcgggggactacggcggaaatgggacgtttcttgattattcttggaaagggtggctggccgacgccaacattttccgtatcatagggaaaatcacggcatgtttcgatgcgcccggaggaggggtgtaacgaagcgaaaatgccgcatggccaaactctttggattattgcggcaagtgctaaactgtggtttgaagcgcatgaggatggcaaggattctgcgtggtgttgcacgcgggtcagcgctcgagggagatgaaacgtgattaagaaggcctatgcaggcatgaccgcgatggtctgtctgctttttgcttccggcagttatgccgatcaaccgttgccgtggcagaccactttgcagcctgccgcgacgccgatcatgcgcagtattcgttggttcgaacagtatactctttggtttattgttcccgtgacgctgttcgtgctcgttcttcttatcatcgtctgtcttcgcttccgcgccggtgccaatccgacgccatccaagacgagccacaacaccgcgatcgagatcgcctggaccgtgggaccggtcctggtgctgctcttcctggcgattccgtcgttcaatctcctgaccgcgcagctgacgcttcctgaaaaccctgatgtcaccatcaaggcgaccgcgacgcagtggcagtggaactatgaatacgaaggctcgggcgacaatccgctggccttcgacagctttctcctgaaggatcaggaccgcgccgccgccggcaaggaagacaaggccaggtatccgcgccttctggccgtcgacaacgaactcgtgctgccggtcaacaagacggtgcgcgtgctcgtgacggcggcgccgaccgacgtcattcacgccttcgcgatgccgtccttcggcatcaagatcgatgccgtgcccggccgcctgaacgaaacctggttccgccccgagcgcgagggtctgttctacgggcagtgttccgaactttgcggcaaggaccatgcgttcatgccgatcgccattcgcgtcgtttccgaggacaagtacaagcagtggatggcgtccgccgcctccgacctgccgggtgcttacaagaacctcatggctgaaaccgatggtcccgcacgggccgtcgatgtcgccgaaaacgtcgctcagtaaaggaaaaggaacgggacatggctggaccttccgcacacgatcattcgcacgaccacgatcatggcgcgcacgcccatgacgatcatgaccactcgcacaagccgagtttcgtcaatcgctggctcttttcgaccaaccacaaggacatcggcacgctctacctgatcttcgcgatcatggccggcatcgtcggtggcgcgctttccgtcgccatgcgcatggagctgcaggagccgggcatccagatcttccacggcctggcctcgctggtctacggctacgagggcgatgccgccatcgacggcgccaagcagatgttcaacatgttcacgaccgcgcacgcgctgatcatgatcttcttcatggtcatgccggcgatgatcggcggtttcgccaactggatggtgccgatcatgatcggcgccccggacatggccttcccgcgtctgaacaacatctccttctggctgatcgttccggccttcatcctgctcatcatgtcgatgttcgtggaagggcccgcgggcgcctacggtgccggcggcggctggaccatgtatccgccgctctccagctccggcacgccgggccccgcggtggatctcgtgatcctctcgctccacatcgccggcgcgtcgtcgatcctcggcgcgatcaacttcatcaccacgatcctcaacatgcgcgcgcccggcatgacgctgcacaagatgccgctcttcgcctggtcggtgctgatcaccgccttcctgcttctgctgtcgctcccggttctggccggcgccatcaccatgatgctgaccgaccgcaacttcggcacctccttcttcgtgcccgagggcggcggcgacccgatcctctaccagcacctgttctggttcttcggtcaccccgaggtctacatcctgatcctgcccggcttcggcatcatcagccacatcatctcgaccttctcgagaaagccgatcttcggttatctcggcatggcctacgccatggtcgcgatcggtgccgtcggcttcgtcgtctgggcgcaccacatgtacacggtcggcctgtcgctcgacgcgcagcgctacttcgtcttcgcgacgatggtcatcgccgttccgacgggcgtgaagatcttctcctggatcgcgacgatgtggggtggctcgatcaccttctcgacgccgatggtctgggcgatcggcttcatcttcctgttcacggtcggtggcgtcaccggcgtgcagctggcgaacgccggtctcgaccgttcgctgcatgacacctactacgtcgtggcgcacttccactacgttctgtcgctcggcgccgtcttcgccatcttcgcggcctggtactactggttcccgaagatgaccggctacatgtacaacgagttcatcggcaagctgcacttctgggtcatgttcatcggcgtcaacctggtgttcttcccgcagcacttcctcgggctggccggcatgccgcgccgctacatcgactatccggatgccttcgccggctggaactatgtgtcctccatcggctcctacatctcggccttcggtgttctgatcttcctcttcggcgtctacgaagccttcgccaagaagcgcgtcgccggaaacaatccgtggggcgagggtgctacgaccctcgagtggcagctttcctcgccgccgccctatcaccaatgggaacagctcccgcgcatcaagtaaaagggtgcgagacatcgcgaccgccgccgaagttgcgtggcggtcgcgctccaagtttgcaggacaagagtaaatgacagttatcgacgatcgcagcagcctaggagacgacagcgagtttctcctgtcggaagccagcgcacgcgattatttcgagctcctcaagccgcgcgtcatgtcgcttgtggtcttcaccgcattcgccggcctgatcgtggcgccgggctacatcaatcccgtcatcgggatcatcgcgatcctttgcatcgccgtcggcgcgggcgcgtcgggcgcgctcaacatgtggtacgatgccgatatcgacgccgtgatgacgcgcaccgccaagcgtccgatcccggccggccgcatcaagcccaacgaggcgctggccttcggcctcgtgctcgccagtttttccgtgtcgatcctcgggctcgccgtcaactggctcgcagcctcgatcctggccttcaccatcttcttctacgccgtcgtctacacgatgtggctgaagcgctcgacgccgcagaacatcgtcatcggcggcgccgccggcgccttcccgccgatgatcggctgggcctgcgtcaccaacagcgtcaccatcgagagcgtcacgctcttcatgatcatcttcctttggacgccggcgcatttctgggcgctggcgctgttcaagatgcgcgattacgaggccgtcggcgtgccgatgctgcccaatgtctcgggcgagcgcaccaccaagaaccagatcgtcgtctacgccgtcctgagcgcggtcagcgccgttgcgccgacctcctcggcttcgccagcatcggctacggcgccgtcgccggcctgcttggcgccggcttcgtctactggtccgtcatctgctggcgcatgcccgaaggcgacgagaagatggtgccggccaagaagctcttcggctattcgatcttctacctcttcgccgtcttctcggcgctgatgttcgatcgcctggctgcctatgtcgtgactggcggaggttcgtggctgtgatcgataccgtcaagctgaccgacgcccagcgcaagtctcgccgcaaccgcaacgtcgcgctcgggctggttctggccggtctggtcgtgatcttctacgccataacaatcgtgaagtttatgtaggacaccggggacatgaacgatcagcaaggcacgccgagaaaaccgcgcaacaacggcgccgtcgtcctcatgtgccttgccttcgtcttcggcatgggcgcggcaagctatgccgccgtgccgctctataggatgttctgtcagctgaccgggtatggcggcacgacgcagcgcgtcgagcaggcctcgtccgtcatcctcgaccgcaagatccgcgtcaccttcgatgccaatgtcgcgcccgggctggaatgggagttcaagccggtccagcgcgaggtcaatccgcgcatcggcgaaacgatccaggtgaatttcaccgccgtcaacagatccagcaagccctcgcgcggccaggccgtgttcaatgtcacgccgggcgaggcgggtgtctacttcaacaaggtgcagtgcttctgcttcagcgataccgagctcaagccgggcgagacgctggacatgcccgtcgtcttctacatcgatgccgacatcaccaaggccgtggaatccaggaacatccacacggtcaccttgtcctatacgttctatccgaaggaaggaccgaagccggtggcttcgagcgaggataaaacgcaaaagctggaaaagaaactttaatactgggtccgttccggccacgccggagcggagaggaatagatccgggggagtgcatatggccgacgcgcatcagaaaaatcacgattaccacatcatagatccgagcccgtggccgctgctggcctcgatcggcgccttcgtcatggccttcggcggcgtcggcttcatgcgctacctcaacggcggctcgttgcgtctcttcggcatcgaatgggcgcatccctggctgttcttcatcggcctcgccgtcattctctacgtgatgttcggctggtggtccgacacggtgaaggaggcccatgagggctctcacacgcgtgtcgtgtcgctgcacctgcgctacggcatgatcatgttcatcgcctcggaagtgatgttcttcgtcgcctggttctgggcctatttcgacgccagcctgtttccgaacgaggccatccaggcctcccgcgtcgccttcaccggcggccagtggccgcccaagggcatcgaggttctcgacccctggcacctgccgatctacaacaccgtcatcctgctgctctcgggcaccacggtcacctgggcgcaccatgcgctgctgcacaacgaccgcaagggcctcatccagggcctgacgctgacggtgctgctcggcgtgctgttctccaccgtccaggcctacgaatacgccaacgcgccgttcgccttcaagaactcgatctacggcgccaccttcttcatggcgaccggcttccacggcttccacgtgctcgtcggcacgatcttcctggtcgtctgcctgatccgttcgatacgcggcgatttcacccccaagcaacacttcggcttcgaggcggcggcctggtactggcacttcgtcgacgtggtctggctcttcctgttcttctcgatctacgtctggggcggctggggcgcaccactcgcggcggggtgagggccgcgggattgaattgaataaggcgggtcgtgggaccagcctcaaatgcaaatgcggagccatcgagatgtggctccgcattttttgtttcgggggatgggggcggccctcagcttcgtctcacctgtggccccctcaccctaccctctccccgaggggagaggggaagatcgcgcagagggcgccgcttatcccttctccccct

SEQ ID NO: 21 - DNA, 70800 bp, Rhizobium matallidurans
  source 1..70800: mol_type = genomic DNA
ggtcgcgaatggacggatcatcacgcagactgcagcacatcccggtgacgacgtcgaagaactcccgcgccgaagccttaaaatttttgtgacgtcgaggcgcgtaacagacaaggaacagcgcaatgaccattcgacggcgaacgtgatcgagatccgactctctccaaatgaaggatttaccttttgtggctaaactctcagtcaaccaatacgatatttagaatgatggccttatgaacggcgcggcttccctcctggtagtgaacttcattatcgctgcgtcgttcggtgccgtgttttttgtcgtggcggcgcacagccgctcgcgtcgaccagcgcattggattggcgccggtttcacggtcgcttcgctgtcggcgatctgtgaactgctcgtcgcctatggcctcatgccgaaactctgggcgcttggcgccttctcgacggtcttgatcggtatggtcttgcttggcattgggatcggcgaacttcatggaaggcggctaccttcttggatcatttgcgcgttcgtggtcgcgagcgtcttactcgcttatatcatcttcgatcttccccgcggcaccccattacaagccttcctgtatcaaaccccgttcgcgatcgtgctgctgacgagcgcggtgtcggttgcaccatttggcaaacgcccccttatcgacagatttcttggtgctctattgttgatcacgggcctgcacttttacgccaaggcatggctggcggttatcgcgggagcaggcacttcggcacgtgactacatccacacagactacgcacttatctcacagagcgcgacggcggtgctcatcgtggcggttggtctgacacttcttgccacccttatccttgaaatcatgtcggaccagcgggatgaatcagacaccgacacgctttcgggcctttccaatagaaggaagtttgaacggacggttcaatccattctggcgcattcgcctgatggcaagcatgcgatcatcctgtgcgatcttgatcacttcaagaccataaacgacacctttggtcatcatgtcggtgaccttgttatccgggaatttggcagaaagctgcttcaccatttaccgctgcatgccgcggccgggcgcattggaggcgaggaattcgcggtcttcgttccaaataccgaaaccgatatcgccgtggggctcgcccagatactgagatccgccgcaatgacgctgccaggcttgccgggtgcgttgaaggtcaccgcgagtttcggcgtctcttcattcacctctcccggcgacctcgcagaagcccacaggaaagccgacacggcactttaccaggcaaagaacgccggcaggaacaaggtaaaaatcgcgcgtggtagagcgtgaagtgggaccacagcctttcctgggcgcggtaagccttagtgggaaacgttggtcttggtgtaagggtgacgcaccaccgtgcatgactggcagcgaaatagccacaaggcccctcgcacgctgcctgtttcgacggggctggggtgcaatggccgcgcctagcatctcaaccgatttcgtgagagttccacgtcttcgcggcccgcgcgaggtccgacctccggcaaagtcgataatggtccaacgccatcatatcgcggcagtccggtttctaatccacggagaatacatgatgctacgcacgtttcacggccgataagagtaagcttccgcatgttcttcggtaccaaaccgccgaagcgaggcagcgtctccgttaagtgcaactcaaaggagttactaaaatgaaactaaatctttcgtcggcagtcattcttgtgagttccgtcctgattggtaatgcattggcggcggaagcggacatgtccaagctcacctgcaaggaagtcggctccatgtccgcggctaggaagattggggcggtcatgtggatcagcggataccttcacgggaagcagaacaatccggtaatagatggtgaaaaggcgcacgccaacgcggtaaagactgtatcttactgcaagacgaatgccaccgcctctgttgctgacgcgataaactcgctcggtaagtaagacaggtggaacaagggaaacggccaagatccacttttcgccgttcccctaccaaaacactgcatcgccgcacgccgcccgcatccccagacgggcgcgctgcacggaagtcatcatctgagcaatgccactgctcttttcatccactaaaacagaaatgaattgatcagcatcaaagacatcaccgtcaaaccagctacctctattacctattgagacaaaggagaacagggcaatgaacttcaagacggtaatctccgtacttggcgtcgacggctgggacagggatctcaagaacgccaccgagttttgcgatgcacaaggggcgcacctgaccgcgttggtgatatgcatggggactgttccagcaatcgccacctatgaggcgatatccacctcgtggctggaagggcaacaaagagagatagatcggctgaccgaggaagctcgggcaattcagacggcactcgagcgaagcggcgtctcctttgacgtccaagaaatctacacggagttcgcgtgggccgacgaggatatcgccgagcgcgcgctctacgccgatatcgttctcgtcggtgcacaggccgccctcaacgagagcctaagaagtcgtatcatcgatggcgcgttgttccactctccgactcccatcataatcaacccgcgaatgcagaccgtcacgggtagtccgagatcaattgtgttagcatgggactcgagcgaggaagcggcaagggcaacgcgccaatcccttgagttcctaaaggagtgcgacgcggttcatgtcacattggtcgaccctgtcgcgcgaagctgggaaaatggtgaagagcccggatccgatgtagccacgtttctcagccgccatggcgttaaggtggaagttgactgcattgcgagcggtggacgtcgcgttgacacgacattgcggcaacatgcgatagatgtagcggcggatatggttgtgatgggggcttacagccacccaagacttcagcagcgcctctttggcggcattactcgttcgatgttacaagacagcaacgttccgctctttctttcacgttagttgactccctatcccgagcgaggcgccatcatcgcggagcacgaccgtgatccccaatttcatctgccattgaatgttcccccggaggtgagttccgaaacagtgatggagagcgcggttcggctcggacgacaccatggcgcctgcctggtcgcgcgtgccagcacggcgatcatttggccgcgggacgcgcttcaagcaccgggacaaggccgacattcaggtggaactgttcgaacgcgaggtgctggcgcggctggttaaacacttgcgacggtacgcgtcgagcttaagccttgacctgcgtcttgtcttcaaggaagcggagaccatgtcagcaacgacgaaactggcggaacttgcgcgagtttatgatgttacaattctcgagaacacggagtagcaagaccggtcatggagcgactcgtcctcaacagcgggcgccctctcccactgcttccaaattggtcgcttgatgatcgagttgataacgtggagatagcccgcgacggggtgcgaccgccgcccgagcgtggcggccgcttctcctcccatccggtcggcatgcaaggcaaccatcgttagagtgcaggacacagcggcggctggccacgagctatccgtgtgcatggtcgattaggcaaggcgcgcgggcctcgatgtcgcgcgtgcgtccgtgacatctgacggtgaccctcgactacacaagaaaccgcgatcaagccgcgttgctacattctcatcgcgggtgcctttcggcactcgcgattgcgagaggcgtttgtcggtggagtaacgcgggacgtgctcgtcacgctgagactgcctacctactctctcactgacaccacttgcagtcggccccgagaacggcgtcgcattggccatgagttcaacaccccgacgcattatcggcgagtagtcccggcatcaccggggctgcccaatacaaaacggtcacttcatggccatggcttcacggacgcgttgcgtcgctcgaatctattgcccccagaacgattgtatttccgtgagagtgaccttgtcgtccctgtcggcatcgacgatgtcgaacacccttttatgcaccgccgtcacttcctcgaatgaaagagcgccgtcaccattagcatcgacgatcgcgaacatcagcttcatcatgtggcggctgagtgggaccgacatcattccgcccatcatcgtggggcgcgtcgcgccgcaccccatcatgccgccaggcatcatatcgtcgtccggcatggccgcaagatcttgcccgcccgccccaatgttgttgtcggaggcgggcgcggatagtttggggctcacctgagatatcaatgtctgtgcctgggcttctgaaagaccgctgacggcggccactaccgcgagtgcagcaacgccggaaattcgaagcttgttcatctccgtagcctccttcgaaatatcttgctcggagcacatggcgccgggaagtggcctgatcgcacactaacggaaccagaatctcatctccgcgccatggtggcattgagctgcatcaaactaggtccagaccgctgctcctcatcgttcggcttgtcaccagtgggagcgcaagcaatttcatggcataatcgcgcctcggttcaatctccttcacaacgaggtttacctcgcgtcatttcgagatgaagttcatgaggctaagtcattcagattcacatgtagtttcgcgtatcgggtggcttcgagcagcagtgctcggagccaatgatggtatagtctcgacggcaagcttaatcatgggcgtcgcgacggcgacgactgaaagctcaggccccttgatagccggcgtcgccggccttgtcgccggcgcgatgtccatggcggctggcgaatacgtctcagtcagctcccaggccgacacggaggcggccgacgtggcacgagaacacatggagctcgaaacacaacccgaaaggaacttgacgaattgacgcaaatttatgttgagcgtggcttgacgtgggatctcgctcggcaagtcgccgtccaattgacggttaaagatgcgttgaccacccatgctcgtgacgagctcggaatcaccgagcatcttgccgcgcgtcccgtgcaggcggctttcacatcggcggctacatttgctatcggcgcagcgttgccgcgaatgatcgtagccatcgtaccagccgcgtatcttatatactacgtcgcgatcgcgtcgctcttatttctcgctttgcttggcgcccttggagcgaaggccggcggtgcgagcatgatgagagctacactacgtgtgactttatggggcgcgcttgcaatggccttgaccgcgatcataggagccattgtcggcgtcgcggtctgatgaggtccttgcagtggaaatgctcgcgacagcgtcccgcgcgaggagcaggcattgcccgtaatttcgaatgtcctgtcatggtggaccccgagataatgagaaccacggtcgcttgtccgcaatgagaccgtattcccatcggatggcgttgagtacggaaattcggcgactgcgccaagccatacggcccgaaaatgggtatctgtcaaaggcggctgataagagttggtcgattgcatcgtcgccggccttgttccttgatagaggtcaggatgaccatgacatcacctcgatcgatctgtcatgctccaggcgccggccgatcaacgggcaaaaggcgcgatgagatgaatggcgagaaatccgcgaccgccggtttggttcaaggactgattatcaacgcttgacgctgagggagctatcgttgatggcgacctttggttcatccgctcgcccgccagtcgaccaagcgtcccatagcgggcgtcggggcggacggtcctgacgagagaccatgatggtggaagcatcgataccatggacgaccgcgctcgcgactgcttccgctgagcgccacgacctatccgaacctggatccaaattatacccatctgaccaaagaacgatgccgtcacttcctcttatcagccttgcactgagacgaaccatgtctccgcccgtcgtcacgctaccctgcaagacgtatgcctcaacacgcggatcaacggggcgaggttccaccgcaacgctcatctttccacttgcgacgagcttgacaatgacctcgtcgcgcaccgcgcgcgccaacgcatccgcctgaatgctatccgctgctttatcaaaagcaccgataaccagtctcggtgttggggggacggctttcaagcttgatggactaatcgggaagagggtctggagcgacaaagcggccgatgcgaccatcagcgacgcggcgaccaccatgacagtggtccgtcttattcccgacgacattgaacgaaccgcaaggaaggatttcgcttcgtggctcggtggcaatgatggactaaatcgaaaggtcggcgcatacccgccctttggtatgctgatgatgacaggttcctggcaatgtgagagcagatagtaccgctccaactcgcttctaatgcggcgggcttcgatccggaccgctggatcgttctgcggatcaaaatttcttcttttgaaaacaacctccgcgattgtgtaggctttcagatgatcggcccgtcccgccagcgcttcgtcaatcacataccgaagaaagcacgtcgcccgctttggaaggcgaaaattctcactgctgaggatgcggtcaagttgaagacgtatatcgtcgtcggaaggcttgtgtacttccttatcgacctcagataacccactcattggcgtcccccatgcgcaacgatccgatcgtcccgtgccgcgcgagaaatcctcgtgaaggttgtcttatcggaagctcgcggtgcaaccaagcgatgagcgctttcgcctcactcttctcgagaaggatcgaggtggcccccacatcaactggcagtccattgtcgtcaaccacgttgaacaagccaaaacgccctgggacaacattgtagtgtgatatcattctcacgctttcccatcccctcggatcatagcctttaggtcaaaagtcttttcgcgcgtttcgagttttctgtcggcgctcccaagataacagcaagccgtggtcgaacattgagccagatcaatatgtccgcctcggcttgattggcatcaatgtcgacatgcgtccgacgggtattctttccataacttcgagaacgaacgcgggggcacgtaaatgggctggaacaggtggtacagctttaggagctatatcaggtcttctttatggatagtacctttcatcgcgctctttgcttacgtcgcggctatacgtctggcttatctttccgaagcaacactttggggaaacgacgtctggccctggggcgttgctggtacgcaacgaatgcttgaaacgattgtaacgatgacgcttactttcgtcgtattcaccttcggatccctactggtggcaattcaagtcgccggtggccaattgacgccacggatcatcgccacaacgcttttgcgcgataacgccatccggttcacggtcggactctttatcttcacgttactctttgccgcgggcgctctctcgaggctggataccgcggtttcagctggcgtggctggcatatccgggtttctggggtttttatcaatagcagcctttctttaccttatagactatgccgcccgcttgcttcgccctgtaagtattattcataatgtcggccaacaagggtacgatgtcatccagcaggtctaccccaacgaatttgttagcaaggcgatttccaatctggagcttccgttcaacgcgccaccgcaaatgatcgtgcttcacctggcgcagccggcggttgttgtcgcgatcaatgcgcaagcccttgtcgctttggcggaaagaacggattgcatcatcgaatttgtaccgcgagtcggtgacttcataggcgcgggggaacccctgttccgcctttatggtaatcggcttcccgatgaaatcaccgtgcgatcctttgtcgctctcggcccggagcgaaccattgaacaagactcgacgttcgcgtttcggatcatcgtcgatattggcatcaaggccttgtcaaaggcaatcaatgatccaacgaccgcggtcctcgcgatcgatcaactacaacgactgctctgctttgtcggccgacgtcatctgctgggagacgccgtcttggacagctctgacaaacttcggctgattgtcaggacgccagactgggaggatttcgttgagttgacgttttgtgaaattcgatactacggcgctgagaacttccagatcgccagacgcttacgcgctgttatcgagtacgcactgggtacattgccttcggagcgcaggcctgctcttctggatgagttgcgtctcctcgatcggatgatagaaaaaatctacgttcttcccgaggacttgaaacgggcgcgcgttcccgattcccaaggattagggggatctccgcattacccgcgcgatgctaaccaggccctggttcgcgacgaaccgagcgcgacagactaagaagtttagcgaacgcgaagccaacgaacggtgtaatgcaggcggcaagaatgcacatcgtgctggctcgcggatcgctgccgggtatagccgataagggtgcgagcgccgcaccaacgttgcgtgtcgcgacgcctaacgcgatgacggagcgtttttcatgaggtagcccaaaagacaacgcgtaggagccagcccccaagagtgcatagtatatcaactgcgccgctattgcccgtgttccgatagcgcccagcatgtctccccagttctgcgcgatagccgaaaggaaaagaacgatgatgctgaatgcaaccagctttcggatgatgggatcacatcgattcgcgaaatccgcggacagctggcgaacaatgatgccaacgacgaatggagcgagtacaagcagcaaaagcgggcgggcaacgacgccgacaccggcgtgtaaatccggagcgacaaaaggagtagcgaccggcatgacgatgatggtcccaagcgcggcgatgagaatgaacgccgcggcataggccgagctagccttcgcgacgtctgaaagtaccggtaggaatggcgcgcagggcgtcagaccaaggagcatcaagccaagtgcgtagggctctgacagcccaagaaaatgactgacggcgatagcaagaagcgggccagccatgaaacaccaaaagaggctcgatagcaggaatcgaacgtctccgacagccgcccgtgcgtccgccaagtcgagcttgaggcccgtgtcggataggctgccgatcatgaatgatatcagcgcaatctgcagggtgtaccttaggatctcggccattgaacaacctcccagtcatctgaaagcctacaggtaccgtcgaagtgatccttgacctggttcaaaagacggattctttttttggcgagatatgattttgatctcgatcaatgtgcgcgcggtttttaggtccaacttgggatcaatcagcgaaagtagccagggcggtgagtgcacgtgatgttggatcgaagatcagagcgcagccagcgggaggtgcgaggattaacctagcttcacccggcgagatcccgccgcgcaggcaatgctcgatcctcgcgccaacagttcctcccctttcggataggtggtcaaaatgcattacagtccagcaagtacctttccggacgcggcacaggaagcatccaactgggtccgcgagctgtctgagttgctcggttgcgagccccgtgtcgcttatgaaattctacggacgttcctgcacctgttgcgtgaccggttacctatcgacgacaacgccaaggttgcgaacgacctgccattggtgctgcgcggcctctattacgaggcatgggatcctcctagggcgcgggcgcagggtgatttggccgctcttccgagcgcgctgcgatcagccttgcctcaggcgatttcctcggacccagaagtcttcgcgaagcttcaaaagctgtttgaaggacggcgccaccataaacgaaccacccaactagacgttgcgctaaggctctgcgcgatttccgcatcgagcgggcctctgggtgtaaacagcccttgagcctagcaatcatgagcggcttaaacagctgggggtgcaaaggaggtagaaccatgagtatcagaaccgtgatgtgtgtattcagcgtcgacgggtgggaccaggacataaagtcagcgtgtgagttttgcgaggcccggggcgcgcatatgaatgccgtcgtcctttgtgtaagcattccggctgtagcaacctttgaagcgttttcgatggtatggctcgaccagcagcaaaatgaactcgagcggctttcggaggaaatgagcgcggtcaaatcctttcttgaaagaacgggtttgtcatatgacgtgcgggatatttacacggaatttgcttgggctgaagcggatattgccagccatgcgctctacgccgatctcattttggtcggcgctcaagcagccgccaatgacgagctttaccgaaggatcatcgatggcgctctttttgagtcacccacgccaatcttgattaatccgcgctcgcatccacttgcatcgtttccaaagtcgatgctgcttgcctgggactccagcgacgaagcctctcgtgcggctcggcagtcaatggaattattgaaggaatgcgagattgttcatgtaacgctggtggatccaatcgccaccagttacggtaatggcgaggaacccggggccgatgtggcgacctttctaagccgccatggtgtcaaggtcgaagtcgactgcatttcaagcggcggacgacgtgtcgaccgggccttgcgtcagcatgcgatggacgttgccgccgacatgattgtcatgggtgcctataatcaccctaggatccagcagcgattgtttggcggcgtcacgcgatgcatgttgaaggacagcggggttccacttttcatctcgcactaacgggtgccgtgcctatttcgctgcgctagccctattgaatccggggtagcgaaaaccgacactttgcattcgcacctccggctgtcgtttcctgcccgccaaagggatcagctgctacccacgattttcctgcatcaaattgcaatgccttgtctgaaatcaccttaatcccgtcttcaactgtaaccgcacggttgctaccgcgcggatttggctttgatgggcggctagcccaccacaacgcgctgcctgcccaccatgctcgggccgttaattgacggggtccgcggctctactgataagcgccgatgtagtcgagcgcctccacggtcggccgattttttcgttaccgattggctcgataccgcgcggagcattagtgtcgacccgagccagtggccggcatcctagttccatcacccgcgtcggatttattggcggcaccgaccatgaccggcgatgcgtcagcgccccacccgtcgatcgtcgcgcggcggtctacattgtttgtctcgcagcatgccagttgctttgatcccgctcaatgcaagtgggaagcaactcgctaccatgcagccatggatcaggaacaatttcaactttcagacagggcggacgcgggtcgtcggctggcaaccatgctagtaggtcagccgctcgatcatcctgttgtttatgccttgcctggcggtggcgttcccgtggggcttgaaatcgcgcgcgctttacaagcgccacttgatctcatcatggtacgcaagattggggctccgggtgcgcctgaagtcgcgctaggcgccatcgtggacggtgaaaagccaggggaaatcatcaacccgcaaatacgcacggcgagcggtgcttccgacatctatctggcacgagcgcgggagcgcgaagccttggaactccagcgtcgacgcaccctatatcttggaaatcgcgcacgcgtggagcccaagggacgcaccgccatcgtggtcgatgatggccttgcaaccggagccagcgccaaagccgcgctctccgccctgaaggggcaaggcgccacccaggtcattttggctgtacctgtcgcgccagaagagtgcctcttggagatgcgcgactacgcggacttggtggtttgccttcatcccgcgagaagttttcgcagcgttgggctgttctaccgcgatttccatcaacttacggacgaagaaacaatcggtctcttgaggcagggttgggccgagcttgatgaaagcgggccaaccgcgaacacacgccaaatcaaagtgccaccccgcggcctggtgggtgacctgagcgtgcccgcggatcctcgcgggatggtgctgtttgctcacggaagcggatcgagccgcctcagtccacgcaacaccgccgtggcggagaagttgaacaaggctggcttcgccactctccttctcgatttgttgaccgcggacgaagccgcggatcgccgaaacatctttgatattcatcttctcgcggagcgtttgctggaggctgcgatctggattggcgccgagccagacatttccgatcttgcgctgggcctcttcggtgcgagcacgggcgcggccgcggcaatgctggcatcggcggagctttccgaccgcgtctccgcggtggtgtctcgcggtggtcgtcccgacctggccgagccataccttgccaaggcgcgggcgccaacgctgctgatagtgggcggcgacgacgaacaggtcctggctctcaaccgcaaggctctcgcagcgatgacatgtgagaagctcttgaggatagtgccgggcgcgacccatcttttcgaggaagccggggctcttgagacggtaacagagatggcgacgtcgtggtttgaacattaccttgccaggaaagccgtgtcgccggtttcagataatcgatcgcggggtgcgccgcgatccgcggcggaaacacttcgatccggtgccgaaccgctccctccgttggaggatccggcctttgccaatgccttcgagcgattcgcgcgggccagggtcgtgttgcttggtgaagcgtcccacgggacgtcggagttttatcaagcgcgagccgcgattacgcgccggttgatcgagagacatggcttcacgatcgtcgcggtggaagcggactggcccgacgccgcttgcgtggaccggtacgtaagacagatcccaaatcggtccgcgagaatagctccgttgacccggtttcccacttggatgtggcgcaacaaggacgtggatgcgttcatcaggttccttcgcttttataatgaaggtaagcctccaggcagtcaggtcgcattctacggtctcgacctttacaacatgacggcatcgatggccgccgtcctttcgtatcttgaccgcgtggacgcaaatgccgctcaattggcgcgtgacctgtactcgtgccttgcaccatggtcgcgggcgccggccgcgtatggtcgagcatcgctgaccaagggctatgcgctgtgcgaaggacccgtggtgaagatcctactcgatcttttggcgaaggaaattcaatatgcggacaaggatggcgcggaattccttgatgccatgcaaaatgccaagcttgtcgcggatgcggaacgctattaccgcgccatgtatcatggttcccacgagtcatggaacctgcgtgataaacacatgttcgagacattgcacaaaatcctcgggaagacaggctctgacaaaaaagcaatcgtgtgggcacacaactcgcatatcggggacgctcgtttcacggagatggggatggaacgaggtgagcttaaccttggacagctctgtagggagagctacggcgaagacgcagtgctgatcggatttggaacgcatggtggcaccgtggccgcggcctcggagtgggacggtccaatggaaatcaaatccgtgcgaccatcgcgacctgaaagccacgaagcgctattccacgaggtaggcaccgaacgttttctcgtggatttccgcgccagcagtcgcgttcttcgtcgaacgatggcggaaccacgtcttgaacgctacatcggggttgtctaccgcccggatacggagcggtggagccattacaattactcgtcgatgtcggaccagtacgacgcattcgtctggtttgataggacaagcgccgttgttcccctaccgacgcaggttgtagcgggcgaggatgagacgtatccatttggcatgtaagccatgaacgcacgcctaaggagcagccatgaggcctcagttccatctacctttgagtgtacatcctgaaacgagctcgttttccatcatcgggaatgccgtgcagttttcgttgcatcaggatgcggatcttgtcgcgagcatccccgctataggccgccacggcaagacgacaggcgcgacaaacaccgatgatgagttacagcaaggcgaattggaccgcgacatcgtggcccagctcgtccggtacctgagagagtgtgccgcgcgagtatcggttgatgttcggcttgccgctggggacgtggagccggctacgtctcccctgaggctatcggagcttgcccgcgcctacgacttgacgatcctggagaacacgcctttcgccaggccggtgattgaaggcctgttttttgaaagtgggcgtcccgtcctacttctgcctcaggacagcttctacggccggatcgacacggtggcgatagcctgggacggcagcgcgaccgccgcgcgggccgtcgccaacgcctatccagcgatgaagaacgctagcagggcgatactcattcgaatacggaacgcggcggccgaaagtgacgaccttctggaccactatctcaacacccttcgccatgcgggattggaagccatcttggcatcggttcactgtgatggcgatgacgcccccaccgtaattcaggacctcgcgcttgaggaccatgctgatctcctgatcgccggtgcgtacgggcattcccgcctacgcgaagctctatttggaggggtgacccgaggacttctggacaacctgtgcgttcccacgctgctttctcactaacgcagggctcgcagcgcgttgaggacaacggcgacgtcaatgacctcttgcaagagcgcgccctgcacagggggcaggaggccggcgcccgcgaaggccatcgcgagtgccgacaacccaattccaatcacgacactctgcagtgcgatcttcattgaccggcgcccgacctcgacggcggccacgaggcccgtcaggccacctttcaatagaaccacgtccgctgcctccgcggcggcggcgagattgccgcgcacgacagccaagccgacgttggccgcggcaagcgcgggcgcgtcgttcacgccgtctcccaccataagcacttgatgtcccccgtccttggccttgctcacgacgtcaacctttgccgccgcgctaaggtccgcctcgacagcatccaggccgagttcctcggcaatatttctcgcgacctcggcccggtcgccggtcgcgaggatgatgcggctggcgccgagtgttctgagcttatcgaccgcgaccgaagcatcgctcctcaggcgatcctcgaaacagatcgatccgaccttgccatcgctcgcccatactagcgcggtggcggatgcgttcacggctgggaactgcgtggccatgccgcgggatcggacgaacgccggtccaccgaccagaacccgccgaccctcgaccaacgcttcaacgccttctcccgcgacctcggcggcctgctcgggatgcccaagtgtgagacaacgccttcgcgcttccatgacgatcgcgcgacccaacgggtgagcggaggcaagctcggccgaagccgcgagccgcagtagttcgttggaaggcgcattgccaactatagacgcaacggccggctcgccgatcgtaagcgtcccggtcttgtcgaagataacggtgtcaatcttcgacagagcctccagaacaccagctcccttgacaagtaccccatcacgcgcggcttttgacatccccgccacgagcgcgaccggcacggccaggataagcggacaaggagttgccacgaccaagacggaaagcaacctggacgtatcaccggacaacgccacagagacaccggcgaccgcaagcgtcaatgccaggaaccataatcccatcttgtccgccactcgataaattggtgccctggcatgtctcgcctgctccacgagccgcaaaatatgggcgtaggtgctatcctcggcagcgctggaaacaatgagctcgaaggcgtcgccggcgttcgacgcaccactggaaactccttgcccatgctcaagtctgaccggcaaaggctctccggtaagcgcggattgatctatgatcgcagaccggccgtgtacattcccatccgcgggaacgacgtcgccacgtcgaattagaaggcgatcgccaggcactatggattggatgagcacttcgcggtaatcgccgtcatccaagcgtagggcgcttcgcggaacgcgcgataagagatccgtcatgccgctttccgcgcggcgatgcgcataggactcgagaaaatgcccacccgcgtacatgacggatacaatcgcaccagcgagatactggccgaaccaaagcgcgctggacatggccaggccggcgatcaaatcaagcccaaattcgcccctcgtgactttcgagacaatttcggcgagtagccttccaaggatcagtatgatgctcgctgaaaagagagttttcgccaaattgtcgtgggccgccagtgaggagattaggcccattgccaggaagctgacggcgcaaccgaagagaacaagcggcgagtgccgctttgcaattccgataaaaccttggaaagagaccgtacccgacttgctcgacgtcgtctctatcgaatgcatgcttgctctccatcgccgattgcccaccgcccgcatggtgacagaaagtctctgtgatacattgatccgagacaatgttgggattggcttttcgcgggatatatccacatccagggaaggacagaggattgtcatgcaccgcgactatttggttggagaactacaacgagaaagccggctcgccgcttacgcgcttgtccgtggcatcgcccctaccttcgcggaggctgactggcatgccctctccgatggctcgcgcccctggcggataataagcgtccgtgacgtcgccggccgcgtgcggggtttggcggtctatagcctacggatgcacccgcgggccggtcttctactggatgttccgatcttcatcgcgctcagcgcggttggtaatcaagaaatagccaggtcgttgttcgcctgcctcatcgaggaggcctcgccatgtcattttctgcgagtctggaacgagttcccgcataatctcaagcaaatggaagacacgcggttctttcgccaatgggatcacggcctcatctttcgtgtcccacccggctagggacgctccggtatcgcggtgaagacgtagcccaccgaacgaaccgactttatgagtttaggacggccgggatcactttccatcttgcgccgaaggcgggagatttgcgtatcgatcgatcggtcaaacacctcgcgcgccctatgacgtgtgaggtccattaaaacgtccctactcaggacgcggccggcatttcgcacgaacgcgtccagcatgtcgaactcggctgtcgagagctcgatctccacgccatcagggttcgcgagctttcgcttggcgcgatctaattgccaaccatcaaagactagcacctcactcggatccattggcgttacgccaccgccctgatagcgccgaaggatcgactttagacgcgcgtggacctcgcggagatggaacggcttgacgatgtaatcatccgcgccgacctcgagacccacgacgcagtccacgacgtcttcccgaccagtgagcatcattatcggcacgttcgaggacctacgaatctcacgcgccagatctattccatcttgatcaggaagcatgagatcaagcagcacgatatcgaatttacttctggcgagcgacaatctcatttcctcgccgctcgccgcgcacgagaccccgtacccctcgttttcgaagtaacgttggagcatctgtcggatccgcgcatcgtcatcgacgaccaggattttcttgttcgctacaggagccattgccatgtctacaccgcccagtgaaacataccatggaacgaaaatagaagaagaggcagacgcatgatccaccaccattcgccaaccaaatcatcggaaggcgtggcctaggaattatatatcgaaaaccctatgaatgtacatggaaatcaattgccgatttcggcgcctcgcggcgggcactaatctaggttgtgccaccactgatttgtcggcgtgacttcacgcatcgaggctgaaagccccaatgggggggaacggaaccggctgacttgcgatgggaagtttcgatatttgcgcaagatcaatgcggcaagatcgaactcggcgtccgatctagaaactgatggttaccgcgggaggcaattgatgcgaatggtcagctttcgtcgctcgttactattactgactgtcgttgctttcgatccatcggcgggagcgagcggcgcaacccaatcagcactgccttcgcttggtccgatgctcagtcgggtgatgcgaagtgtggtcacaatccacacggagggccaaatcagcagtgacgaggaaggaacactcgacctgaaatcgggccagggcactaatgcgtcaccgcaagaggcgcaaaatccatacatctccgagactggcggaacgggggtggtcacggacggggcaaatggcttcattctgacgaacgaccacgtgatcgagggcgcgacgtccatcacggtttcgaccgccggcggagagacgtatcaagccacactggtcggggcggacgccgatacggatctcgccgtgctcaaaatagatgccaaggggctgatgacagcggaagtggccgattccccttcgctacaagttggtgactatgtcgtcgcggttgggaacccgtttggccttgagaaatccgcaacattcggaattgtcagtgctctcaatagaaccgggctcggacttgatatcgccgaggggctcattcaaaccgacgctgcgctaaatcccggaaattcgggcggcgcattggtgggccttgacgggaagatcgttgggatcaatacagcgatattgagattgtctggtgctaacgccgggatagggtttgccgtacctatacgcacggcggttgagatctcccaacagcttatttcttttggagaaatccgccgtggccagctaggggtcggagttcaagacaatagccctgatctcgcggcgtatttcgggttaaggctcgcgaccggcgcgctggcaaacgacgtacctccgcggtcacccggcggtgtggccggcatcaaggtgggagacgcgatcaccgcggtgaatggacagcgggtgaacagcgccgctgatctcaagtccctgatctcctcgctgtcgccaaagaccgcggtaagcctctcgattgcaagatcggatcgcttcatggaaatccatgcggtccttggaaccaagacccccgagaagaaaaacgaaaatgcgaactacgtggagggaggtggcctgctatcgcaagtcattctccatccgcttgatgcctcatccgaggcgtttgggaagatcgctggatgcctggtgtcatcggtggtcgatggcacgccagcggccgaggccgggcttcagccgggggacgttatcatcagcgtaaaccaaacgggtacgacatcgccgcaaatggtgatcgagatctccaagcgagctaaagagctactcctcgttgaactctaccgggacggccacaagacattcattgtcgtcaaacaatgaacacgcggtggcatacggacgataccatgaccgacaagattgaaaccccagtgccatcaccctatccgcgcgcccgccgatcatttattcggcattggaggaggttgaaagaacaccccttgggtcgtcttggacctgggctggtcaccggcgtggcggacgatgatcccagcgggatcgccacctattcgcaggccggtgcgcaatttggcctaaacatgctctggaccatgccactaagctacccgttaatggcaatcatgcaatctttatgcgcgcgtctcggccgcgttaccggaaaaggtctggccgcgaacatcaagtcggccttctcgccgttcatactgtttccagtggttttccttcttgccgcggccaatgttctaaacatagcggcggacatagccgcgatgggcgaggtagcggaactcgtggtgggcctcgaccgtcatttgctcacgggcatctttgtttccgggacgcttctgctccaggtttttcttccatatcatcgctatgtcgtggtgcttaagtggcttagcctctcccttctcgcctacgtgggcgtactcttcgccgtgcacgtgccttggaaagatgtcgccattcggaccttttggccgacgctatccttggacgcgaggaccgcgaccatggtaactgggatctttggcacgacgatcagtccgtacctcttcttctggcaggcatcagaggaagtggaggaaatgcgtcgccgcgcgattgaacttgccccgttaaacgaagatagtcatagcgcgaactccgagctcaggcggatccgttgggatacgtgggcgggcatgctttactcaaatataattgcttacttcataatcttggccaccgcgctgacgctcaatgtcgccggtcagacagatatagaaaccgctgccgaggccgccgcagccctcaagccgatcgccggcgagttcgccttcgtgatttttggactcggcattctaggtgttggcctcatcggtgtcccggttctcgcgggttcagcggcctacgccctttccgaggccatgggatggaaagaggggcttgaaaggacaccaagggatgcgttgggcttctacggagtgatcacggtcagcaccttgtcggcggttatcattcagttctcgccaattaatccaatgaaggcgttgttgtggagcgcggttataaacggtgttgtggccgtgccactcatggcgctcatcctgattttgtgcgcgcgtcgctccgtaatgggatgttataccgcggacgccatgtcgctagtgattggatgggtagcgacgttggtgatgggcgtttccgcgaccgccatgttcgttctttaggggcatttgatccagggcaatgtaatggggcgggatcgccggtattcttgtcaaaccgtgctggaacggaccacatcctccgcctgcgaggaaaggacagcgacaatggaacaattgcacatccattcacgagactgcatccttgtgtgcgatggttccagagccatcctcctccgcaatgatggcgatgcccatgaattagatcttgtcgcgatccgaacatcgagaaatgaaggagttccctcgcgcgcgatgggacgcgatcgtcccggacgagtgcatccaccgtctggaaatcttaggagctccgtggaggtttcggacctacacgatcgagcggaacggagatttctcgcatcgatagtcgaggaaataacgcatgatatcgaaacccagattgtccaacgtctggtcatcatcgcgccccctcgtgcgctcgccgttattcgacccttgctcagcatgagggctgaagcagctgtcatcggagcaattgccaaggactttacaaaaatctcaatccccgagattgagaaccgactgcgcgcgctgaatgtgtgaggcgaacatggatttgcgcgatgatgaagggaaaacataatgtttgcgaaagatatcatgaccagtccagtcacgacgatcgcggctgaccagaatgtcagacgggcaatcgaggtcgtgaattccacgaacattggtgccattccggttgtcgatgacggtaatgagctgataggtatcatcacggaaggtgacctcttgcgccgcatttcctcgcatgacggccggcgttcgatcccccataatcgcgatcgtcacgaggctctggaacactacataaaggcaaggagctggcggatcagggatgtcatgacattccctgtcattagcgcgctgccgaccgccacgataacgcaggtcgcggatctcctactcgcgcactccataaggcatattccggtcgtggccgacggccggctggttggcatgatcagtcgacgcgatgtcatgcgtgcgatactggatctaccgcgccagtccgccgcgtcgggcgacgaagctctttgtatcgccgttcgggcgcgattggagtccgatttagcgattacagcgcaaaacgtcgagacatcagtcgagaacgcgcacgtcttcctgcggggtgcgttggaagatccgcttgagaaagacgcagcgagagtggcggcggagagtgtcccgggcgttcagggggtcacaaatgacatcaggcttgcccagcacatgattagccgcatgaagccgccggcttgacggctgggttagcctaggagttccctaagtcgcaaagcaagctcttgagcggtatacggtttcttcagccagctcgtcgccgggatcgaatgcttggcgatacttggctcggcatagcctgaagtgaacagcaccttcaggtccggcctcagctgcaccgcgtccttcgccagatcgtctccattctttccaccaggcatgatgatatcggtgaacaatagatcgatgggttgtttcgtcgccagcacctcaagggcgctcgcggcgtcacgagcctccacgacgaagtatcccgctttcaagagccttgatatgacgacacgccttacacggtcgtcatcctcgacaaccaggatatgctccgtgccagaaccaggtatttgctcaactgtgcgctgccggtcgatttcatcaatcggattgttcactgccggtagatatatccgaaccgtggttccctctcccaactcactatagagctggatgtggcctccaagctgcttgacgaaaccatagaccatgctgagaccaagtccggtgccagcgccaacgcccttcgttgtaaaaaatggttcaaaagcatgtgctttgacgttttccgacatgccgacgccagtgtcggtcaccgcgatcaaaacatagtcgccgggcctgagttcaggatacatctgggcataatccacatcgagccggacgcggctgatgtccagggtcaagcttcctccttccaccatcgcgtcacgcgcgttcagggccacattaagcaaggcgctttgcagctgggacttgtccaccaacgcggtgagattgcttcccttgactttggtacgaagctcgacggtttcgcccagtgtccgacgcagtagctccgagaaactcgaaagcaacgaaccaacgtctatgctttcgggattaagcggttgtcgccggccaaacgccagcagttgcgacgtcaacttggcgccatcgtgcgcggcttcctgagcttcaagaagaagctgtcgctgactatcttcggatagcagtggctccagcatttccaggttcccacttatgactgtcagcaaattgttgaagtcatgagccagcccacccgtcagctggccgaccgcttccatcttctgggcctgacggagctcctcttcgatccgttgcttggccgtcacatcccgaataaagccggtgaatatcctgatgccattggagaccgcctcaccgaccgacagctccatgggaaaggtcgatccgtccttcttgcgccccttgaccacccgaccgtgaccaatgatcctgggtttaccagtatgaagataggttgatatatatcggtcatgctcctcgcgataaggggatggcatgagcatacgcacatttcggccgatgacttcgctcgcgccgtagccaaaaagatcttccgcggcgctactaaaggacgttaccgaaccaacttcatcaatgacgaccatcgagtcagggaccgtcgcgaggattgatgtcagatgggcttcgcggttagcaagatcattttggatctttcttgtctcggatacatccgtgttcgtttgtatgaccaccggcgctatcgatgacggatcgaacacgacccagcgagtagcgacggtcaacggatgcccatccctatgatagtgaacaatgtctccttcccaggtaatgcctgcatgcacttcccgtcgaatatcatcgaccggccgaggaagtttcgtgcggagcaagtcgtgcacgacactgccaagagcttcgtcgcggcgccagccgtacatccgctcacaacccgtggtccagtgactgatgactccttcaatcccgtgaattatgacactcgcctcatcgaacacccgcgcgatgacatcaagatcctgctggagatgcgaatccgtaggtgcgttttgcatggccgctatttcctagtggcggtaccgccttgggaactcgtcggtatcctcgtgcgcattggcgtcttcctttccggcccgatcaaccaggagcgattttttaagaaccactatctcatggcggcgatccgcggccaatatgccctgacccgccagtttagtgatcgtgcgcgacaccgtctctattgtcatgccgagatagtcggcgatgtcgagccgagtcatcggaagattgacaagactcttttcgccgcccgccgcgacactctttctcagttgggccaggaggaacgcgcagacgcgttcctccgcgctcttgcaagatagcagaaccatctgatcctgagctgccgcgacttcgtcgcacaattttgacaaaacaaacggtctcagttgcggacttgactgaagtcgacgttcgaaggaattcctcgactgtcgttgaaataggacctcatttattgcttccacgctgtagagatagcggtttttgaatgatactccgactatgtcaccagcggcgagaaaccccgttataacccgtcggccgtcgtttagctgtctgcatatgcgcagatcgccagagtatacggcaaacacatgttcagcgcgatccccttcgaaaataatggtttttcccggaaccgcgcgttctatcggggtgcgctcgaaaagcatttcgagactgtcatgtttatccggtggtccggcctcctcaaacgttggccggacattcgaattactcgctaacatggccgcctccttctggttaccgagcggagtagacgaccagaacgtcacctggtaatgccaagactgtgtcgttttgcgaggttgtgtaacagattgtgacaggggaacgccccgtcggccaccattgcggaacctgttggcatccctgtttcaagggacgcgtcggcgtctggagctctcacattgaccatcggtgttcagcctcgcggcccgcggtgctggaaccgttcccgcgacacgccgggacagccgtaaagagcgaggaccacacgaacagccttggacggacgaggatgagtaagatctcctgcccatcggctgtctggcatatagtcgtgccagacagcgagagcaatcgaagagacaagagctggcgagagagtccgcgaaactacgtgctccgccttcataaaaaacatgtgaagaatttgacttattgaacgcgcccaggattccggtgtcgtgggggcttcgaggcgatgtcctgtgcgatgcccgtcgctaagtagacgttctcaaccgttaagtttatcggtgacgccgccaaccacgttgaagccttgggccgtgcgaaactacacacatggacgttgcgtcgattgatacaacggtttccgaggtcaaaaagaacaggtgatcgttagagcgcggcattccgccgtgacaccaaacttgtcttcgaggccggccccccgattatagcacgatcgacaccaatgatggtgtcgtcgaccgacagctcggccctccggaagccatctagcccggcagaacgacctcgagaatactccggcacctcaaacccaccaactgcccctcatcactcaggacgtcgtcaacgatctctgttatttgaaaatcaatccttaaccacaatagcgtctcggcgtgaccgtgggcgactatggttttcacaagatcgccgcgcatcactggagatgcgcttacttccggccccagagcctggcggatcaaaaaccatgacctcgccgtgcaaacagccaataatggacgaccaagaaaagccggatcagtggccagtcgtcattgctagctccccattggacaggagtgcttggtcgcgccgttgcgtcatcgcatctctcacgcgtcaccggtgcacgcgcgagctttcccgcgacgcgtacaccaatgatcattgccttgggccgcttcgcctcaatgcatggtcaaagattcagtacatcggggccgttgcgatagatgcgcaagccggccgggcgctttgatctcgatcaatgccaatcggcggagcctcgcggatgataaatcaaggaggatgcgggcatggatgacgcgagatttgagcacccgcctttggcacagtcagatgtacggatattgtcggtggcggttcagctttggtatcggcactacgatattcgagctaacgtcgcgctgagttgcgcggtgtgtgctgccgcgattggcatttatcggtccggcacactagcggcggacgacatagcgcaaacactcattgagagatttagccctcatgggcggccagatcccatgacgattcactagagcaccgagcgatttggtgagcagacagggcgtccctagtcagctcgcgtggccgcgcgaccggatatgtcattcaaatagattccgtaaaatagatgttgagaaacatgtgccagaggaacctgctcgattttcagtgatccgatctcccaccaattcaggtgcctttccagtaattcccaagcgtgcatgcgctccgcgcgccaaacatcgtcgtccgatagctcctgaaacctcccattaatcacaacgctcctccaagagccttttggtagttcttcctcgacctggagacagacctttgggttttgacgcatccactccactttccgacccggcattgagaaactgtaagcgacgcgcgcctggaacgcgaaatagattggtatcacataaggctggccttcgaagctgcaagcgagatgaccataatgcgcaccctccatcatggtcaggcattcatcgtgcgtcatatttctgagattgatcgacatgctggttagcctttttcagtggcggtcgtcgaccgaccgctgcaaatgatagcctgtgcgtgcgaggtcactgttcgatcgataaagaaccaagctaagaatggcggcgaccatcaacaccaaggcgaccagcaatgcgtgatctagcacgaaccagcggacccatctgtaacactggtgagagaacatcaccttttccatccagccaaagcaactaatatccgatgttggccagtcatccgtggatcgagatattgttggtgaccctgaccacgccggggatcgaccaagcggcattctccgccgcgcttctctcacgccagcccgtgacatcaccattgagtgttacctcgccttcggagactgccaccttaatatggtccgcctccacctcggcgttacgtttgagggctctctcaatacggtccttcacgtccgagctggacgccgaaggtttgatggagagaacattcgtgacaccaacgacgccgcccagcttcatcactgccttttcggcggcgacgcgttggaagtgccagggcacctgccccgacaaggtcacccaaccattttgaaccttcacgccgatcgctccgctaggcaaaagggcatcccattcgatgatgtccagcgcccgagcggcgatttcatcgtctgcatggtgcttgcggttagggaggcgaacctctatcgtctcagccatggccctcacgcccttgatccgcctcactgctatctctgcggcgatcttctcggcataactgccaacgtgtcccgaaagagttacaattccgttctcgacggcaacgccgatgttggctgcgtccacactaggttcaaagttcagctcgtcgacgatgttttggcgtaaaagaaggtcgttcataacattcctccattggctggtccttacctgaccacgcgctgatgatgggactttttcccgacgattacattgagcttgatcaaacggagcggcggctattctcgtctttgagggaggtcaaagaaaggtggctagttattccctaagatccaagccgccaaaccatggaaggaggctatccaatgacagacttgacacttagacaggatgtgctggacgagcttgaattcgaacctagcatcaatgcggcccatatcggcgttaccgctgaccgtggcgtaatcacactatctggtcacgtaagtacatattccgaaagagaagcagccgaaaaggccgctcgccgggtgaagggcgttcaagcgatcgcacaggaaatcgaggtgaggccgttcggtacgcacataaccgcggacgacgagatagcgaagcgatcggccaacacgcttgcttggcgaacaaccgttccaagggatgccgtaaaggttaaagtgcaaaaggggtgggtgacgcttgagggcaaactggagtggcaatatcaaaaggccgccgcggctaatgcgattcgcgatttagccggggtcgtcggaatttccaatctcatagaagtcacacctcgtccaaccgcgagcaacgtcaaacagcggattgaagaagcatttagacgtgacgctgaacttcaggctcgttcgatccgcgttaacgtgactgatggtaaggtcacgctcgacggaactgttaagcgttggtccgaacggcgcgccgccgagcatgcggcatggtccgccgggggggtgaaagccgttgaggatcaccttcggatcggctgatcccagatccgctgatcgaggcgtacgtgtaacgcctcgatcccgcttgcgggtcgcgcgcgttttcgtgtggcatggttccaatccacaatgttagctcctctgcggcatccaatacttcgcggttgaaacgcggcacgcccgacaccgcattgtgtaccagatgtttccagaaccccttctcatgcccgagacgcggccaggaattgagcggataatggatcgcagtggacggtttcgttgacgggaatcaaagtcgccgaaaacaagatgtgttttgatatcaacgctcgataatgagcaggcgacaatgatgggtccgcttgacccgcatgagagatataggagatgtacaatggccgatactttccccgtcaagtcagaacagaaacccactcctcctgtgaataggggctttcgactaccgttcgattcccttcggatggaaatcgatcgcctattcgacgattttgttccttccaactggcgctcgttgtcacgcctgggacgccccggcgatggtgacaactgggcgatatctccggcggtagacgtcgtcgagaatgatgacgctttcgaaatcaccgcggaggttccgggtttggacgaaaaaaatattgaggtcaagctctccaacggcatgctttccatcaggggtgaaaagtcggaagagaaggaacaaaaggaaaagtcctaccatctatccgaacgccattacgggtcatttcagcgttcgttccagcttccggaagtcgtcgacgccgataaagtcaaggcaagctttgcaaacggcgtcctaaaaattgccctgcccaaaaacgccaacgcaaaaaagagcgatcgcaagatcgaaatcacgacgacctgaccggaattccgctgcttccccgaaacgtgccgccctcgcccgtacgagggcggctaaattgtttccatgaatccccgataaagcatgcgggtataccaccccaatggcgctcggcgctcatggtcgattaggccgagctcacacccgcgcgtcaatggacgttctttatataatccacgagatccgctatttccgaacggcttagtgctaggtcctgcatgcgcgatgagtgcggggcagaaaggaacacggccagcttcaccttgtcgaagcgacccgactgcctaatttgggcaaacgtgggtgttccatccgatcccacacgctgtccgcgcgcgattacgtgacattgtgaacaccagcgctcggcaattcgccgaccattcgcgcgatccgcggcagcggtttgccaagcgaagaggacgacaaccacggtcaataggattttagagaacatcggtaccatacccgcgcgactggattcggcgagagcaaaggttagcgaatgcacgcatcttgtccatgatcgaagtcaaagtgcgcttcagcaaggagcttccggtcgagcacgcatatcgcgcggttccttgatcgagcgcaatgtgaaatttcgatctctgactatcctatggtctcgtaatctacggagaacgagatgaacaggtccggttggcaagatccgcttatcgtaacgctcggcgccgcgacgttcgccgcgccatggctctttcccacgacatttggggacgccgctaggggcgatatcatggcctggagcatcacgttgaccggtgtggtgctgacgacggtagcactcggtggcatcctttttcctggccgctgggaggcacccctggagctagcgctcggcctttggcttctggtttcgccctgggcaacgttaccgttcacggaggcgattccatccatcctaggcgcgacgatcctgggcgggcttattgtcatgattagcgggcttgccgcgttcatgagcacacatccacacaagcacgaggagtgagacaatgagttcagaagaaatttcccgcacagcgcaagccctcgtttcggcagcgggtggttcaagtcaacaaggagataggcggatgaatgccaaggtgctcgcgaaaaaggactggagcggttacttttctcaaatcaacaagaaggttgaaggaaagagagtgagaatcgaagttctcggtgcattgctcggcgatcaggttctcgtcaaatcggtttcgcttttgggcgtcacgtatgaggctaaggaggagcggatcgaattgatgctaaagggcataactcacgtcatagacaagccaaggaaggtgtccgtgcaggaagatgacggcgtggttcgcgctatcgaggtcgtcgatggcgacgagagacaccaacttttgacattcaattgatccagcgctgctggatgctccgcgccgcgagcaaatgccgattatggtagacgaactcgcgcaatccgaggatcgctgcaaaatatcgactcaaccctattccgtggccgcggttgagaacccgttgaccgcggtgctcccggcgttagcagttgcttttcgtctttgttggcgaagcccgagcggcgaatggttatcgcggcaattgccctctcgttggcgtcgtcctccgcaggtgcatccagagcccagccggtccaatactgacctccacaaccctctgaccggcggacttgaaatctccttgccacgccctgccttcaaattcgctggatttcttggcgcccaccttctccgctggcccgtcctgatcttgtttgtattccgaatttggggggctagggaaaccgacacgtgggcagccgaaccccgatcgttgcggtaagtcaatgaccgctagcgattggtctggccaaatcccagtgttgacttggaggcacgttcatgagcagcgaaggaaaaaagcatgatgcaacggcaaagctcgcggaggatctagaaccatacatagccgaggcgatgccgcgtcggctctcggagttcatttggatgatgggacgcggccatcaggcgatccttgttcttctttcggttcttctattcgcggttggtattcttcccctggaagtccaaaggcggatcatcaacggcgccacgaaagagactagtctaaactccatcatcgtcctggtgtttatctatctcgcgctcgttctcagcgagggcggtatcaaacttatcctaaatgtttatcgcgggtggatgagtgaagtttccgttcgttggctgcgaatggcggtcattgatgccagagagcacaatcgagatcagaggacgacccttgccgagggcgttgagatgtcaatcgtcctggcggaagctgatccagtcggcgggttcgttggaacgagcatatccgaaccaatcttgcaagctggcgttctccttgccgtcggcagctacatgatctatctacagccattcctcgcgctggcggtcatcgccgtgtttgttccccaagcgatcttggttccgatcctccagggaaagataaaccaacgtgtgaaaacgaagatcacggtgacgagacatctaagtgaggagatggtcgaccatatctcgccgaaatcgccgcgtcatcaggccgctcgagttcaacgtcttttcgccacgaatatgagcatttataggctgaagtacacgttgaattttctgatgaacttacttttccagctgggttacgctggaattttcgccctcgggggctattacgtcataacaggacgcatcgagatcggtacggttgtcgctttcatcgcgggtctgaacaaggtgtcagatccttggggcgccctggtggactggtatcgcgaccttcgggttacacaggtaaagtacgaattgatccgcgatgcgaacgctgccgcctcggaggacaatagatagcacgcgggtcgagagttccccgccatggtaccaacgtcggggggttcaggtcgtcaagctatcgttcgggatgccatgttggagagggtcgaatccgctctctggcgtatcctacatgccgcttgcgaggctagcctcgattcaattgttagcatcctgctccactcgctgatgtaatccattttagcggccctgacgaagtccgccatgacgtcgaccgcgtcgttacgcaccatgctgcaggcgaggtcgtgaaccagcgttacattctcgtggatgcgtctagcggcaaagctggtggactcggattgtatcgcaacggcggcattgatagctaggtcgtggatgtcggcgtatgttcgcagccaatcgtcaaagctcgaaagcgatagagcctgagccgccgacgtttgatgattgctcatatccatgtgaactcccagtgggcggagacaatctcgttaccggtacacgagcacgggtatacgagagctggcgagcaccctggtggttacgctaccgagaaggatacccgtcagccccccgcggccgtgtgaccccatcgcgatgagatcgcatccattcaagatggctgtctgagttatcgcctcaaaaacgtgctcactgcgcaatttgacggaataagctgtcactcccaggcgacgcgccagcagttcgacctccgtgagaaaactaacggcttgctgatccgacagcaactcaaagtcctcgcggctggatgtcaactgctcggtatcggtggtgaaaatatgatatggttccagcgcgtgcaaaaacaccaccgatgcgttggcgtctttcgcaaactccaccgcgctactggcggcagctaccgcgagccgtgaaccgtccgtgggtaccaggatcttcgtgaacatacgtgcttcctcttttggtcaagactacacaaatacgggcgtaggtctttgatccgcgtcaatgtcgccgccggtagaggaaggcatttcggctgacgcgcgctgttgactgacatcaaagcggcgatccgtcatatgtgaaacgatggatgaatgttgtcgcggagagatgcggtgaatcggacagacatcatctgcatcgaatacatcgtcttcatactggcagtatggggtggtgtcattcttgtccttgcaagccctggcgccagtcagcttccccacaacagagccgtgcggttgatggaggaaggaaaagccaaatcagatttgatcactgagacaaggttcgaaggctcgcttcaggagtcggcgtcgcaactagcgaggtccgtctccagacccaacgatccagttaccgccgcgatcttcgaaaatagtcgtgacctgaaggcgaagggcggtgcggtcgcccatcggccgaccaacgtgctgtcaaggggatattggtacttcgttttccgaggtaaaggtggccctcgagaaatagagggcctgacggacattggaaattcaaccgccgaggcctcattgagccgcgacacaggcgtttcaccggtcgaaacgcggcgctcgaattatccgagcgttggcagttttgaattcggcgatcgaagccacccgagatgttcatctcgccaggcagacattgccataagcaagataatcgaaatcgcacaccaggacacaaagacgttgctcgaggcaaggatgagctacctgcaagctggtggtgacctctcgcgcgagttcgaaatgaaagccaatgacggatcttcaccgccgcggaaaaaggccgaggcgcggaaatctctggcaagaggggaggcggctgtggatagttcggaaagacatgtcgaggaacccgagagctttctgctggagcgcgaactatccagcggacattcggtccttggttggctggtggccgcgatggtcttcctgggcgtcatgtccttgctggttcatcttgctgatctcaccatgctaatcacgcttctgaaacatgccgattttttttggatcgcggcggcggtcgcatgtcaggtcgctacctacgccagcgcggccgccgtctggcaagtggtgattagacgagccggcgccaggctcgcgctatcggaacttctcaagcttgccgtcatggaactttttgccaatcaggccatccccacgggcggcctcagcggaagcctgttgttcgcgcggggtctcgttcggcgacaagttccgtcagctttagccgtcacggccctgctcgtggccgccctctcctactatgcggcctatttcctcatggcggcattcgcgttcgcgcttctttggctggatggtcgtctgacagatgcttggcgtcaactctccatcatcttcgcggtgatcatcgccctgatcgcggttgggctcattgccgtcatagccagcaaggggagatggatcccaggcgcgctgaaacgtcgtcccacgattttccgtttggcaagggcactcgaaagagttcgaacagacatcgcgaacgacccaaaggtcttggtggcaacgatctttttccaactaacagttttcatgcttgacgcgaccacactttggctatcgttaatggcgctcggagttacaattggaccttctccggcctttttagcttttgttctcgcgtcagtcgtggccaccgtgtcgccgatccctcttggccttggatcgttcgagggtggatgtgtcgcggtcctgcatcttcttggcgttggaatcgaggtcggcctcgccggaacattgattttccgcggcttatcattctggcttcccatgcttcccggtctttggctgacgcgacgcgaggtaagcgggaagatttgaccttgctcaatgcgggtttgggatgaacgttggatattccaattggcccgccttcaccccacacgtggaagaggccggttcccaccaggaggaaatcgatgcttgttggtcgttcaataaccaaatctccaaccactgtctgccagggcgcgaatgttcgggacgtcgttgaccatatgcttcccaactgggtcagcggccgcgccttgcatcgacacgagctccgtacggatagaaagaggtcatggctagtcatttcaaccggcctcggccatgctttcgccgaatgcgtacatgcccatgttcgcccggcagatgagactttcggtcaaagctctgtcttcgcgacggcacgactaacgaatccattcaattgccggggcgcgaccacaaacgattgcgtgtcgttggagacgcaagatttcccgaactctctcgctgcggtctttcttcgcgctctcgccgaaatcagggaaatcgcggagtggcggcggagccccacatggttgaggttgtggcgaaagcggagtttgagcgccaacggtttccttcgccgtcatgcgcgaaggcgtcgccgagttaccgggaacgagtcttgaggagcgtgaccggccttatgcgaagatcgcgactgagatgttcaagctgtgcaggcaaccgtcgatcaactgacgtgggttgatccttgtcggcgttgcctgccgctttagtcgaggaagaacgcatagcgaaccgagagcgcgtcgtaacttgcagtaaggtgtgaaatgaccgaagatccgaaattgtttttccatggcgcggctgggtcagtcacgggctcctgcttcctcatggaggtgaagggccataggattctgatcgactgcggcctgttccagggttcaaaaagcgagcgcgaacttaattaccggccattcccattctccccagcgaagatcgacgccgttctcttgacccatgcccatatcgatcattcaggcctcctcccaaaacttgccaaggacggcttcagtggcccgatctacgcgacgcggccgacaatggaactctgtggtatcatgcttcaggattcgggccacatacaggagaccgaggtcaagcaactaaaccggcgaaacagatggcgctcccgcgcgcccgtcaatcccatttacacggccgacgacgcccgaatgataatgccgcagttcatatgtgtcgggtggcaagaatggcgcgaattgatcgacggcgtgaaatttcgattctggaatgcgggacacctccttggatcggcttcgattgaggttgaattgctctgctcggaggggccaaggcgtcttttgttctcgggagatgtggggacccgttacaagttgctggagggactgccacaggcaccaactggcatcgattatctagtttgcgaaagcacgtatggcgatcggcagcgcgacgactacacccaggatgcacgtcgtgaccgcctcaaggaaataatctcgaaggcttataaccaaaatggtgtcgttttgataccgtcgttcgcggtcgaacgaacgcaggaagtcctgacggatcttgttgccttgatggataatggtagccttccgcgcacgccgatcatgatcgattcgcctttggcatcgcgtgcaacggaggtcttcaaggcccaggcgaaagagcttcataatgcttcctcgtttcttcgcgcgctaacagcgcccaacgtcaggttcaccgaaacgccggagcaatccaaggcactggatcttgttcgggggttccatatcatagtcgcggctagcgggatgtgcgacgcgggtcgcatccgccatcgtcttcgtaactggctctggcgatctgaatgcacggtgcttctggttggatttcaggcgtcaggaaccctgggccgaattctccaggacggcgctcgtatcgtgcgtatccaaggcgatgaaattcaggtgaacgcgaaagtgctagcgttcgatgcctatagtggtcacgcggacgccagggatctccagcgttgggttgaagcgcgccgaccaattggaaaaggcgtgtttctagttcacggcgaaccagccgcgcgatcgtctctcgcggtccgcttggccaaggttctccaggtgccaattgtcgaaccgaaactagatgacggctaccgtttgggcatcgacggtccacaacacctggacgtgattgccaaggaacggttagcgccagagctcattggccacccagactggcataatgatttccagagccttgttcttgacctgcaggatcggcttcgacatgccgctgaccagaagtctagagcagtcatcctgaggaggattagccgtgccctcgaaaccgataccgacatcaataaccctggagaagacgaacatgctaacggttagtcgagattaccagcgaggcggggagcacttcgccattcccacgcaaggagaagtggaaggtcgcctacttgtgtcggaggtcgtcgctgtaacatgtcttcgagaactgctgaagaaagagcatgcaccggttttggctagagtccgacgtcatgttatgcgcgacgtcaagcgccgctgccaatcgatgaaattgtgcgccgaagaccagaaagcggtcgaagactacgcattgcaagtcttgaacggggccaacgaggaagcacgttccagctaggcgacataccgggtggggagaccatgagcaaggacatcttgattgctttcaacgtcggtttctcgaacataaagatcggagtgttcgagaatgtgggcgatcggcccaagcgtgtaggtcaaggagttgtaattttcgaaaacgcgccgagcttgacctatgtcgacgaagacggcgctaggcggttcgagatcgcaaactgctcggatagtgtcgagttgtgtgctaaaacggtggcggttttgttcgaacatgtcgcgcagcacgattggcgcattggccttgtcggacatcgagcggttcatggcggaacggcattcgatggaccaaccctgtgcagtcaccaggtggtggagcagatcgaagccctgacgcatctggcaccatcccattcacgtcagaccttagcgacgattaacgctgttgccaggcactgtccgtccgccctgcagaccgtttcgttcgataccgtgtttcacaagtcacaatctagcctcgcggcaaggctcgcggttcccaaggagatgcacgaggcgggtattcgccgctacggcttctatggtctttcctacaaatccgtatcgaccgctctccacaacatcgcccctggtgtaagcagcgggcgggtgatatgcgctcatcttggaaacggggcgagcctctgtggtatggttgatggtataagcgtcgacacgagtatgggattttcgctgcttgacggtgtaccgatggcgacacgctctggaaacatcgacccgggtgtccttctccatctgctgaggacgagccttccgaccgtggatctcctggagcagttcctttatcgtagttgtggccttctcggtgtttccggtacgagcggcgacacgaggttacttctcggagattttcgaccaaccgccaaggaggctgtcgatctgttttgcttccgagtagccggtgaaatcgggcgacttgcggtttccatcggaggggtggacgcactggtcttcaccggaggtgttggggaacatcagccggaaattcgtaagggtatcgtccgtcacctctcgtggctaggcattttgctcaatgagacagctaacagaatgaatgcaccggtcctcaagacaaaagagagcattgtggagatcttgattatacccactgacgaagagcaagttatcgccgacgaaacattgtctgtgatcgcaagacgtgggacacgctccaagagaccggatgagacttcttagcgaccgcggcttagtccctgccctgatcgatcatccgcgcacatctcgcgcagaagggggtgtatggaagtgttgcgagacgatggccagcgattggctcatgacacttgacgcatttcccaaataggcccagttcgatacgggccaatgcagcatcgatggcgacaatctgcgccgcgccctcgtcgcgcatcgcaacaagaactccttcattctccagctgtgttgcccgatcctcgatatcgctatccgggcgagcggatagatcatcgttaattgccctgagacggcgagagatttcttccttcaggtcgatcaatgcctgtctggcggcttcaagtctcatcgcgacttcccttctattcagcaacacaacaatgcgcaggctgaacgcgctccgctttgatcttaagcaaagttctgcgaattaaccctcgtgatgagcggaacgtggctttgctgttaaatcggcaatccggaattgagtgatctgtagcgacgcgtcccctcggctatcgaaggtcgccgtggtaatgctactgcctcaactctaacctgcatgccagtttgatcagatgagacagaaaaaccgtgtctgaagttagtcatttgtctccatcggccatgagttgctccagccaaacgctatttctggcgaaatgtcatgttattattcacctcgcgtgctaatgtgctaacagcatcgcatttcagcgctaatatggcacttttcaaagaggccacgatgcgtggccaccccgccagtccgtagcgtttaagcccgagcgtcgcacgccacacaccgaagcgatcagacatggtctacctgggggatgccgtcaccgcttgcgcatccattttcttgccaatgtttgttcgtctgtccatcttcgggctgaagcccgcttcaatgcaagctgcgaagaaatgctcgcgcgcgaccgcgggcgggctcatcttctggagagcatttcgacaggtcacaactgccgagtcatgataggcaccccggcggatcggccactcatactcaaggaagtcgagcgcatcggagatgcttgcaaatgacctctcgaggccgcttgggagtcgaacgcttacggggtttagccataaaatgtcagcagggcccatcttctcctccattgtggcaccaatatatatagcaaaattctaatacttcatttcgccggtttcaagccatttggtgaccggtctgacgatattaaaggctccatcgggaatcccggactttctaatgatccgcccgtgcacggtaacatcttgacgcgcgtgagggcgtgaagcccgttgatacagaggtcatgcggagctgcgaaggccatgtaagccatgcgtgacggatcgcacacttcatcgctcaacgcggaccaccgcgccgcaatttgatttcgcgcaaggacctgaacagcattggcggatatcaatttccctgtcaggcatgttacgcgttcaaaggtcacgacagcgacaaggcccttgagcacgcgccacatcaccgaaggctcgctatccgcgagcgccgaggcgataactgcgtgaagacgatcaaagcggaagttgctcgatgcgccggatccgtggagtacactcggggacgcggctggcggagagggcctcgggttagcgagaacgaattcaacattagggagcaaagtcatggatgacatcacgctaagaaaaaatatcctggatgaactcgaatttgagcccagcatcgccgcggccaacatcggtgttgctgttgagagcgggattgtaaccctatccggccatgtaagctcatattctcaaaaggaagccgctgagcgcgtcgtgaggcgagccagtggggtccgagggattgcacaagaattggaggtcaggcttctgggcgcgtataggaccgacgacgatgatatcgcgcgtcgcgccgccaatatgcttgactggaacgtgtctctcccgaggaatggcgttcaggtcaaggtacagaagggctggcttacgctgacagggaaggtggaatggcaatatcagaaggaggccgccggttatgcggttcacgatctggctggcgtgaccggaataagcaatctcattgaaatcgcacctcgggtgagcgcaacggacgtgaggaaacgcatcgaggatgctttcaagcgtgatgcgaacatcgaagcccagggcgttggggtcgaggtttcggacggaagtgtcacgcttaagggaaaggtccgtacgtggtcggaacggcgcgcggccgagcgcgcagcctggtccgcgccgggtatcaaaacgctcaacgatcacttatctatcgggtaagggaaacttgaaggacaaggtttggcgggcgtgcagtagcctgccaaacctccccgctctgctcgctgcgccttggcagggctcggctccgcgggccgcgtcatggccgccagagcaagactgaaagatccaggtgttgcgctttttaggaacgtcttccggctgttgggaaaccaccatagctcgactatcagcatggtttcccatcgtgctggttcccatttattcggaagttaagccgcgaacagcctcttttcgcagatgctggagtttcgcttccgcctcgccggattgaggaatgggtcaccccccggcggccggtggtcctaacgcattcccgccagggcatcaggcgtgattaggatgatgaccgctgaccgcgcttaaaagctgcattgtcagagaggcttttccattgcaatggacaatgtcgcccatcgaaagcatcccgactactcgatcttgaccatctagcactggcacccgccgaatgccgtgtgcctccatgcgatgaatggcctcttcaatcctgtcatccgcatgacaaaagaccgccttcggcgacattatgtcttgcgccgttaaagccgcgcccttctccattttgggtatggcgcgtagagcaagatctctgtctgtaaccattccgacaagtcgatcatcgtcgaccacgggaacgacaccaacatcgagttcagtcataatccgtgcaatgtccgcgacggtagcctttggcgcaacggttcgcgcacccctgcgcatcatcgttgatactcgcatatgtagtcctccatccgtaagccttgtacgcgattgctcatgccgctgcattgcgttgaatcaaagattgactgtcagaacgttagagccggccctgaagcgacaaaagagacttttgcgccgaacgatccagctgtccgaggatgacattcccaatacggtggtagccagagaaaagcgaatgcgtttcatcggagacaatgaagtcagccacggtgctcaagcaatgccgatcgggtttgccgcttcaagttcggcggccgcctcgaacatcatttcatgcagaatcgatcgcaggccctcctccttgacattaagccccgctgccctgagatcctcaagcaccttgtgaagaagagcagcatcgccagtcgaggtagccgatgaaagacgaacctcttcgacatatgcgtcaatatcgttccttccgagttcttgcgccgcccatttggcgaacaaaaaatctcgacgcgcgcgggtgaccggaagtcgttgaaagtcctttatgtatttgtcttcaatggctcgtcgccacgcatcgtttgaggtcatctcgcatgctcctctctaaaatagtgtgaaatcagtcctggcaacggacgatgacacgggtccacttgcgttgatatgggccgtcttccatgggaggttcgcccggcaaagaacgccaaatcagatgggctgcctcaagagcgacccgcaattgaacggtagtggctatgtcacgttcattgttcacggatcgggaccactgccgcccgcaatttggggatcggcgaagttcgacaggtcatcttgatgatgcagaactacttgctcacgtttctccgacacgggcggtgttatccttcaagttgaaacgggctaaatacgcgacgattccgtgatcaaggatgaaggaagctgctggataagcttctcgaactgcgcccattccgtagcgggccagatttcggttgtcgcatgcccaaatgttcgaacaagtgtggctacctttgtcgcggcaatgatatctggcgccttgaatatatcgagatagtcggccggaccaagtagcacgaagctcgatatccattcaacgccatgacagtcacgacggatatgttgcgccagttcgtgactaagcctcgtcaaggacttcggatctttcgtagcctcgtgacttagtcgcgtcagcatgatgaaaacagacatggcgaacctccgcttgctattcgatcaccatacaaaaaatcaggtacgaccgcattgaccaaggtcaatattgatcggaggccgcccctgaccggcgcttgctatgtggcggtcggttcctactgtccgcaatcggtttagccgtgagcgcggtccaggattcaggcaccaagtaggatgcgatgttctagtccgaggtggtgggaggtggctcgatcatgttccctctgctaactccgacccgtctggcactcggaaacattctggataagaacattcccgatgcggtggattggttcatcccgggcggagcttgggaagagcgatcggcatcgcgcctgtcgatacgataagctacacgtggccggagccgttaacgcaaaacctttgggtcaggcttgagcatggtgatcttgatgctgcgaagttcatcttcgcgtccgttgcggcgatagtaaacaacgtcggtgcgtttgaccatcgaccttggcacatcggggccaattggtagcgagatcaatcgataagtccggcctctctacacgcgcatatgaacgcttgacgggcattggccgggtcgaacctttgagccattgcggcaatgcacatttgcctcgcgaacaataggctcggcgtatcgttgaagcgggcgctttccataaattctagcgccgcttccggacctcggatcaactcgaacagaccgagaggtcgcaatttaatgcagactggccagacccagtgagaatgcttggtgatattaatgacttctcccaaggtcgcctcctcgtatccgcatcgacaatttgagcaggtgccgtcttgcgcgaaacatggcgattccggccgttcagtcttcctgtagttccttacgtatctgttgcagttcggctaatctctgagggctgacctcgggaattttgagatctagtctttccaaacccgcgcataatgtctcggagattgccagacgcgcgaaccacttgttgttagagggcacgacaaaccaaggcgcccattcagtgctagtatgctccagcatatcttcaatgaccgactggtatttatcccagtgagcacgctcctggtagtcagcaacggaaaacttccaatttttttctggttcatcaatacgcgcgaggaaacgtcttcgctgctccttccgtgatatattcaggaaaaacttgattatcataatcccattgttgacgagatatttctcgaaattattgatctccttgaagcgttgcttccacatatctggcccccgggccaacggtggcaatttctgccggtcgagaagttctggatgcacgcgaaccacgaggacttcctcgtagtaagaacggttgaaaatgccaatcatgccacggcttgggagcgctttggcggccctccacagatagtcgtgccccagctcttcactggaaggagccttaaagctggtgacggtacagccctgcggatttatccctgacattacgtgacggataacaccatctttacccgcggcatccaaagcttgaaggatgattaggatgccatgcagagtacctcgtggctccttcttcgagcccaagtgaacccgcaaagacgatttatccgccacgaaatctccgggcgatgattgatcaagcgcaatgatttttcggccgcgagcgccatcatcataaagcaacggaggggaatgcgatgaagaacctgctcactatattcgctcttgtcatctcgacggcaaccatgagctttgccggcacgagggcgcaggcgccgttgggaaaagataggcctcagaattgcgccaaagagacaagacagcatccgcggctcggatattgggacctatttatcccgcccaccaagggaaatggctattgatggtccctcgtggtctaatggctgaaaccgacggggaggtaacataatctgctatttccggcggcgaggatttttgtcgcgatcccattccgaattgagtagattgtacgtcctgggatgggggcaccggcgttcacctgggccgagtagaacatcgcggttttatcgcttgtgttgctatgttggaaatactttgacgcagacgtcgcgataccgcgacgtggatgacccacgcagcctgtgatttcggcagtatcagcgaaaatctattggcgcccgtcctactcattgtctcatgcaacctgtgtctttcgctgaactcgccgacggcaggggggctgcagctgcggctcagtcctcacctcgggcttggtgttcatctaagtgaaccctgaagcgcagaagatgccgcattcctttatgacatcactattccggagccaccgctttcggagtgatgaaccgctcgagatagccggagccttcgacgacgtcgttccatccaagagctagttcgataacggcaagtcccgccgtcgggaacttctctcgcatgtctttcacggcctttggttcgcccccagctactatcagcgaggccgcgttcgccatgcccgggttgtggccaataataagcagggtgagggcaccggatccgactgcccggatcacatccaggatccccagccccgaagcctcgtacacatccgccgatcggcggcaaggaatatctccgggaagccagtcccgaactagcctcaaggtttccaacgccctgcgggctggcgagacgagtatgagatcaggcaccaacccttcccgcatcatgtaggcgccgatgtcggatgccgccttacgccctcgccctgccaacgggcgctcgcgatctggcacgccgtaaggtcgagccgatttcgcgtgccgcagaagcatgaggcggtgtttgatcaacatggtataagcgtcgctctcagctaacgtccgatgcaagctaagcttccggttcagctgcctcttggagcatgaccgacaattcaatgccgcccttgagacaagggatgtctcggatgtaacacctcggctagtccgtcgactcaagcaagtcgtctagtttctcgacgacggcccgaataacatcggcacggctgacgatgcctaccaggacgccgtcacggagtataagaacgcgtttgattttctctttcatcatcagatcggacaaatctgagagtgaggcgttctcgtgactggaaatgaccgttgggtgcatgatttcgctcacacgctgttgattgaggcggatctcggcgaggaactctggcgccagagtctcgccttccgccagcatgcgtaaccattgagctcgcttattttgaaattgagagccgaaatgatgcatgacatcgccctcgctcaccactcccaacggcttgttatcggaatcaacgacgggtatcgcggcgacatgatgcaataacatgcatcgggcggcctctgcgaccgtcgtctctggcgagaccgtgaatacgtccgttgtcatcacggacttagcgggaatcgtcatctgcatacctccaggtaaaggtgaaggcgtgcagaatactggaataggggtagatcgctttgaggcagcgcaatttgatggcacgctcgcagccaatcacccgcgtggttattgtgacgaccaaagagcccttaatcttgctgctattggttgttgcgcttgcccccagaatccacgctgtttccgttgagccaacgcaatgataccgaatcggcttttaagcgcagtcaattagcctcgggacgggtcaatggcccgtggattccgttgcctgttggaggtcgattcgccgcaaaatgagtgcgagcggcaccatgagcgccgaaatgaccatcagcaccttaaagacgtctatgtaggcaaggtagctcgcctgtgcctggacctgcgatgctacccacgcggtagcgcgggaatgcgcctccaggacgctcgacccgcgctcaacaaagaactgggtggcatggtcgaagccgctgacgtaaccagggtctgacggaacaatgctctcgaccagcctgctctgatgccactgctctcggtgcgcgagcacatttgaagcgatggagacgccgatcgaccctccagtatttcgtgccgcgttgattagagcggaagcttgatctgtctgatcaggcctcaatccatcgtaagaagccgcggtgatcgggataaaaatcaggggtagaccgagcccgaggtaaagacgggaccagacgaaaaagccgaagttcaaatcagcgttgagccttgtcatgtcccacatcgccagcgcgataatgctcattccgaacgctatgagatattttggctggacaatggaggtaagccggccggcggcaaacatcatgaacattgtgacaagtccgcctggcgacagggcgaggcccgcccaggttgccgtgtaaccgaagttcgtctgcagcacctgcggcacgaactgcgtcgtggcgatcaaaatcgcaccggtagccaacatgacgattgcgcaggcaccgaactgacgacttgccaatagccgtaagtcgataacgggattggtcttcgttagaagccaaggaatagcgatgcaaagcgctagtcctgaaatgaccgaggtcgtcacgatgaaagtggagtcgaaccaatcctccgtttgaccgcgatcgagcaccaactccagagccccgagaaacgtggcaacaagtaggaatccagttatgtcgaaacgcgcgcctgtctcgcgcatccgagcacgttcctcccttagcgtctgcggctccttcaccagcgcataaacgaggaagaaggcgacgacgcccactggaccattgatgaggaagcaccagtgccaggaaaaattatcggcgagatatccgccgagcgtgggaccgatcacaggcgcgacaacgacggcaacgccaaacatcgcgaatgcctggccgcgtttggagggtggaaaggaatcggcgaggattgattgtgagattggcaccattccgccacccgcgaaaccctggatcatccggaagatcaaaagagactctagattccaggcaagaccgcagcagatagaggataccgtgaaggtggcaagacagagaagataaaaacgccggcggccatagcgtttcgcgataaagctcgacgccacgagaatgatcgcgttcgagacgaggtaagtcgtgatcacccacgacgcttcgtccgcgctgaccgctaaccctcctgaaatatagcgtaaggccacgttggcgatcgtggtgtcgagaacctccatgaaggtcgctatcgacacaaccacggcgataagccatgggttgggggcgccgaaagcggccgtaggcaagctcgcggaaggtgtggcgttgccggccatctcagctcctcggccgaactgttactgttggaactaccgacatacctgggcctatggcgatatccttcggccaatcatccaccacgattttcacgggaacgcgctgggtgaccttcacgtaattgccggtcgcgttctcggctggaagcaaggagaaggcagtacccgaaccaggctgaatggaatcgaccctgcccttcaagacatgatccggataagcgtcgatggtaagattcaccggctggcccgggcgcatgtcagccaattgcgtctccttgaaattggcggtcacccaaacctcctccgggacaaacatggcgatcgcctgaccggcctggatgtactggcccctggaaccgctcagcttgaccactcgacctggttgagcagccgtgatcgtcgtgtaatccaggttttgcgtcgcggcctctgcctgcgcctcggcctgttgtaaactcgcgatcgcgctagctttttgcgcttcagcggatgcttgattcttaacggcagaggttacgcctgcctgcgattgcgcgtagctagcttgaccttggcgaagggtcgaggctgcctgctgagcggcctgctcggacccggccccgctcttaacgagttcctgctggcgctcgttctcgtcctgggcatattgaagcgcggccgcgctggaggcctgttgagccctggcttcgtcgatcgccgcgcctgccgccgcgatctgcgcgttggcgcttgagacggcggccttggcaacgcctatctggccgatcgcttggtcaagtgcgatttgatagtcgcgcggatcgatcttggcaatgacggaacccgtgtcgagctgcttgttatcgctcacgggcacgtcagcgatatagccggagaccttggcggcaacggagaaactccgcgcgtcgacgaaggcatcatcggtactttcatatggatggaaagagacgagccagacgaaatacccgaacaccgccagcacgacgagcgccaatacgatcgagaggattgcgagcggatggcgatgaattatcgatgacttcgttcttccagagctctcccgctcccctgggccgacgctcgctatttccggtttcgctcgcttttcccgctgttcttcttcatccagttgcgatttgttgcgctcggtctgggtcacggcagctctcggtttgagggtggaacagcccggaaaacgcggggctcccccattcggttcctaaggatccacgatcaagaagacctgtgaccagctcggaattgaaagtgcaggctcgactatgtgtcaacgtaagcaggaggaactcaccggaatgcaatatagacgtgtgctcatgccacctgtcttatggcgacgcgatgttgtcgggacgaccggctgcatagcatccgctcttcacgaaccatgatcgatgtcgacgttctagagacgacacggaggaatgacatgggaccggaagcgccggcccatgtttgagcgccatcaggtaccatcgaggtactcgctggaccaatatatgattcctgccctttaaaactcgagcgttcttcccatctcgtcttgagagttgaggcatttggagctatccgaatttttgatcattcgtcgtttaaccgcaagaccaagagattatgccagacaacgaacagagacgatctgacgcgcaggatgcaggcgaacggttggttgcgcgacacgtgcgcgaggatcctttcgccgcggcgttcaaagccacacgaatgccgatgattgtcacggacccaaatcagaatgacaatccgatcatcttctgcaacacggcgtttgaaaagctaaccggttactcaagccgcgaagttgtggggcgcaattgtcggtttttgcaaggagaagaaactaatagcgaaaccgtgggtcgtatacgcgatgcaatcgccgcaggttcggacatcgcggttgatattttaaactacaagaaggatggcacctcgttttggaacgcgctttttctgtctccagtgcgtgatgacagggacaagatcatctatttcttcgcttctcaactagacttcacgaacgtcaagagccgtgaggccgacctagcggctgctcgccacagggcggaagaagaggtcgccaaacatacagagaaactggaagccgcgctggcagcaaagacgctgctcgtgcatgaagtcgaccatcgagttaagaataatcttcttaccatggcctcgatcgtgaagttgcaagctcgaaagactaaaaacgaggatcacaaacaggtcctaatgtcggtgctaaaccggattgaggccttaagcacggtgcagcgtaagcttttcacgcttgaggatgtctctcggttcgacatcgccgatgtcgcaagggagatggtaacggatctggttggcgctaccaatcgggaagacatccgactaacgcttgaccttcaccctgtttatgtacccgccgtgaaagccacccccctttccctcatcgtgaacgaattggttggggacgcgataaaacgaggactgagcgacggcggtggcgacatccatgtggtgattaaaagactgaacggtcatttctcgatacgggtggaagatacctccgtcccggtcgacgttgatgacgagaccactgaaattggtcgtattttgcttgagaactcggcaaagcaagtgggcgccaaaatcgagaagagggtcgaaggggaccgaacgacagttgatgtcacattactggtggaagcaccgcaggagaatgattcttgaaagtactcatcgttgaagacgaaatgctcctggcgatggagctagagagtgaagttgaactggcgggtcatcacgtaacggcaaccgcgatgtcaagaagccaggcacgggaagctgtgtcgatagaacgacccgaattcgcattcgtcgacattcagcttcaggatggcccaaccgggatagatgtcggtcgcgatctagcggacgagggcatcccatttgtttttgtgagcggtaacatcaaaaagattcccgatgacttcgtgggagctctaggggccatcgagaagccttacacggtcgccggaatgaagagcgctatcgcttacatttcaggggtgatcgaggggcggtccgatcttccacttcccgctagtcttgtgctcgccgaagacgtcgaaatcattcgcggggggtatcgcgtatcataggacgtcattgtcaatgcgccggcggtttgggctaggcggatggacgcgcatgtggagcgccatgcctcccaaatagcgtttggctgctgcactatcacggtcgcaaacggccagttccccagtagcggatcttccgctgactgggggatattaacggtgctggcctttttaatccgcttggatggcaatcttcgctctaaagcatttcgcggaggcaaccgtcgtccgcctcgcgcggcagatcaagcgcgttgcgacggcagcggacatagcagcgttgggacatttgctctgtcgcacctcgagtaactcgaaaggttctaacgagcgatctgcaactattctggtacatgcgctaatatcgatcgggggcagttacagcgcgctaatccatgacattgccaatacactgccatcatgcaggcatcacccgaggcctggcacgaaccgatcgaactctgtggcgaagaccgcgttctcggcgctggttttttctaacacaccgattattttcgtaacaaagcatactagcttatcacgacttatcacgtcttttgcatccccgggtcggggagcaaagcacttgatcgagcacatggtgtgaagcccagatgctcgcccatcgccgcctgcaccgccgatgttttatatttcaaacctcgatctagcggtgcgcggatctaccgatcaccaatcagcctctcgaattcatgctcgggaacgccgtaacaaccacggctgaatcgctccagtcccttacggttgacgacggcgacgatgccccggcttgaacggatcagtcgctcgccctccaagacatgcagtgcgttcgtcacgcttggacgacgcgttgataagagcattgcaatatactcatgagtaatctccagggtgtcgtgaccgatcctatcttgacacatgagaatccatctcgcgaggcgctggtcgattgtgaaacgtgcgttggcgagagccgtaaacgctacttgcacagcgaacacatgcatatacttgacgaacgggacatgcaggcttgcgctctttaacataagttccgctatcatacgaattggcattcgataaccggctcctcccaccttcatttcgatatcgtaaggcacaaggttgtcaccaattatggtggatgtgggtacgaagccttcaacgccgaacatacccgcctcggaactttctccgtttggtgttaagctcatcactgcaccgatgcccgattcaggaaaatataaataatcaagtggttgaccaggcgaagcaaccttgaatctattgggcatcggcacgagatcaaggtgcggagccacgaggctgaagtcgtcgtcactgagcgccttgaggatacgattgcgcacgcctgttttctctatcaaccttgtcgctcctcaatcttgtttgggacgctcacgctgagctacttaccaaaaccccatgaaatgtagagagggccaaaggctggtcaagccgattaacgggagggagctcgtagcgcgaaacgtagtatgtttttcgagccatcccgaccgcattaaccttgagactggcaacttgttcatacagatgccgactacaagtcggcgaaagaactgttcgtcacggccggcttttcgggctgcgcgcaaggaagcaggcggtctttcaccaaagcggcggtgacggtcaatatgccgcgacgagcgaccaacaaatttcggtgatctgttgatgtggggttattcaatatcagaaagtgtccgggagttttacgatctggtggtcgtcatgctgtgagacaagcgtcatggagatgattacatagaggtatttcgtctgaggcgctcgaaaagccttgctgccttcttgatgtggcaaggcaccactcatgacatgccgtggacgccgtccgcacacgaagcttggcctttcacgtggtatcgcgaaaatgagccacctcgaagtgaagcaagagctgggggacgccacgacaatggagggctgcgcggtactccagcgccatgtccgcttgagacagaaccatcaggggcggcagtgtcgttcgaggaaagtaggtgtcttcctggagctactttaccccctgccgccgtaatcggagcaacccgactgaaacttttagggtaatgccgatcgtagggagagcgcgggatctaaccgagcgactttcggcgaggcggcgtcaggctacctcgccgatttcctcacttgtcgcgtttcatcgcgagcgcgaacatcctggcttgccgctcagcgaaagcgcgcgggttggcaggcttgtctccgtctagaatgcgcgcttcatcaagcaaaagccacgcggcatcctcgcgaaaggcttgatcgcgcattgacgcgacatccaagataagctcgctccgcgcgtttatctccaatattggtttcgacgccgtttgcagcctgccggcgccttgtaggagtttttcgagttggcgatccggaccattctccggcgcgacaaggcataccgcgctctcggtcaacctacctgaaacacgcacgtctgcaacctcctcaccaagaaggcctcgcgcgaaatcgataaaggcggtcacctcgggagacgattgttggttgccctccccgctgttttcgccgctggcgacggcgttgagatcggcaagaccctgagttacggatttaaagggcttgccttcgaattccgcgacattggtcggccaaaaattatccacgccgtcggttagcagtaaaacttctatacccttcgcctggaaaccctcaaggtgcggcgaagaccgcaactgctccaaattagagccgctgatgtaatagatggcggactgtccttccctcatcgcgctcacataatcggccaagccgcgcgtcgcctcgttcgacacggtgctttggaagcgcgccagcttgagcaactgcgagcgccgttcgaaatcctcatagatgccttccttgatcgtcgcgccaaaaagatcccaaaacttggaaaacctatcggcatcgctctcggccatcttttccagcgcggagaggattcggctcgtcacgcccttttttatggcggcaaggaccgggctttcctggatcatctcgcgggagatgttaagtggtagatccggggtatcgacgataccacgaacgaaccgcaggtagcgcggtaccaaatcggcctcatcggttatgaagacgcgcttcacatagagctttatccgaccctgtcggtctaggtcgaagaggtcaaatggctgagagcctgggacaaaaacgagcgtcgtatactcgtaccggccttcagcgcggaaatgcacgttactcaatggctcgtcatactgacccgaaacgccacgataaaaatcgagatagtcctgttcggatatgtcgcttttctgcttggtccagagcgcggcgccatctgacaactgtaatggctcggcgccatccttctcgattaggcggatagggacggggacatgtccagattgatcacggataatcttctcgaccgtccatttgcttgaatatttcttggcttcctccatgagatgtagcacgacacgcgtgccgcgggctggggcttgtccggggtcgaccgtgactatgttatagcgcccctttccatctgatgaccatttcgaggcttcgaactcacccgcgcggcgcgagatcacatcgacctggtccgcgaccatgaacgatgagtagaagccaactccaaactggccgatcaattccgccttttctccagccttggccgcttctagtcgatccatgaaagctttggttccggaacgcgcgatcgtgccaagcgcgtcgaccatctcttcacggctcatgccgatgccgttgtcctcaacaataagcgtccgcgcttcttcatcgagtttcacgaggatccccggctcgaggccatcggacgagagccgtggattggaaatcgactcgtagcgcagcttttcgcacgcatccgcggcgttggaaatcaattcccggaggaatacatccttgtccgagtaaaccgaatgcaccatcatgtgcagcagtcggctaacatcggcttcaaaagcgtgttgctcgggctgcgcttcttcaactgtcgtcatccataactccattctaaacagaccgcggtgagatggcttctcctggaagagatttcaagcgctctcgacctggggaggagcgtcaagaggttaatctttctgttcgggtcatgtgtgtcgcgccagtggaccgtggcgcgaaggccgcgaaaactcgcttttcaaccgccacccggttgcatccagatctagatccgaattgagatccaagtccaactccagcgctgggaaggtcgccaaggctgatcaaacccaacttgggccagtcaatgacacgaaggaggccgcgccaccgttcgagccatggacgaggccattgccgttgcgaaacgtcggacaatggcgatggcttgactggctgggtggaaaaggcctcgaccgcgtggactatcaagccggtacacgagccttccgagctagatcggtccggcgcgcgcatgagcaaaaacaccgtggaacccaccaccagacgtttcagggcgtgtctattggcgcggtcacaacggtgcgaaaacctggtttattgtcctgttcatcgatggttcctttaagctgatccacgacggcagcgagcattcgcttcccaaatcccgacccgccgcccgactttttccccgcgccgtggtccatcacgataagtcggaacatcccgcggtgttgctcgagaatgacggaaagccggccaggtcgcccttcataggcgtgcttctgcgcgttgatgaccagttcggtcaggacaagaccgacattcacggctcgatcggtggagatctgcacaggggcaagttccaggtcgaactggcgcgcccactcgtcgtccattgtcgtcttcatttcactcacgagatcttccagatagcgcgataggtcgacgacctcgacgctgtcgtcgcggtaaaggcgtcggtgaaccagagcgaccgcgctgagccgtctgtcagcttcttcaagctggagcctgacggcgtcatccccggaggtcttgccctgcaatcgcagaaacgcggccaccagctggagactgttttgaacgcggtgattgacctccttcaacaggaaatccttctgtcgcagaagggtctcgttttcggcgatggtcgtggtcagttcgcgattaagctcacgcaccctcaagtcgttcctgcgctcgagcatcaaccggacgacccggcccgctgcctcgacttcgccgtgcgaccacggccgcgccttatggcgcacctcctccgaccaagcctcgaatgacgcgcgcggtgtgagtgtgacacccggctccgcgaggacacccttatgggggttgcccgcccattccagcacttcgagatgttgcgcgcgaaaccagatcagaattgtcgggatctcggtggacattgtcaccgcgagaagtccgcttgcgcgatcagcgtaggcttccgcttccggcatcttggtcttgaggctgggcgtcgcgaaaggctgcaacgcggccggcctcctgataaaatccgctatggcgcgtatatcgatattgtcagggcatttgccgtaggtaaatagatcttgcccctgaacggccgcgaacccatcggaacttaaaaggttggcgagctcgcgtccggaccgcgcgaaaaactcgctcagcgaaccgtcagtgccgagcttggacaagacagtctcttcctgcgatcgaaagcgcaaccgttcccggtagagttcggcctcctccttggaacggatctgccgagcgagagacccggcgatggcaagacaggcgatccggacgttgagcgtgatttccttgggctcgtggtggtggcaggccaccaatccccaaaggacgccgtccttgacaatggaaatcgacgcggaggcggcgacacccatgttcttcagatattggatatgaacaggcgacacactacgaagcgtggaatcgctaagatcaagttccctcaagtcctctcggacggagcgaatcggcgcgggaatgtaagagacatccggaatgacgcggaccttgttgcgaacatagagggccctcgcctgtttgggaatatcagttgccgggaaatggtggttaaggaagcttgaagacccgtcgtcaaggctttcgccaacaaccacgcccgcatcgtcatcaatgaattggtagatcattacgcgaccataacctgtcaggtcgcgaaacgtggccgccgcctgccggcacaggctttccacggtcggcgcgcgttcaaattggcttaccgcggcatccagtccgaagaggaagggcgcgctgagcgttggctccggttcggcggcgtccatctcaacaaccaagcgtcccgctgatcggtacgcgatggcattgaggtagccactggcgccctcgacccgtccaaggatgagcgtagcatcctcctcgacgcgcgcggccttcgcgacacagtcgccgccgacaaggtcaatcaatgcgcgtccagcccagttttccgttaaacgcccctcgatatctccagccgcgccgatcaccttgagctcgttgttgacaacgagcataatgccatgtggctggatcgagccagggatgtggattggttctagatcgcaggacgttatatccgcatcgctcggcagagcatcgttcagcaagattgtgtttccgaatttctaccgcgcacggaaggcgtgaaccgacaaggacaccggaactttgcgatcacgtcttagcattcgctcggcgcgacgtccctttttttatcccggattttgaaatacgggaccaagcacacattgctcatcaagccaccttatcccacgctggggtccgagaatgacccttgggacgcagcctcggaacccaaggcgcaaaccgtggctccattcgaagatctagaatgtcggaggtccaccgtttgaggtatattccctgtgatccagaacagaaggcgagcctcagccgatttgcgtaccgcggacctgcagcttctcgacgcccgggaatcgcagcggatttccggacctttgggcgcgtgacggcggcctcgacatcgacaatcaatgacctgtgtttggtgaggttcgaagagatgtctggacaagcttatcacaaggagatggcgcaaaagtgcgcagcggccttgcggctccgacatgttggaaaaacgaaggcataaagcatggcaaacgaatccgaaggattgcgacacgctgtaagtttgggaatatggtgtccgcgagccgcgcgcagccaaaagtctccatccgtcccgagatcttcttcaacggaaacccgaagccgtcagatactggcactccgtctcggtcaatacaggggtaaacaagatttcgacgttgaggctgttaaggaggtgccacttggacagcggagagaggagcaattagcgtccactgaatgaaaccgccatgcatgctccaagccgcctgcccggaaagagccgacggcacgagtttgcggagtacgagcgcgccaaaaccgttttcctgcatcaacagctcggcgtattcgaccgccgactcggaccattttaactcgaaacgttggccgttgccgtccgttgcgggcagtatgttccatgtcaccgaggggtgctggctttcaatcgctccgaaacggattgcgtttatagccagttcatgaagcgccatgcctatgtttagaaccgcgttggcgtcgagtgttatgtccgggccagagaccttcaccgtctggctcatctcgaacgtcttgagttggtgcgaaacaagttgggcaagacttacgcccgcccagtcgacctgggaaagcagatcgtgagagtgcgacagcgccatgatccgctcacggatgcgtgcttcgaattcctttaccgatccggcacgcatcgccgtttgccggactaccgctagcaccaccgcgtattggtttttaactcggtggttgacctcgcgcatcaacaggtgcagccgccgttcgctttcctttgtctgcgaaatatccctggcgatgctggacgagcctacaagtttcccggctcggcttttgatgggtgagatggtgatcgataccgggattcgcctgccgtcacgatgccggcgggcagtctcgaaagtctcgatgcgttcaccaagcttgagttgctcaaggatgcgtgcctcttcgtcgtgcttatcgtcaggaacaagcaggtatatcgactggccgacggcctcctgctctcgatagccgaacatttgctcggccgccctgttccaactgacgatcattcctgcaagatccttgctgatgatcgcatcgaacgacgactcgacgatggccgcaagacgctcttcggtatgttttttcatgtctgacgatgcaacttttaccgctggtggctgagaatctaggcagcttgtggtgagatcaagtccaacaagctcgtggcaggttgaatatccattccaggacgccagtcatagcctgacaagggatggaagcggaatgaggacccgcagtcgaaggccctccttggtccaatctcgtgagatccgcccgcttaggccttgaagcgccgccttctcgagggtcgatccgaagccctcccgctttggttgcccctccagtctcatcgctccttcctctgaccaattgatcgataagacctcgccctgcgactctacctcgattttcagtttgccatccgggatcgaaagcgccccatatttggcggcattggttgtgagttcatgcagcagcagcgcaagggaggtcagcgcgctgcccgtcagcggagcgtccgctcctgatatctcgatgcgagaatcctggtcatgctcatgtggcgccacgatcgcgcgaaggagcgcgttcaccgtcgtcgcgatctcgctcccggctccgtcgagcgcgagatccggcaacgtcagttcgtgcgctcgcgatagcgcatgcagtcgggacctgagatcggcctccagttcggcaacgcttctcgcgggccgggcactcaaggagatcaatccggcggtcacgctgaacaggtttttgatgcgatgattgatttcccgcagcagcacgtccttatggcccgccgccgccttgagcgcttcagcttgcgatgcaagctcgtcacgttgaacctttaattcgtcacgctgagcggctaactgctgacgttggcggaacaactcgtaaaagacctccaccttgctgcgcaggacatccggttcgatcggcttttgaatgaagtcgaccgcgccggcctcatagccacggaaacgacgctgtccatcggtgctgccagcggtcacgaagataatggggatgcgcctggtgcgttcgttgccacgcattagctcggcgagctcgaagccggtcaagcccggcatctggacatcgacgagggcgagggcgacgtcgtgatgaagaagcatttccaatgcctcatcgcccgatcgagccttcagtagaatcaggtcttcacggcggagaagcgcttcgagtgaaagaaggttctcctccagatcgtcgacaagcaggaaaggcacggcgtccattatgtattcaaacctttttcaaatattccgcgatcgacgcaagcgtcataatgtgagcttccggacttgccttggcggccgcgtccggcattaaagctgcataagccgtggcgggatcctggatcaatccgacgccacccgcctcaaccaccgccttcaacccctgagcgccgtcgctgttggcgccagatagcacgatcgcgactagcctttccctataggcatcggcggcggtctcgaacaaaacatcgacggacggacgggagaaaaggaccggctcatcgcttgaaagagcgaatgttttatcgagttcgacgagtagatgatagtcgggcggcgcgaaatagatagtgcccgcgcagatcggctccttgtcctccgcttccttcacggccatgtggcatttgaccgcgaacagttcggccaaggcgcttggcctgttcggcggtatgtggacaacaacgataatcggcatcgagaaattcgcgggaagcaagggaagaatggccgagagtgcctccagggccccagccgatgctccaatcaccatggcgtcaaaacgccccgccatcacccaccccgcttctggtagagtttctcttccctggaaagttcctcgaaggagcccgcgagagccgaaaacctcaggctttccttcgcgcccaggcctagaaatccctttcgcaccatggaaccttcaaacagccttatggcgcggtcttgcagatcgcggtcgaagtagatcaggacattgcggcaagagatgagatgcatttccgcgaagacggcatcggtgaccaggctgtgatccgagaaaaccacgttgcgccgcaagcttttgtcaaaggatgctctcccataggcagcctgataataatcggacaatgacgatttaccgcccgattttcggtggttctccgtgaacagttgcacacgatcgagggcgtatacgccagcctcggccacggcgagcgcctccgcgttgatgtccgtggcgtaaaataaggtgcgctcttccaggccttcctcgcgaaaaaggattaccatcgaatagagctcctcgccgccgctgcatcccgcgatccataccttcagggaaggatacgtcttcaagtgcggaaccactttttcacgaatcgccttgaagaagctgggatcgcgaaacatctcgctgacctgcacggtcaggtagcccaatagcttcggaagcagtgatggatcgtgcaagatgctttcctgcatcgccgagatcgtggcaaaccccagggcttggcgggcttgccgcaggcgacgcttgaccgaggccatcgcgtaattgcgaaagtcataatgataggtgagaaacagtgcctccagaagcagccggatctcgatatcctcgacgtttcttgggttttccgcttccgtcatttcggcatccacacccgtaccagcgatagcaatttctccacgtcgaggggcttggccatgtagtcattcgctccggcttcaatgcagcgttgctggtcgtccggcatcgctttcgccgtcagggtcagtatcggcagctttttccaggcgggattttcgcggatcgcgcgggtggccgtcagcccgtccatcacgggcatcatcacgtccattagcacgaggtcgatcatcgccgcatccgttcgtgaggccttctcgagcgcggtgatcgcctcctggccattgcgagctatttccacgatcgcgccgcggggctcgagaatatttgtcaaggcatagacgttgcgaacatcgtcctccaccacgaggatacgacgaccctccaggatagcgtcgcgattgcgcgccttgcggatcatcttttgctgttcatgcggtaactcggagatcacctgatgcaggaataggctgacctcgtcgaggagacgttcgggcgacttggcgcccttgatgatgattgacttggaataacgtcgaagtcgctgctcatcgtcctgcgataggtcccttccggtgtaaacgatgaccggcgggaaggcgtacgcgctttcctggctcaaggtctcgagaagggcgtagcccgaggcgtcaggtaacgatagatcgagaaccatgcagtcgaccgtgccatccttgaggacctgcaagcattcagcggccgttccgaccgtcagcgtttccaccccgcgcgagccgagaagtttcgccaccgcctcccgctgaaccggatcgtcctcgacgatcaggatacgtcgtacgtcctgtgccaattttagctcgagcttctctaaaacctcgacaagctgttcgcgtttgaccggcttgaccgcgtagccgacggcgcccagggataatgctgtttcgctgtggtcctcggcggaaatcatatggataggcatatggcgggtctcgacgtcgtgcttaaggcgatcaagaaccgccaagccggattgatcgggcaagccgacgtcaaggatgaccgcgttcggtctgtattccttcgcgagcctgagcgcctcttcggcggtgccggcgaccaaggcctggaaacccatctcgcgcgagagatccctgacgattgccgcgaaggatgcatcgtcctcaatcacaagcagaacgcgtcttgcgctatcgagcgcggcgcggtcgtcatcgagcgcgcgcgtcgcgtgcgacggaggttgcgtcctggccgctggcacgacttcgttcacggcgcccgcggccatcgttgtgtggcgggtcaacccatctcccaaggtaatcagggccgccggatcatggctccgcggcacagtgaccgtgaaggtgctgcctttatcaggctggctcaccaattcgatcgaaccaccgagcagccgtacaagctgacgcgagatcgagaggccaagacccgtgccaccataacggcgactgatcgtactatcagcctgatggaacgcctcgaatatgcgctgctgctgatcaggagcgatgccgataccggtgtccgttacagcaaacgaaattccccgcgcatcctgcccggtgatcttgagaacgacgctgcctgactgggtgaacttgatggcgttcgacagcaggttcttgagtacctgttccagacgaagcggatcggtctcgatcgccgccggaacatcctgggcaacttcgattacaagatcgagtttcttttcagcggccacgggttggaaaacctgcctcaaattgttcgcgaggcgctcgatcacgacggtctccggcctcatctccacatgaccagcctcgatcttcgataagtcgaggatgtcattgatcaagtttagaaggtcattgcccgatgactggatggtctgcgcatatttgacttgctcagcggtcaggttctcgtccgggttgtccgcgagcaacttcgcgaggatcaatgacgagttgagcggcgtcctgagctcgtgagacatgttggcgaggaagtcggacttgtactggctggcctgctcgagctctctcgccttcagctcgacggacgcgttgacgcgctcgagattgtcgcgctggaactcgagttcctgcgcctgctcttccaactgcgaatttgtctgttccagctcggcctgctgctgctcaaggcgagtctgcgattctttcagcgcacgaccttgctcctcgagctcttcgttcgatacgcggagctcttcgctctgggtctgcagctcttccgactggcgctgagtttcctcaagcaggtcttgcagctcacttcggtaggtggcggatcgcacggcgatcgcgaccgcttcggacgcccgttccagaagcgttcgcacacgcgggtccatgggacgcaaaaagccaatttcgatgacggagttaacctgcccgtccaccgagccgggaaagattgcgagatggcgaggtttatccctgccaagcgccgaaccaaaaaccagatagccgtcgggcacctctccgaagaccaacggtttcccttccgccgcggcttggcccaaaagcccttcgcgtaaccgaaaatggtctgtaatggctgcattgcctggtacgccaagggcggcgatgcgcttgaatttatccctgtctatcgcaaacgcggcaccagctattcccccgacgtaacctatcaggaactccaggatgctgttgcctagctgatcgagaggctggtcgcccatcatggcggtcgccagtccaacttgacccgattgcaaccaatcctcgtgtcgacgcgccaacgtcgcacgtcgtatcagcgcgccgataaccaaggtcagcaccatgccgaccaggccagacaatattgtgctcgtcagtgccgtccgctgagcgcctttcatatccgcgatgcgctgcaggcgaacctctccctcacgctgcgccatggcggagatctgtgcccgaatcgcgtccatcgcgcttttaccgcgatctgagttcacggccaccagggccgcctccaatccctcttttcgccggacgtcgatcgtttccctcaactcggcgagcttggcgtcgacgtgctgcttgagcgtcgcgagccgctccgactggccagaattttctgcagttaaccgatctatgtcttgcagcttcgatggtatcgcccgcagagcgtaatcgaatggctcgagataggcctcgttggatgtcagcagaaagccgcgctgccccgtctcggcgtcctggactcgcgacagtaattcatcaagcgcaacgatcgctacatgcgtctgcacgatgcgttgattgctcgcctccaacgcctgaagattgagaaaggcaacgagaccgctgatcaagaagaagacgagcgtgccggccagcccgatcgcgaccccgggatcgaggcccaaggatcgatccgacaattgagaggcaggcctatttttcatcagaatctcgcagcatggaaggcaggtcaggaacccttactcgcgcgccccctaataggcaatgaccacgccgttgtcgaaccaaggagccgcgaatttagaccagcgggcatcccggagatttcgcggtcaaggacgccacgctcgcgaccaccgcacggccgctagtcgtcgccatcgcggcgcgggcgcgcccttcgcaatgccacccagggagcgccctccccattatcacgcaacgaccactgagattgcgtccacgccgattctcacgccccagctccatctcccgggaagctgaagaacgcggtttcgtcacgatcagatgaccgcgcctccggccccgcggcgcctggcgtagccgtcatctcgatacccaactcgttctgcagccgtcacctcgggcaccccaccaagcggcggcgttgcaaggacaagatcgctcgcgagtgttaaactgacgcattttttaaggtcgaggagatccaaacgatcgccctacacgtgtaaagaaacagcttcttgtctctaatcggttggaaaaagtaatgatacccagtggtgataagtcgatccattcgcggataaatagcaatttaggaagacgcgtaaagtcagcccgaaaatcactgggacttagccaaactcacttggcaaacgccttgggcgtctcgttccagcaaatcggcaagtatgaaagtggtcaaaacaccatgtccgttcccacgttcttgacaatctgccacgctcttcgccttaagccatcatcgctgctcgacgaatactcggaccgggaaaagttctaacgcggagtgacgtcctgtcctccgcgcgtttcgcgccgtcaagccacggacacacggtaagcgcttgcttgcgcgaaaaaagaatcatttcgaagaaacgatcaactaattcgccggcgctttggtcggctcatcagaagttccgaaatcttgagcgcgaacgcgtccgcggcgaacggcttcgtcagcacgagcatgccgtcttgcaaatgaccatggtttaggacggcgttttccgcatacccggtgacgaacagcacgcgcagctctgggctctggtcgctgagggctgagcgcgggcggcggccgcgacgctggcgcccgttcatgccgtttggcaatccgacatccatgacaagtaggtcaatacccggtcgggcgtcgagcagcttcatcgccgatagcgcgtcgtccgcttccagaaccgcgtagccaagctcttcaagcatgtcgaccgccaccatccttacgagcggttcgtcgtccacgcataggattgtctttacatccggcgcccacggcgtttcgaccgttggaacaaggacctcttcatggcgggcattatcatgatgtcgcgggaggtagatgcagaccctcgaacctttgccactttccgaataaatgcgggcggtcctccagtagaccatggacaggccgagccccgtccccttaccgattggcttggttgtgtagaatgggtcgaacgctcgagcgacaacgtcgggtgtcataccagtgcccgtatcgctcacgcagagcgagacaaagtgcccaaacgccagaccgcgcgccctcgccgcgcgatcgtcgagctagcggttacccgtttcaatcgtcaactttccgccgttcggtatggcatctcgtgcacagatcgagaagcgcgttctcaagctggcccacggcgaggaacgtcgtcgcgtctgccgtcttgagaaggcgagtaggcgctgtgtcaagcccgccgcccgcttgaccgaggcatgggcgccgcttaggtagcgatcaatgtcgtcgacgctgccttgggctaccgtgtccgcatcagctcaaggctgccagcaatgacggcgaggatgttgttgaagtcgtgggcgagaccgcccgttaactggccaacggcctccatcttctgagcttgccttagcgcttcctcggcttgcaccaaggctgccgtgcggtcttcgacgcgggcttcgagggtggcgttgagatcgccgaggccgccgcggtgctgcgtaattcagcatctgatcgcacgcgctggatatgtgcccaggaccgctccgtaacttccttgatcaacgcgagctctacgtccatccagcggtgacgcaccttatcgtggatggccatcggcgaggtcagcttgccttccttgatcaagggcatgcatattgtcgccgcgatgccgatgtcttgaaaggttttggccgcttccggcgcgaggtcggccaagctgtcgttgacgatcagcggctggcccttgttgagtttctccacggcaagttcgccaaagtcggcgagactgtagtggccaagaattgagggcgagccatcggttgcccagtcacctcgtatgggtgaagccgtcgccgtcctcatccatgtccgcataagcgcagttggagatcgaaagatatgtcaccaccatgcttgtcgtgatgtcgaggatagcgtcggcgtcgcggctattgcctgtttgcctgcttagatcatcgaggaagcgtaatcgtgcctcggaccggcgcaaggcggcgtcggcctccatccgctccgtgacatcggatcccgaaacaaaaatgaccgttatctcacccgaggcgtccttgatgggctggtatacgaagtcgacgtaccggttgatggtggcagcatgacgtcccttgattttgaggagcgctcccagcgccgaatgcggcttcgcgcttcgcctaacctcattgagagcggctagaaaatcttgctacgtcgcttccggcaggacctcggcagcactcttgccaaccgcatcgggatggtcgaccagcttcgagtaggcgggattgacgtattggaacacatggtcaggcccactcagcatcgccatgaagccgggcgcgttttcgaacatctgtcgcgttcccattccgatgcaagccgctggcgcccacgcacggcttccgtcgtgtcgatcatgccgagaaccgtgccgttttcatctcggataggactgtagcaaaaggtgagatacgcggtctcggcccgcccatgtcgggtggtttcgagcggaaaatctcgtggtaaaccgcttcgccggacatcgtcttttgcgtgatcggccgcagctgctcccagttctctctccaagtcactcgcagcggctgtcccactgccccctgcctgttgccaagcattggaacgtagccgtcgttataaatcgctatgaggtcatcacctcaaaaaaggcattgagggaagtccgacgaaatcatcgcgtcgaccgtgatacgcagggctgccggccacctctcgatagcgcccaatggcgtttggtcccacgggaaggccctgaccttttcagccatgaggccgatggaggaaggaaatctcgaaatgtcggtcatgtggccttgcgctgattatttcagttacgcgagcgcatggaaagtaaagatcgatgagaaagcaacagccacgaagctggcccggacccggaacgcccggacgagactccatcggttcaaaggcaataagccgttggttttgatgaagccgcgacctcgttcggacatctggcccggaagcgctactcactcataactttatgacgcagcccagcagtcgttcgctgagcatgaggtcaccgacctggggaagtggaccgaactaagagcgatggacgcgaatggaggtcgggtcgtcaggcctgcgtcgcggtccggccgaagcgcggtttgatcaggcacatggtcgtccgacaccgggaaattgtgttttcgatgacagcgccatccgatgccccctttcgtccaaggagccgtgaaacatcgaactcgatcacatgct

SEQ ID NO: 22 - DNA, 68829 bp, Rhizobium matallidurans
  source 1..68829: mol_type = genomic DNA
cgtcgccttccgcctcatgcaggggctgttcggcgcatcgctggtgccgctgtcgcagggcatcctgctcgacatctacacgccggaggaacgcgggtccgccatggcgctgttcggcgtgtcggtcatggtcgggccggtgctcggccccgtcatcggcggttggctgaccgacaacatcagctggcggtgggtgttctatatcaacgtgccgatcggggcgctcgccttcgccggcatcatgatctacgtcaccgagacgaagctggacgcgctcgccaagctcgactggttcggcttcgggatgatgagcctcggcatcgcgtcgctgcagctctttcttgatcgcggcgagcagctgaactggttcgcatcgggcgagatcatgatcgaggcgatcatctgcgccgcggccttctacctgcttgtcgtgcacacgctgacggcgaagaaatccttcgtcaatccgaagctgtttctcgatcggaacttctccgtcagcatgatcttcattttcgtgatcgggatcacctatctcgcctcgctggcgctgatgacgccttatcttcagacgctgatgggctatccggtcatcacggcgggcatcgtcatggggccgcgcggcatgggcacgatgttgtgcatgttcatcgtcgggcggttgatcggcaaggtggatacgcgcctgcttctggtgctcggccttgggctgacggcgtgggcgatgtacgacatgacgggctggacgcccgatgtctcgcagtggacgatcatctcggtcggcttcatccagggcgccgggctgggcttcctgttcgtgcctttgacgacgatcgcgttttcgacgctgccggcggagatgcgcggcgacgggaccggcctctacaacctgtcgcgaaacatcggctcgagcgtggggatctccatcgtctcggcgctgctggtggaaaacgcgcaggtgaaccacgagaacatcgccgcctacgtcacgccgttcaaccgcgccttcgatgccgcggccgcgcaggggatgagcccgttcaccgccgcaggtcgcgcggcgctcaacgagctgatcacgctgcaatcgactgtcattgcctatatcgatgacttcaagctgctgatgatcatgtcgctggcggtcattccgctggtgttgctgctgcgcaaacccaaggtggcaccggccatggaccacagcgccgtgatggagtgatcagcgaaacggcttgctgagatagcgggaccccgaaatgccgaagcgccatggtgcttcggcatttttcgtgatgccgatgcgttttccgctgacgatcggcgccggtgccgtcgatgtcagcgaaaagggttcgcggtcgagcaggcgatcattgagggcgatggtgacgtcgagcgcctggcagagcttgccggggccgctgcagagttgagcgagcgcatcggtgccacggcgttcgatcatcgtggcgatgccgatctcgggctcgatggcgcggatcaggacggcggagccgggggtgcagacgaagttcaggcaccagtgcatgccgtagatgcggtagatgtagacattccccggtccgccgaacatggcgccgttgcgcggcgtcgggccgcgaaagctgtgggaggcctcgtcgtcggagaaataggcctcggtctcgacgatgcgcccgccgatgccgccgacggtgatgcggcaggcgagaatatcgcgggcgacggatatcgcatcgcggtcgaagaagcgggtgagggagtcgcccacaatcggtgccgcgccgagcgcgcctgtcctttcgtccatctgatctatcggccgggtttcggatcgtgcagcgggatggacgagccggtgacggaaaccgggtcgcttgccggaaaggtgtcttcgaggccctcgtccagttcctcttccagcgttgccgcgtccttgctgcggggaccgtcgccggccgagctgtcgtgcgccgcgagcagcagatggcgggcgtgggcgacggcgttgtcgcgggtcaggccgggtgtcgccgcgttgtaaagcgtcacggaaatgctgttgccggtcttgtcgccgaacatgacggtaaagccgccctcgcgtgcacttactgatatgtctgtgatggtcatggtttcgctcccgatgatgggtttgccgacgtcagtctcgtatgactatgtttgcctcgcgaagaccttcgtcaaccattcgatgaagacgcggacgcgcggcgagagctggcggtttcgcggataaaggagtgagaccggcgttttcgtcatcgggaagtcctcaaggatgggcataagttcgccggaatcaatgtagcgctgggcatggtagcgcggcacctggatgatgccgaggccgaggcgtgccgccgcgtggaagctttcggcggcgttgaccgacagtgttgccggcaaggtgacattgcggatctggccgcccacgaggaattcgagcggcaccagcgtgccggtggcgctggagtggaaaccgaccatgcggtggccgtcgagccggtcgggatgctcgggcgttccgtagcgggcgagataggcgggcgaggcgagcgtgacttcctccagcatcgccacgcgccgcgcgaccatgtcgctatcggcggggatgccgaccctcagcacgcagtcgatgccctcgcgcacgagatcgacgaggcggtcgccctcgctcatgtagagttcgatatcgggataggcctcgagaaaagacggcaggtttggcagcacgaaatggcgcgccagcgtgccgtgcacgtcaacgcgcagcatgcctttcggccgggcgccggcgaaggcgccttccgcgtcctcgatatcggagaggatcgacaggcagcggcggtaataggcctcgccgtcgagcgtcgggctcacgtgacgcgtcgttcgctgcagcaggcggacgccgaggcgggcctcaagctgcttgaccgcgtcggtcaccgtcgagcgcggcaggccggtatcctcggcggcggcggtgaagctgcgtcgctcgacgatacggcaaaagacgcgcatggcatcgaatctgtccatctgtctgttcgatatttccggatagtgatggcgaataatggatgattatccgctgcgagaaaagcgacatcttctctccaacggcgcgatatcgcgcttccaggcaaggagaacgacaatgacggtattggaaaacagggtggcgatcgtgaccggcgcatcccgaggcatcggagcggcggtcgccgatcggcttgcgcgcgacgggtttaccgtcgtgatcaactactccggcaacgcggcgccggccgaggaactggctgccgcgatcgaaaagcgcggcggcagggcgctgacggcgaaggccgatgtcagcgacgcggaggccgtgcggcggatgttcgatgcttccgaggcggcgttcgggggcgtcgatgtgcttgtcaacaatgccggcatcatggcgctctctccgatatcagatgccgacgacgcgcatttccagcgcatgatcgacgtcaatctgaagggcacgttcaacacgctgcgcgaggccggcaagcggctgcgcaacggcggcaggatcgtcaatttctcgacgtcggtggtggggctgaagctcgagacctatggtgtctatgccgcgaccaaggccgccatcgagacgatgacggcgatcatggccaaggaaatgcgcggccgcgacatcaccatcaatgccatcgcaccggggccgacggccaccgatctcttcctgaacggcaagtccgaggaactggtggcgcggatggccaagatgaacccgctggagcggctgggcacgcccgaggacattgccgcggcagtgtcgttcctcgccggtcccgatggttcgtggatcaacggccaggtgctgcgcgccaatggcggcatgatctgatttgtgcgtcggggtgggcggctttcgggccgctcgccttcgagccggccctgttgtggatatcatgtgctgaaaaatgccagcatctggaagaggataggggagcgcccgggcttgaggcggcggggccgcaatatcctcttacatttgcatcgtgattgtctatattagcaatgtagggatgtgcggaactcctccaattccgcgtgtcagacctcaacgactgccgagccattgttccctggtgacccggcagagagtgaaagaagaaatggcaaaacatatggttgcggcccgttgaaggtaaacgcctcgcgggccgcagttctgtcagcgggcgtccagcttggcgtcggtcaggagcttgaccatccagtcgacgaagacgcggaccttgttgctgaggtggcggttcggggggtagacgatgtagagcccgagcggctcacggttccattccggcagcacctgtatcaattcaccgctttcgagcgcatcgcggatcatgaagcgcggtagttgcgcgatgccgagccccctcgtggctgccgccacgaaggtcctgctgtcgttgacggagacgaggtagcgtggattgatctccaactcctcgttgtccttgcggaactcgaacggaagcgtccggttggtctgagcgcggaagtagcttacggaatagtgatcgttttcaagctcttccggtctcgccggcacgccatgcttctcgatatagagcggcgaggcgcaggtgatcagctccacctcggatacgcggcgcgcaatcagggattggtcggtcggcgtgccggcgcgcagcgcgcagtcgacgttctccgccaggtaatcgacggtccggtcgccgacgcccaggtcgatgcggatatcgggatatttctgatagaaatcgcagagtgccggcacgacgatccagtcggcgaaggcgccggccatctcgacgcgcaggcgtccgttgggaagcccctgcgagttggtgaggctgccatccagctcggcgatctcggagacgatctgggccgcgcgttcgtagtagagcgcgccgtcggtcgtcaccatgacgcggcgggtggtgcggttgaggagcttggtatgcagatgtgcttcaagcccttgaatgagattggtcaccgtcgccttgggcatggcgagcgtgtcggcggcccgtgtgaaattgcctgtctccacgacgcgaatgaaagcgcgcattgccgagagctggtccatcggaattcacctgagtaggttgcagtgcggtattgttcgaaatacggaacagtgtaatcgcatagaggcttcttattccgtgagtggaataacaatatctttttttcagaaattgcaagccgtcgcctggggcaatatgttgcatcagcaatattacaccagcgacgcaaggatcgatacgatgacggtgcaagtgaaagacatggtgttcgacaaggtggccattggccccgtgtcgacgcgtatctatcagggcgccgaatatggcaggggttcgccgatcgtcctgtatttccacggcggtgctttccagtcctcgggactgcaggacaacgctgtcgcggaaagcattgcgcgggccggcgccatcgtcgtcgtggccgattacaacgcgccgttcggcggcgtttttccgaagcctctcgaggtcggctactcgctgttttcctacatggccaacaaacgcgcctcgggtctcggcgaccgcaattccgcactgctcgtcgccggcgaggaggcgggcgccaacatcgccgccagcgtcgccttcaaggcgcgcgaccactatgccgacgcgctcgacgggcaggtgctgatctcgccgctggtcgaccccttcatgggatcgaagtcgatccgcgaggccgatgccatcggcatgcgagagcggtgggcgcagggctggagccattatctcagcggtggcggctgccatccctatgcggcgccgtgcctctgctcgcgtatttcgggcgtcgcgcccgcactgatcttcaccgccggagacgacccgctccgcgatgaaacgcttggcttcgccgatcgcctgaaacaggcaggcgtggccgttcgtcagcatgtctctcccgccgggacaggctggccgtcgatttacggcggggtaacagacaagcctccgggttggcatgattgtattaccaatgaattcggaagcttcgttcgcgatatgcgcaggcaacccgttcctttgaagacctgatttatattcggccgtgggggccgtaaggagaataccaatgacgtccagtaagaagcgctgggcccttgtgggcgccggtctgagccttgttgcgtccgtttcagccgcagcactgtttttcgaactgccgatgagcgcaaccgccacggctgcaaccaccgaggcacaggcggctccgccggccgtgcctgtcaccgtcgccgtcgtcgccagccgcgacgtcaccgaatgggagcagttttccggccggctcgaagccgtcgatcgcgtgcagatccgctcgcgtgtcgccggcgccgtgcagtcggtgcatttccgcgaaggcgcgctggtgaaggccggcgacctgctcttcaccatcgatccggcaccctaccaggccgccgtatcgcaggccgagggccaggtggcttctgccgaggccaaggtcaatctctcgcagatcgagctcgaacgcggccgcaggctttccgacaacaggaccatctcgcagagcgacatggaccagcggcagaacgcattcaccgaagcgcaggccggtcttcgcaccgcgcaggcagcccttcgctcggcacagctcgaactcggctataccgaggtcaaggcaccggtcgccggccgcgtcggcaagctcgaagtcaccgtcggcaatctggtcgcggccggatcgacctcgtcggagctgacctcgctggtttccgtcgatccgatctacgccagcttcagcgccagcgaaggcatggtcgccagggcgctcgccgagcttccggccgccgatggcgcggtcccggcgcttgaacagatccccgtcgaagtcggcacgctcgccgacgagggcacgccgatcaagggcaagctgcagctggtcgacaaccaggtggatgcctccagcggcacgatcggcgttcgcgccgtgttcgacaatccgggtggcaagctgatccccggccagttcgtgcgggttcgcatgggccagccgaaggccgagaccaagatcctcgtcagcgaacgggcgatcggcaccgaccaggacaagaagttcgtcttcgtggtcgatgccgagaacaaggtcagctaccggccggtccagctcggcatcgccgaggggggcgatcgcgtgatcgaaagcggccttgccgtcggcgacaagatcgtcgtcaacggcctgcagcgcattcgtccgggcgcggtggtggcaccgcagatggaagagaaggtcgcggccaagtaattcgcagacccctccccaacccctccccacaagggggaggggctaagtctgccgcaccgcccaagccaggatttggcaggacagtgccacacgtcttctccccccttgtgggggagatggccggcaggccagagagggccttttaagcatccagttctacccccaccggcggtgtcccaaccgccggagagggtcgttgcatcccaaatttcatcccggagagggctttgaaatgaatatctccagattcttcgtcgaccgcccggtgtttgccggggtgctatcggtcctcatcgtggtcgccggcctgatcggcatgcgatcgctgccgatttccgaatacccggaagtcgttccgccgtcgatcgtcgtgcgcgccacctatcccggcgccaacccgaaggtcatcgccgaaaccgtcgctacgccgctcgaagagcagatcaacggcgtcgagggcatgctctacatgtccagccaggcgacatccgacggcgtgatgacgctgacggtcaccttcaagctcgggaccaatgccgaccaggcgcagcagctggtgcagaaccgcgtcagccaggcagaaccgcgtctgccgacggaggtgcgctcgctcggcatcacgacggtgaagagttcgcccgacctgatgatggtggtgaatctgacatcaccggataatcgctacgatatcacctatctgcgcaactatggcgtcctcaacgtcaaggaccggctcgcccgcatcgagggcgtcggccaggtgcagatcttcgggtcgggtgactattcgatgcgcatctggatcgatccgcagaaggcggccgagcataatctggcggccagcgacatcaccaatgccatccgcgcccagaacgtgcaggccgccgccggcacgatcggcgcatcgccgagcctcaccggcgtcgatatccagctcaacgtcaacgcccagggtcgtctgcagacgccggaggagttcggcaacatcatcgtcaagagcggcgccaatggcgagatcacgcgtctgcgcgatgtcgcacgtgtcgaactcggcgcgtcggactattcgctacgctcgctgctgaacagcaaggcggcggtggccattcccgtgttccaggcgccgggctccaacgccatcaccatctcggatcaggtcgtcaagaccatggacgagttgcagctggcgatgcccgagggcgtgaagtacgagatcgtctacgatacgacgcagttcgtgcgcgcctcgatcgagaaggtcgtggacacgctgctcgaggccgtggcgctcgtcgtcatcgtcgtcatcctgttcctgcagacatggcgcgcctcgatcattccgttgatcgcggttccggtctccatcatcggcacgttcgcggtgatgtacgtcttcggcttctcgatcaacgcgctcagcctgttcgggctggtgctggcgatcggtatcgtcgtggacgacgcgatcgtcgttgtcgaaaacgtcgagcgcaacatcgagaacggcctgtcgccgcgcgacgccacctacaaggccatgaaggaagtgtccggcccgatcatcgcgatcgcgctggtgctggtggcggtgttcgtgccgctcgccttcatcagcggcctgtccggccagttctatcgccagttcgcgctgacgatcgccatctcgaccgtgatttcggcgatcaactcgctgacgctgtctccggctctggccgctcttcttctgaagggtcaccatgcgccgaaggactggctgacacgcggcatggacttcctgttcggctggttcttccgtggcttcaaccgcgccttcagcgccggttccaatgcctacggcaagggtgtcggtggactggtgtcgcgcaagagcatcgtcatggtgatctatctggcgcttgccggggcgacctacggcctgttcaacgccgttcccggcggcttcgtgccggcgcaggacaagcagtatctgatcggcttcgcgcagttgcccgacgccgccagcctcgaccgcaccgaagacgtgatcaagcggatgagcgatatcgcccttgcaacgcccggcgtcgaacacgccatcgcgttccccggcctgtcgatcaacggcttcaccaatggctcgaacgccggtgtcgtcttcgtcaagctgaagtcgttcgaggagcgcaagacgcccgatctttcaggcggagcgatcgccatgacgctcaaccagaaattcggcgcgatccaggatgcgttcatcgccatgttcccgccgccgccggtccagggtctgggcacgacgggtggtttcaagctgcagctcgaagacagggcgggcctgggctacaacgcgctggatgaggcgaccaaggctttcctcgccaaggcctatcagacgcccgagctggccggcctgttctcgagctaccagatcaacgtgccgcagctctacgcggacctcgatcgcgccaaggccgaacagctcggcgtgtcggtgaccgacgtcttcgaaacgctgcagatctatctgggttcgctctacgtcaacgacttcaacgcattcggccgcacctacagcgtccgtgtgcaggcagacgcgcagttccgtgcccgcgccgacgatatcggccagttgaaggtgcgctcggcctcgggtcagatgatcccgctgtcggcgctgctcaaggtcgacgccacgacgggaccagaacgcacgacccgctacaacggcttcctcgccgccgatatcaacggcggtccggcgccgggcttctcgtccggccaggcacaggcggccatcgagcggatcgccgacgaaacgctgccgaagggcatcggcttcgagtggacggatctgacctaccagcagatccttgccggcagctcgggcatactcgtcttcccgctggcgctgctgctggtctatctcgtgctggccgcccagtacgagagcctgacgctgccgctcgcgatcatcatgatcgtgccgatgggcgtgctggccgccttgacgggcgtctggctcaccggtggagacaacaacatcttcacccagatcggcctcatcgtccttgtcggcctgtcggcgaagaacgcgatcctgatcgtggaattcgcccgcgagctggagttcgagggacgcacgccggttcaggcagcggtcgaggccagccgcttgcgcctgcgcccgatcctgatgacgtcgatggcgttcatcatgggtgtcgtgccgctcgttatttcgaccggcgccggcgcggagatgcgtgccgccatgggtgtcgcggtgttctccggcatgatcggcgtcaccttcttcggcatcttcatgacgccggtgttctacgtgctgatccgcaagctggcgggcaaccgcccgctggtgcagcacaaggacgacgaccagaacggccacggcggggccgaggtcatccgcatggcggccgaataggcctgacgaaacgcgaatgcgaaaggcggggcatgtccccgccttttccgcgtttatgggcttccatgcggcgacgtgtcgactagtctatcattcgccggacgaggggagtcgcgccggcatggatggaggcattggatgcatatcgcaatcattggcgcggccggcatgatcgggcgcaagcttacggagcggctggtggccgacgggcagctgtccgggcagtcgatcggcaggctgacgctcgtcgatgtcgtggcgccggcagcacccgccggtttcacggggcgggtggatgcgagcgcggccgatatctcgaagccggggcaggcggcgctgatcgtcgggtcgcggccggatatcatcttccacctggcggccatcgtttcggcggaagccgagctcgatttcgagaagggctacggcatcaatctcgagggaacgcgggcgttgttggaggcaatccgtctggcgcatctgcaggatggctatcggccctgcgtggtcttcacctcctcgatcgccgtcttcggcgcgccgatgcccgatgtcatccccgacgatttcaatctgacgccgctgacgagctacggcacgcagaaggcgatgagcgagcttttgcttgccgactatacgcgccgcggcttcatcgacggcatcggcatccggctgccgacgatctgcgtgcggccgggcaagccgaacaaggcggcttccggcttcttttccggcatcatccgcgagccgctggcgggacagccggccattcttccggtgccggatacggttcgccactggcacgcatcgccgcgttccgccgtcggctttctcctgcacgccgccagcatcgatctcgagccgctcggcgcgcagcgaagcctgaccatgcccggcgtcagcgcctcggtcggtgagcagatcgaggcgttgcgggcaatcgcgggcgacaaggcggtggcgctgatccggcgcgagccggacgagttggtgatgaggatcgtcggcggctgggcacgggctttcgcgccggagcgggcaaggcgcctcggcttcgtggccgagacgagcttcgaggagatcattcgcgtgcatatggaagatgaactggagggcggtatccgatgagcagtcagcaacgggcgatcgcgtttctgggcaccgggctgatgggcgcgccgatggtgcggcgtctgctcgatgccggatttgccgtaaccgcctggaaccgtgacatcgccaaggccgaggcgctgagggccgatggcgccgatgtcgcgcagacgccggaatcggccgtcgagggcgcatcggtcgtcttcaccatgctgacggatggcaacgcggtcggcgacgtcctgttttcgcaaggtgtggcgcaggcgcttgcgcccggcgccgtcgtcatcgattgcagctcgatcacgcccgaggccgcgcgcgatcatgcggcgaggcttggcgaacgcggcgtccgccacctcgatgcgccggtttccgggggcgtcgtcggcgcttcagcgggtacgctggcgatcatggcgggcggcagcgccgacgtcgtcgatgcgctcagcgacgtgttctcggcgctcggccgggtgacgcatgtggggccgagcggcacggggcagctcgccaagctcggcaaccagcagatcgttgcgatcaccatcggcgccgtcgccgaggcgatgatgctggtcgaggccggcggcgggtcggcggaggcgtttcgacgcgcgatccggggcggcttcgccgagagccggatcctcgagatccacggtcaacgtatggtggagcgcaacttcggcggcgccggcccatcgaagctgcagctgaaggatctcaacaacatcgccgccgaggccaagagcctggcgctgaccctgccgctgaccgaggccgtgcgcgcggaattcgcagcgttcgtcgaggatggcaatggcgatacggatcacagcggattgctgttgcatctggagcgaaaggctggccgcgaacgcggaaaatcctgatggtcggtacggtccctgacgaatagatagagctcgctcgtcggcgtgcaatcattgatagatttttagggtgttctaattaatgtcctgcttggcaatcactagaaagtgaaggtggttgccagcgggcagcggaatgggtttcgctttgacgtggcgtgaggcatgaatggctttggcatctaaaaactccatacgctcggagcgggagtttcaagatcttctacggcgtttggagcttgcactcgatgcatcgcagatcggtgtctgggagcatgatctgcgggaaaacgagatttcctgggacgtgcagatgcaccgcctctaccagaccgggcagcgtagcggacgcgtcccgacgtcgatttggtccaatgcgatccaccctgatgaccgcgcgcgtgccaaccgcgaattcagcgacgccatcgccaggcgtggccagtacaattcggaattccggatcatctggccgaatggcgagatccggtatatccggtcgcgcgcgcatttctatgtgagcgaagacggttcgccatccttcatcggcgcggaatgggatgtgacggccgacgtgcttctcaacgccgaggcggcgcggcagcgcgaggttgctgaggcgcgggcgctggcgctcgaggaaagcaccgcgcggatcgagcatgcggccgcgcacgactatctgaccggcctgccgaaccggcgcttcttcgatcagcggatcgccgaactcgccgaggacgaaaccgtctcgacgctggcggtgctgcatctcgacctcgacgagttcaagcagatcaacgacagctacggccacgccgccggcgacgccgtgctgcgcgcggccgcgttgcggatcgccgcggtgctgcctccgacgggcatggcggcgcgcatcggcggtgacgagttcgtcgtcgtgctcgtcaacttcgagagcatggacgaattgcgtgacatcgcgcggcgcgtgcagaagcgcctgcgcaagaagatccgcttcggtcacgagatgctgcaatcgggcgtctcgatcggcatttcatggtcggccgaccgcggtgattccaatcttctggccgaatccgacatggcgctctacgccgccaaggacgccgggcgcgatcgcatcgagttcttcacgcagcggctgaaggacgagctgatgggcaagcggcggatcgccgacgagctcaagctggcgctgacggcgggcgaaatcgttccttattaccaactgcaattcgacgcccgtacccgacaggtcgtcgggctggaagcgctggcgcgctggcggcaccgggagcggggcattctggcgcccgttgatttcctgaaggtcgcggacgagcacgggctgacggccgagatcgacgcatcgatcctgcggcatgtcctcaaggaccgccgcgaatgggagcagcatggcttcgaagtgccgaggatctcggtgaacatctcgggccagcggctttatgatccgcttttgatcagcgatctggaggggctcgatatccctgagaacgccatcgtcttcgaactgatcgagacgatttttctcgacgactgcgacgacgagatgatgcagagcgtcgaccggatcaagctgatgggcatcgagatcgagatcgacgatttcggctcgggtcatgcctcgctgatcggcctcgtcagactgcgcccgacgcggttgaagatcgaccgccagctggtggacgcgatcgatacgtccgacgaacagcggcgggtggtgaagtcgatcatcgagatcgccaaggcgcttgatgtcaaggtgatcgcggagggtgtcgagagcgagcggcacgccgcgacgctggccaggctcggttgcgatgccctgcaggggtttgcgctgagcaggccggtgccggcggacgagatcgacgccaagttttcggctctggtcacgagctgaggatcaggcggcggtgtcgagttcgccgcgcgcttcgagataccactccacgaaagccgccacaccctgttcgagcgacgtttccggcgtgtagcccgtgagcgcccgcagcagatcggggctggcgtaggtgcgcggtacgtcgccctgctgcatcggcagcatgacgcgcctggccggttggccgagggctttctccaccgtttcgacgaagtcgagcaggcttatcggctggccgccgccgatgttgacgatacggaacggcgcctgctgcgacagcgtatcgaccttctcggacgcgacgcgattgctttcgccggggacgacggccgagagacgcaccacggcctccacgagatcgtcgatataggtgaagtcgcggctcatcttgccttcgccgtaaatctcgatcggctggccctcgagcatgttcttgacgaacttgaagagcgccatatcaggccggccccagggaccgtagacggtgaagaagcggaaggcggtggtcgggatcttgtggagatgagcgtagctgtgcgccatcagctccatcgacttcttggtcgcggcatagaaggtcagcggctcgtcggcgcggtcggtctcgtggaagggtaccgtcggattggcgccgtagatcgaggaggtcgaggccagcatcaggtggccgacgccgctcttcctggcgatctccaggatgttccaggagccgatcaggttcgagttgaggtaggcctcggggttctcgttgctgtagcgcacgccggcctgggcggcgaggtggatcatcacgtcgggtctggcggccgtgaccgcctgctcgagcgcggcgcgatcctccagcatcgccgtgaccggcgtgaaggacggaaactgggcaagggcggcgttgcgcatatgcttgagcttgatgttgtaataatgcgtcatgccatcgaagccggtgacctcgtggccgtcctgcaggagccggcgcgcgagatggaagccgatgaaaccggccgttccggtgatgaaataccgcatgctcatgccctgctttcgattatgccttgctcttcttgcctacggcgaagtagctgaagccatgccttgtgacttcggcgatcggatagatgttgcgcagatcgaccagcaccggcgtcttgaccagcgtcttcagccgcttgaaatcgagcgcgcggaattcctcccattcggtgaccagcaccagcgcgtcggcgccttcggcgatctcgtagggatcgctgccgtagaccaccgggccgagcatgtccttggccgcatccatcccctcgggatcgtagacgtgaaccgtcgcgccgccgtcgagcagtgcctggatgatggtgatcgagggcgcgtcgcgcatgtcgtcggtgttcggcttgaaggtgaggccgagaaccgcgatcttcttgccgcggacattgccgtcgcaggcggcgatgaccttgcggcccatggcgcgcttgcggttgtcgttgatggcgacggtggtttcgatcagccgcatcgggctgtcatggtcctgcgcggtcttgaccagcgccagcgtgtccttggggaagcacgagccgccgtagccgggaccggcatgcaggaacttgtcgccgatgcgcttgtccatgccgatgcccttggcgaccttctgcacgtcggcgccgatctgctcgcagagatcggcgatctcgttgatgaaggtgatcttcatggcgaggaacgcgttggccgcgtatttgatcagctcggaggtgcggcgctcgcagaaatagagcggcgcttcgttgagatagagcgggcgatagacctcgcgcatgacctcgatggcgcgcggctcctcggtgccgagcacgatgcggtcggggcgcttgaagtcggtgatggcggcaccctcgcgcaggaattccgggttggacacgacctcgatgtccttgttgggaaactcctcgcggaagatgcgctcgagctcgtcgccggtgccgacgggcaccgtcgacttggtgacgacgacggtgaagccttcgacggatgcggcaatttcacgcgcggcggcgtagacgtaactcaggtcggcgtgaccgtcaccgcgacgcgagggcgtgccgaccgcgatgaagacgacgtcggccgcagccacgggggctgcgagatccttggagaaatccaggcgcccggcgctacggttctgcgcgatgatggtgtcgaggccgggttcgaagatcggcacttcgccggcttccagcgcgtcgatcttggcggccgacttgtcgacacaggtgatatgatggccgaaatccgcgaggcaggctcccgaaacgaggccgacatagcccgagccgatcatcacaatacgcataaaattcttcctcaaacaccgatcacagccttgcctgatgacaaggccatgacggtgttacagaggtaattttataagttcaagacaaccgggagatcagttgcggccgaactcgtcgacgatacggatgatgtcgtcctcgccgagataggagccggtctggacttcgatcagttcgagcatgatcttgcccggattggccaggcgatgcacttcgccaaggggtatgtagaccgattcgttttcgcgcagcatctgcacggtgtcgccgatcgtgacctcggccgtgcccctgacgacgacccagtgctcggagcggtggtggtgcttctgcagcgacagcttcttgcctggcgtgacgaagatgcgcttcacctggaagcggtcgccgttgaagatcgaggtgtagccgccccagggccggtaggaggtcgggtgcgtctcggtgagcttcgatgtcgccggcttggaggccagcatcttgacgatggcgccgacgtcctggctatccttgaggtggccgacatagacggcgtcctcactggcgatgacggcgatgtcgtccatgccgttgaccgcgagatgaactccgtgggtcatgaccagcgagttgcgggtgttgaccacggtggtgttttcggcggcgacattgccctgctcgtcgcggctgccgcttttccagatcgagtcccagctgccgagatcggaccactggaaaggagagggaacgacggctgcgttcttcgttttctccatcaccgcgtagtcgatcgagatatccgggcttgcaccgaaggctgccttgtcgaggcggatgaagtcgagatccttgacgccttgggcgacggcttcgccggcggccttgaggacggcgggggcaaaggtggtcatttcgctgagcagcttggcgaccgggaacatgaacataccggaattccagtagaacccgcccgatgccagcatctcctcggccttcgcgagcggcggcttctcgatgaagcgcttgaccgcaagcgcgccgctcggcagcgcctcgccgccttcgatatagccatagccggttgcaggctccgtcggcttgatgccgaaggtgaccagcttgcccgcggatgcggcggcgatcgcggtgcgtaccgcgtcgaagtagacctggtcggcgtcgatttcgtgatcggaggcgagcacatgcatgatcgcgccatcgccgaagcggtcgcgcaccagcgcgccggcggcggcgactgcggcggcggtgttgcgggccatcggctccaggaggatgctcgacagcgcgatgtcgagttcgcgcgcctgctcggccacgaggaagcggaactcctcgttggtgatgacgatcgccggttcatagagcgccttgtcggagacgcgcagcagggtttcctgaaacagcgtggtatcgccgatgaagcggatgaactgcttgggggcggcggcgcgcgacagcggccacagacgcgtgcccttgccgcctgccatgattaccggaacgatcttctgcgtcatctggatgtgtcctcgaatggtctttaatcgttgatcagtttgcgctcgcccaggcgcggatgcgcttgaggcccgctgcgagaaggtcggtggccgcgctttccgtcttcgcttccacgtagcagcgcatctccggcgcgttgcccgatgggcggaagtggatgatgcgcctgtctgtcagcgtcacgcgcagaccgtcgatgtcgctggtgctgtcgacgtcaccgatcggctgcagaaacgcggcgagattggccgggctcgcacgcaggtgcgccatcagtttcgcgctggtctcgaccgggaagttctcaagccggtcggcggcggcgaaggggagcgcgtagccggatgcgacgatcgacagggggcgcctgtttgcggccgcctgtgccagtgtcgccaggacaggcaggaagcaatcgcgggtcggcagcgccagcagcgccgtgccatcgagatcgaaatcgctcgccaccagcgtgccgccattggcctcgaagccaacgacgcctttcttgcctgaagcaagcgcctcctgcattcccgagatcacgaagggcgacccgacgcgggtgcggatgacgctgaacgatcctgatgcttcgatgccggagttggaggtgacgggtgtcaccaccgcattggcgccgaggaagtttgcggcgatcaggccaagcaggtcgccacgcagcggcgtgccggtttcatccgtcaccagcgggcggtcgccatcgccgtcggccgaaacgatggcgtcgaggccatggtcgcgcgccgcctgcttcagcagtgcgatggtgtcttccgagacggcttcggtatcgacgggaatgaagtcttcggagcgcgcgaaagccttgacctcggcgccgtagtgctcgagcaggtcgaccatgagatcgcgggcgacggtgctgtgctggtagacgccaattttcaggccggcaagcgcatgggtgggcagcaggccggcattgcgcttcgtgaagagggcgaggcactcggccgaccgatcctcaggctgaatctcgttcagcggccattcgaagccggtgcggtcgagatcggccgcggccgcggtgatcgcggcttcgtcgaccttgtcgatctcgccatcggggcgatagaacttgatgccgttgcggtcggccggaatgtgcgaaccggtgatcatcagcgaggcggcgccaagatgcaggccgtagagcgccagggccggcgtcggcaccgtgccgcaatcgatcatcgcaaagccgagctggccgagcgccttgatgcagtcggctgatatctcgggactggactggcgaaagtcgcggccgacaaggatcgggtctcccgccttcgccctgctgctttcgaggagatagcggccaaacgccgtcgcatggagcgccgaagcccggcccttcagatcctcggaaaggcctcgaagcccgcttgttccaaatttcattctgaataagccctcggcaacgcttgaattcgaccgtgttttgaaagcagactacccaaagttcgtaaactttgatggccggcgaccggtaaaatgtccgccaaatcccttttcgacgcaagtttgtagctcgtttttggcgagccggtggaggcaattgcatgaatgaacagacgatcgcactcgaagacggctggaagagcgccttgtccaccgagttcgagcagccctacatgcaaaggctgaaaagcttccttatcgagcgaaagcagatggggaaacggatttttcccagaggttcggaatatttcagggctcttgacctgacaccgcttaaagatgtgaaggtcgtgatcctcggccaggacccctatcacggcgcggggcaggcgcatgggctttgcttcagcgtgcagccgggcgtcagaattccgccgtcgctggtcaatatttacaaggagttgcggagcgatctcggcattacgccggcgcgccacgggtttctcgagcattgggcgaggcagggcgttctgcttttgaacagcgtgctgacggtcgaggaggcgcaggccgcgtcgcatcagggcaaggggtgggaaaccttcaccgatgccgtgatccgcaaggtcaacgacgaatgcgatgcggtggtcttcatgctgtggggcgcctatgcgcaacgcaaggccgcgtttgtcgatacatccgaacacctcgtcctcaaatcgccgcatccgtcgccgctttcggcgcataacggctttttcggctgccatcacttctcgaaagccaacgcctttctcgaaaaacacggtcgcccgccgatcgactggcagcttcccgaaaatcccgatgatgcatagtcggcgatgaacgattgtcgttggtcgttcactaaaagtagacgatcacctttattacggcgacgagaacggcgcgccgggcacgatcatgacctacttcccgttcccgaagatggcgcagggccgtcccggcaccggcgaagtcggaacgacggtctattccattcccaagggttcgatcggcttctggagcgatcgtctcgccaagctgaatgtaacaggtctgaagaccgaggaaacattcggcgagaagcggctgaactttgccggtcccgatggcgacggcttcgcgctggtcgaggtcaaggacgatgcccgtctgccctggacacatggcggcgtcgatgaggatcacgcgatccgcggtttccactcggtcgccatgcggctgcgcgacgacggtgcgacatcggaactgctgacgttcatgggctatcaggtccaagaggagcgcgatggcgtcaagcgcctgaccatccccggcggcaacggcgcgcatctgatcgatctcgagacgatgccgaacatttcgcgggcgcttccgggcgccggctccgttcaccacgtcgccttcgccgtcgaaaaccgcgccaagcagctggaggttcgcaaggccctgatggacacgggctaccaggtgacgccggtgatcgaccgcgattacttttgggcgatctatttccgcacgccgggtggcgtgctgtttgaaatcgccaccaacgaaccgggcttcgaccgggacgaggatacggcgcatctcggcgaagcgctgaagctgccgacgcagcacgagcacctgcgctcgctgctcgaacagcacctcgaaccgctggaagcataggacaggatatcgatatgaccgatcatggatatgcgcaccggctgcatgccggtgccgcgggcaagcctattcttttcaccctgcatgggacgggtggagacgagaaccagttcttcgacttcgcgcggcagctcctgccggaggtaaccatcgtctcgccgcgcggggatgtgtcggaatacggcgccgcgcgcttcttcaagcgcaccggcgagggtgtttacgacatggccgatctggctcgggcgaccgacaagctggctgattttgtcggacagctggcacgcgagcatcaggcgtcggcgatcctcgggctgggcttttcgaacggcgccaacattctcgccaacgtgctgatcgagaaagggcttttcgatgcgtcggcgctgatgcatccgctcattccgttccagccgaaggccaatgcggggcttgcgggtcgcaaggtgctgatcaccgcgggcgaacgcgatccgatcagccccgtgccggtcaccaaggcgctggccgattattacgagcgccagaatgccgccgtgacgaccgtatggcatcccggcggacacgagatccggccgaacgaggtcgatgcgatcaaggctcttttcgagccgtaccgataagacgtcatcgggcagacattgtggtgcaggccttgcgggtctgcccgatcggcttcggcacgctaccactttgatctatggtcatgccttcaatcttctgtggtaattctccgtcgataatactggagcgggtatagaatctcatcgtccggggattgcattcgtatgagcgataatgccgatcttcggatggtcctgggtcttctccgccgccagatccgggtggtgctggccaccaccgcctccattgtcgtattgaccgccatcatcctgatgtccttgacgccgcgatatacggcgcaggcgcttgtcgtggtcgataccagcgccaagaacctgttgtcgcccgataccgcgccagttgccgcggcttccgacaatgcacgggtggagggcgaggtccggatcgcgcagtcggacgcggtgcttctcgatgtcgtacgcgagggcaagctgaccgatgaccaggagttcgcgccgcgatccggctatttcgatctcgcaggcaccttggcccgcttcggcggcacgtcgtccggtgccactgacgccgccgagcgcgagacgctggcctccttcaaggaggccgtccgcgttcgccgcgaggggctgacctatctcatcaccatcggcgtcacctcaagggatgccgggaaggccgcgcttctggccaatcgcgtgtcgtctgtctacatccggcagcagatcgacgccaaggtggcggggacgatcgcggcccgcaatagccttcaggcgcgggtgagcgcggcgaaagacagcctcgcgagccacgaggggcggctcaacgctttcctcgccgccaatgtcggcctgcgcgatccctccggcaccgcgaatttgggcctgcgggtcgccgatgcgcagttcgaccagcgggcctcgcagccggcaggcacgtcgccgctgccgacgccctccgagacgttgacgcagttctacagcctgcaacaatcggccgagatcgcgcgggcgcaatatcagaaccttctcacccgattgcaggatttcgaggcgcaggccagcctgcaactggccgacagccggatgatttccgaggcattgccgcccatcgagccctcatatccgaagagtttggcgatccttgctgtcatgagcctcgtcgcgctcgggttcggcatcggggcgggcttcctgcgggagttcttcgtcggcggatttacgggagaggatcaggtcgccgccgtcttgaacatccagctggcgtcggtcgtgccgcatgaagagggcggcgaactggagcggccgcatgggcgcgggctctccgaccggatcatgacggcgccactgtcggtgttttcggaatcgatccggcgtatccgggtctcggtcgagcaggcgcttctcgacaggcactccgtgctggaggatgcccgcgcggagggcgtcgtcatcatggtgtcctccagccttccgggcgaggggaagtcgacgctcgccaccgcgttggcgcggacctatgcgcttgcgggcaaacgcacgctgctcatcgactgcgatctgaggaagccgagcattcaccgtcacgtcgatcgcgagccgacacccgccttcgtcaacctgctgtgcggcgaggccgatccggggctcgccagcatggtcgccgtcgatcacgccacgaacctctccgtcattctgggcgcgcggccagccgaattcgcgaccgacgagctgttgatgagcgcgcgggtgcgggcgcttctcgctcgggcgcggctgcatttcgactatgtcgtcatcgacacgccgccggtcgaggcggcggtggatgcgctttatctcgcccggctctgcgatgtcgcgctcttcgtggttcgatgggcgaggacgccgcagaacgtcgcgcgcaaggcagtggcggcactgaaaggaaatgtggggggcggtacatcggtcatcgcggtgctgaacgggcaggatcagcgccgctggttcagcttcagggcaaggcctccatggcgcacagcctatgccggatagggatcgccggccgtcgtttgcgtggtcgacatacgcctttaggtgcaatccaggcgtttgtcgcggcgttccgcttgacatggtggttgcattactgaaggtttaatccattcatcaatgcaacctcattcgcgtcacggctgcgccccgacttttcccggtggcgcttgattgcaggcatttgaaatagcgatttcactcattcgttgaagagcgacgcatggtccgtgcaaggcgcattctcgtccacgattactccggtcatccgtttcagatccagcttgcccgctcactggcgcagcgcggatacgaggttctacacgtctattccgaaagcttccagacgccgaagggtgacctccagacgcggccggacgatccgcccgggtttcgcatcgccggcctgtcgctgtccgagccgttccagaaatcgagctttctgaagcggcgggcgcaggagatcgagttcggacggctggtggccggtgagatcaggcggtttcggcccgagatcgtgctttcggccaatgcgccgctcgacacgcaggctgtcattcacaaggccgcgcgcgcctgcggagcacggttcgtgttttggctgcaggatatctacagcgaagccatcggccgcttcctgcccgcgacgtttccgctgatcggaaatgcggtcgcgcgccgatatcagcggctcgaattcggtctgctgagagaaagcgatcatgtcgtcgcgatcaccgacgacttcgttccatgtctccgggtcaacggcgtcacgcccgatcggatctccgtcatcgagaactgggcgccgctggaggagatggagctggccgggcggctggcgtccagaagcgaacgaggcaatgacccgatccgggcggtctatgcgggcacgctcggctacaagcacaatcccaatctgctgctgcaggcggcgaaagcgttgccgatcgcgatccatgtccattccgagggagcagtcgccgaaagcctggcgcgcaaggcggcggcggaaggtgtcaccaatctgcgcgtgaagccgtgggtgccgttcgccgacctgaccgatgttctcggcaacgcggatattctggttgcaatgatcgaggacgaggcaggggccttttgcgtaccgtcgaaggtgctgacctatttcgggtgcgggcggccggtgctggcttccgtaccacgcaacaacctggcgcgacgtctcatcgagcgcgccgatgcggggcttgcgtcggatcccgatgacgcggcggggttcatcgacaattttcggaggctggcaggggatggcgggctgcgcttccggcttggcgccagaggtcgtgaatacgccgaggcgcatttcgcgatcgagccgatcaccgaccgtttcgacaggattttcgccggtctccatcgagtggagaaacaggcggtctagcgctggggggcgttgcataatggagaggaccgcgcttgtctgcggcgccggagggtttatcggtagccacctcgttgcccggctgaagcgcgacggcttgcgggttcgcggcgtcgatctgaaattgcccgaatacggggaaagcgttgccgacgatttcatcgtcgcggatctgcggcaagccgacgtctgcgaacgggtgatcgacggcgatttccacgaggtctatcagctggcggccgacatgggcggagccgggtacatattcagcggccggcacgatgccgatatcatccgcaattcggcgacgatcaatctcaatatcgccgatctgtgccaccggcgccgggtcggtcgcgtgttcttctcgtcgtcggcctgcgtctatcccgcggtcaaccaggccgatccagacaacccgaattgcgccgagtggtccgcttatccggccgcgcccgacagcgagtatggctgggagaagctgatctcggaacggctctatcaatcctatgcccgcaactacggcatgacctgccgcatcgcccgctaccacaacatcttcggcccatcgggaacctgggacggcggccgggaaaaggcgccggcggccatctgccggaaggtggcgcaggccgagcatggcggcgagatcgagatatggggcgatggcctgcagacgcggtcctttctctacatcgacgaatgcatcgagggcacgatccggctgatgcgctcggacttcgctgggccggtgaatatcggctcggaggaaatggtgagcatcaaccggcttgtcgacatggtgtgcgagatcgccggcaagcggctgcgcaagcgccatgtcgccggcccgacgggcgttcgcggacgcagatccgacaatcggctgatcgccgagaggctcgactggcagccgacgcagagcctgatggatggcctggaaaagacctatgcgtggatcgagagccagcttccgcggagtgctgcgtgagaagcggctcttgccagtgggacagaccgtctgccgtggctaggcggccgcgcggctcgaccaacgcggcgttgctgatcgcgagcttcgtgatcgggcagggatcgatcttcctggcgcagacatggctgatccatcgcggcgcgctcgatctgcttgcggccttcgcgacgcatttttcctttgcgatccttacgcttggcatcgtcgatttcggcgcgcccgtcgtcgccgcgcggcggatttcgctggccgaggacggcgcgcgcgtggaggtggcgcggcgctgttactggcaggcctccactgtccggctcggcatcgcgttggtgctgtcgttggcggcgatctcctatgcttggcttggcggggacgggttttcgcgggcctatattcccgcagccgtgccggcgctgttgatctcggcgttcaacgcgacgggcgtctttgatgggctggggatcagcggcatcagcgggttgaccggcatgctcgcccacatcgcgtcggccatcgcgctggtcgcggccggcgccaacctggcggatgcgggcgtggtcctcggatcggcgctgtcgctgggctatgccatcgccgtcggcgcgcagctggccgtgctttggcggctgggctgctcgatgcgggtggcgcctgtcaccgtcgcggcttgcggcacctttgcccgcgagggcttaggcgtgttgctggcgtgcttgccggggcagctgtcgtttcggtttcagatcgtggtgtgcgcggcggttctggggcaggcgggggtggggctgttcgtctatggcagacagatcgccgccgccgcctcgcaggttctggaattcgtgcggcgcgctcattttcccgccatggtgcgcgttcttcggcccgggggcgtgacgccgaggttggttttcgaggcgcagcggctggcgagcctgctcgcgatcgtgctggcgcttggcctgatgctggccggcggcgcctgcttcctgctgctcggcggcgccttcgcgcaagcgggtctggtggtggcgctcttttccttcggggttctgaccggcgcgctcacgcagacgctggcgcaggcagcgcaggggcttggccgctttcgcgtcgtcgccgctgccgccgtgcttgccatgctggtcggcttcgcggcgagcgccggtctcggggcgctgttcgggcttggcgggctggcggtggcggaagtgctgacgcatgtggttggggcgctggtgatccggccttcgttgttccggcgagcggaagggcgcaagaccgtgcgggtcagcgcatgatcagactctggaccgtcgcggcgctctatctcgccaatctccccttcgccgacagcctgttcgtcgttctccttacgctgccgatgtttctcatggtgctggtcgggctgtatcgcattcagtcacggcgtttccagatcggagatgtcttctggttctgtctcttcgtctatttcgtgatctcgccgctgcagcgcattcatggggaccggatcggcggcgtgacggcgatcacggcctatgcctacgagccttacgagttcgtagcggcgatgctgatcgtggtcctgttctgcctgccgtttctattcgtcgcgatggatcgggccgaaccggcgccgaaggtgggtgccttgccactgccgatggcggttctgctcgtcctgaacggactggccttcgcgtccttcgtcgcatcgcaaggcggcatcgagcggctgttgtcgtcgcggctagagcaggacccggcgccgcccttcatcggcagcctgttctttctcggcctgcagtcggtgaccgcatgccttgtcgcggtgcggttccatgcgtcccgatcgcggcttggctcttcgcgactggcggctcttccgccgctgctgctcgtcgtcatcctgctggcggtggcgcgaaatccgttcaatgcgccgcgcttcatgctgctggccgtctggggaccggtcatgctggcgctttgcggcggcagggttccggcggcgtggttttacgtggccgggctcctggcgctgacgatcctgtttccgatccttgatatcaccacgcggcttggactggatggcgtgggcgatctctccgaaatatccgtcatcggcaacttcttcgatattccctcggtcgatgtcttcgacatggcggttcatgccgtgcgcttcatgtcggcgcatgaccagatgtggggcgagaagctcggcgccatcctgctgttcttcgtaccgcgtgcgatctggcccggaaagcccgtggtgggcgggctcgatgtcggcaacgagctgtttgccgcgggcatgtacgggacgccgaacctgtccttcttcatcggctgcgatctctacatggatttcggccttgtcggcgtcgcgctcggcggtgtcgtcgccgccatgttgctgcggctggtgctgatcgccgaatggggcgccttcggcggcgtcagcgtatcccgcatcctcatcgcctcgtcgctgccgatcctcctgcgcggccccgtcggcgccgtgctgccgttgttcgtttgtcaggtcgcgatcgtcctggccttgtcgcggcgggtccgggacaaggtctcgcccgtgctgcccgatcgggagcggttgcaacgatgacgaacggcgcatcggacaatttcggcatactcgacgcctcgacgtccggctcgcgtgagggcgggccgagctttgcggttcggcatcgcgttcttcgcctcgcctgggggatcacctggacgctgctggcggcgtggacgccggcgccgctgcatcgctggcgggcgttcctgctgcggctgttcggcgcgcggctggctcaaaatgcgcgggtgcatggatcggcgcggatctggtatccgccgcatctcgtcatggaggagaatacgctgatcggtcgcggggcgatcatctacagcatcgcgcccgttcacatcgggcgtggtgcggtgatctcgcagggcgcgcatctgtgcaccggctcgcacgatatcgacgatgcggccttccagctcacggctcagccgatcaccgttggtgctgacgcatggatcgcggccgaggcctttgtcggccccggcgttttcatcggcgagggggcggttctcggcgcgcggggcgttgcgttcggcgatctggccgcatggaccgttcatgtcggcaatccggcccggccgatccgcgcccgcctcaccagctcatagcggtggtcgccgatacccaggccgaggcggcgatcgcatagccccggtcgttgagatgcagcgcatcggaacgaagcgatcttggaatgatgccggcggcgacgtcctgctggtccccgcttgtctggttcgcggcggcggcaagcgcggcgctgagatcgacgaagcgttccggatagcgcgtcgccagcgtgacgttcaagccggcgatcgtctggcgggttgcgagatcatccgcggccgagggcaggatcgcgccgatcaggtagcggccgccggggacatgggccgccatcgccgcgatgtcggacaggacagtctcgggcttcgccgcattgttgcgtccggcccacagccattgaacctggccgagggtcgcatcgccggggaggaagcgggtggcgtattcgatggccacggcgtcgccgggatggctgcgcgtgaacaggtggcgggtgttgccgtcggtcgtcaatgtgccgtccacgccggccagcgcgccgggcaggccgatcgcgccattggcgccccgcagcgcgtcgaccgatcgatagagcacgtccacctgcgggctttgttcgccccactcgatgacgatgttgtcgagagaccagcgcacgagactgccactgctgaggaaggccatggccccgcaggacggatttgcgctggcgagattgccggcggaaaagaccagttcatagtggccgctcgccgagatcgcccagcttgggtcgccgcccgatgtcgtcgtcgcccagctgccgcccggtgccccgagaccgccgacatggatctggccgctgccctcgatgatgtcgatgtcgaaggcgatgtggacgatcttccctgcggggatgatctggccgccggggatttcggcaatggccagttcgcagccgcgcagcacgccgccgtcgtcgttgtcgacaattagcctgccatcgcgtgccacaaccggcgtcgcatggccatcctggatgcgcggcgaccagccctcgctatcctgatcgaaacgatagagcctggagaaggccgggcgataggccgggatttcgccatcggcgggcgtcagctgcaacgtggtcgccaccgcgctcctttcgaactggcccggaaagatacgcagcgtgatgtcgatcgcgcttccggatagggcgtcgagcagatgcgtggagcggacgaagccccgcgtcgcggtggccgtcgccgatacgccgctgcgcgtgccgtcaagggcgaaagcgggagccgcgatttcggcaatatagccgccgagttcgtcggcctcgatgagcagaaggcgcaggcccgatatgcccgaggtggagccggcgatcatctggatcgcgcttgagatcgtccacggactgcccggttccgttgcgtggttggcggcgatggcgccatagatctgccggccgatgtcggtgaaaccggccgttgccgtgccgctgatcctgacgtcgccgtagggcaggccgttttcgtcggtgcccttgtcgatgcactcatgcgtgaggccattgacgctgccggtctcgaacagatccatccagtcgcgcgtatgcggataaaggttcctgggatcgccgccggccacggcgagcagcagcggcacgccgccctgccgggcgccgatctcggtcgaggtctggccgccgatgccgcgattgacgatcgttcgaggcggatcgaaaagaccggcggcgacggccggaaaagtctggtcgcgagacgatgcgccggcaccttccgtcaggctgtcgccgtaagcgatgacctggcgagggccggaaccttgccgggcattggattggacggtcgaaaggccgataccgagaaacattgcgggtctccatcatgaactcggaagacatcctaattcagcgcccggagacggggatgacttgccggcgcaagttcttttccggtcagatctcgcaaagcgtggcgcacttcatgatctcttaagtaattatcttgagattacagtttccttgttccatgatgattccgaccggaaggatttctgtgtccgacgtcatgtcgatcgatgcagatcgcttccgcgcagaacatgtttcctggtcatcgatcgcgtatcgcggccgctagacttgatttcatcacattacgccgcctgtgtgcgctcgccgtgggcctgattgggaagattgcatgaattcggagtttgccgttcgccccatgcggcccggtgagttggagctagtgctcgaatgggcgcggcaggaggggtggaatccgggtctcgacgattcgcttccgttccacgacgcggacccatcgggttttttcgtcggcgcgctcggtgaagtcccggtcggttcgatttccgtcgtcaagtatggtgacgacttcgcctttctcgggctctacatggttcacccggagtttcgtgggaaaggctacggcagggccatctgggatgccggcatcgcctcggcgaatggtcgcggcatcgggctcgacggggttgtcgcgcagcaggccaattaccgcaaggccggcttcgaggaagcctacaggaccgtccgctatggcggcgtgatcggctcgctgccatcgtcgacgctgactgccacgcccgtgaccgacaagctggacgggctggtgcgctacgatgccagcgtgttttcggctgagcgttcggccttcgtgacctcttggtgcaccaaccgcaagcatcggcgcaccgccgttgtgcgcaagagcggcaagatccgtggctatggcacgatccgccgctgctacgacggatacaagatcgggccgctgttcgccgccgatcccgacagcgccgcggcactgctttccacgctcgggcaggaggcgaggggcgcgcgggtgttcatcgacgtgcccgtcgacaatcgcgacgcggtggcgcttgccgtcggcatggggctcgcgccggtgttcgagacggcgcgcatgtatcgcggcgccagtcctgccgtcgcgctgaagaatgtcttcggcgtcaccacgctggagctgggctagcgagcgtccgaggttgcgggcgccgcgcgatcggggcgccccttttcggcgatggcgatgccgccgagcgccagcaccagcgccacgatgtgaaacggctgcagcttttcgccgagcagcgccaccgaaaacagcgtgccgaagacaggcacgagattgatgaagagtgccgcgcggttggcgccgatccattccacgcccttgatgtagaagacctgcgccatcagcgaggcgaagatcgccgtgtagatggtgatgagccatccggtcgcgtcgggaagctgtgccgcaccgttcgatgcctcccatgccagaagcggcagcgcgctcagcatggcgccgagcgcgggaatggccatcagcgtgcgccagtcgagcggcggcttccatcgcaggaagatcgtgtagacggcgtaagcgacgaccgcgaccagcatcagcccgtcgccggtgttgaggccgagttccagcagcgtggtcaggctgccatgggcggccgtcactgccacgccgagcaaggtcatcgcaaagccgacgatctgcgccagcgacacgccggtgcggaagaagacgaagttgagcaggaagatcagcatcgggatgcctgcctgctcgattgcgacattgatggcggtcgtatattttaccgctgaataaagcatggcattgaacagcgtgtagccgacgatgccgtagaagaagagcagagggaggtttttgcgcacgacaggccagtcgcgcttgagctgcggcacggatatggcggcgatgatcgcggttgcgacgaaccagcgcagcgaggtgagcatcatcgggctgacgtgaccgagcgccagttttccggcaacggtattgccgccccagcacatcgcggcaacgacaaggcatatgtaggcggcaaactgcacggccgattctctcccggtcggctgcgcgggcgcagaacttcttccgacgatggcggcaaatagcctgccaatggctgatttgtcacgtaaaaagccaattcagacggcaatacagggtcgctttcccaaaaacaaagccttatagatgcgcgggtttgagcagggagcggttaaatccgcctttaacaggaagacgtgaatgacgaacgtagttgtggtcggttcgcaatggggtgacgaaggcaagggcaagattgtcgactggctttcggaacgcgccgatgtgatcgtgcgctatcagggcggacacaatgcgggccatacgctggtcatcgatggtgtcagctacaagctggcgctgctgccgtcgggcctcgtgcgcggcaagctcagcgtcatcggcaacggcgtcgtcgtcgatccgcatcatttcgtcgccgaagtcgagaagctgcgcgcgcagggcgtcaacgtatcgcccgagattctgcgcatcgccgacaacgcgccgctgatcctgtccctgcaccgagatctcgatggtttccgtgaagatgctgcctccaacagcggcaccaagatcggcaccacccgccgcggcatcggcccggcctatgaagacaaggtcggccgccgcgcgatccgcgccatcgacctcgccgacaaggaagcgctgccggccaagatcgaccgtcttctgacgcaccataacgcgctgcgccgcggcctcggcctgccggaaatctcggtggaatcgctggagaaggaactgaacgacgtcgccgaccaggtgctaccctatgtcgaccaggtctggcgcatcctcgacgaccagcgcaaggccggcgcccgcatcctgttcgaaggcgcgcagggtgcgctgctcgacaacgaccacggcacctatcccttcgtcacctcgtcgaacacggttgccggccaggccgccgccggctcgggcctcggcccgacggcgatcggttatgttctcggcatcaccaaggcctacacgacccgcgtcggtgaaggtccgttcccgtgcgagctgaacgacgaggtcggcaagcatctttcgaccgtcggccgcgaagtcggcgtcaacaccggccgtccgcgccgttgcggctggttcgattccgttctggtccgccagacggtgaagacctcgggcatcaccggcatcgcgctcaccaagctcgacgttctcgatggtctcgacgaactgaagatctgcgtcgcctacaagctcgacggcaaggagatcgattatcttccggcgagccaggccgcgcaggcgcgtgtcgagcccgtctacatcacgcttgagggatggaaggaatcgaccgtcggcgcgcgcagctgggccgatctcccggcccaggcgatcaagtatgtccgtcaggttgaagagctgatcggcgcacctgtcgctcttctgtccacaagtcctgagcgcgatgacaccatacttgtgaccgatccttttgaggattaaggttttatatgattatttgtgtggttcgcgcggcgaaccacactcttagagaaagtacgaatggcggattttatcgcagttatccggcgggcggttgacggcctgaccgacaacactcccgatatgcgggtgaaggtttacgagcgtgctcgcggtgccgtacagcggcagctcgagaacatgaagccgcgtccgcccgaggccatgctgcagcgccagctggaaaagctcgaagccgccattcgtgaagtcgaatccgagcatgccgatgcgctgccggccgaggaccaggccgccgccatcgccgtaccggttgcggaagcgccggcggagcccgaagcggctcccgagcccgaggtcatcgccgccgcgccagagccggccgccgaacaggcgcaagaggttccggaagccgaaccggcttacgagcagccggcctatgaggcgcccgcccgggagcccgcctacgaggaaccggcttacgaagcgcccgtcgagcccgaggctccggtggccgccgagcctgttgcgcatgaggagccgctttacgaagagccggcgccggtgcatgccgccgaggttcacgaagagcccgaggttcagcccgagcctgacgtccattacgagcccgcgccgtcttatgccgagcccgtattcgaggaagagccgcgtgtctcggctgcctccgagccggagccggtcgagccatggcagatgccggtcgaggaccaatacgatgccgcgcgtggaacgcatggccacgatttcgccgccgcgcccgatgtggagccctatgccgagcccgtcatcgacgacgcgccgcgggcgcagccggtcgcgcgtgatttcgacctgagcaatcgcctggtcgagccggttccggtgttcgagccgccgcatcagttcgtcgagcagacgcaggacgatcccattcatgccgacgccgccggtcatttcgacccggtgtggaacgaaccggcggaagaagtaccggaaccgtccacaaagacggttgagccgacggattgggcgctggaggaactgcgccagttctccgagacctcgcatgcagcacctgccgtcaacgacgcggcgcgcgccttcgacgaggtggtttccggcattgattatcagtcggcgccggtagcggcagccccggcgaagatgccggccgccagtgagagcttctcctgggaagcggctgccttcgacgacctgccgccgatcgacaacgacaagaaggcgccggccgccgcaccgtatgacgacggcgatctgttctccgaaattcatggcggaccgacgccgaagaccgagcctctggccggcgacgactggcaggaggcgacccggcttcgcggctacgacaatcgcggcgtcgtcgccgcggacgatgacggcccgtcgcttgcaagcggtgacgacgatatcgcctcgaagttccagggcaagaatttccgcatggagccgaagcgtcgtcgcttcggcatcggctccatcatcgcgctgctgatcgcgctcggcgttgtcggcggcggcggttatgccgcctatacgcatcaggaagcgctgaccgagatggtcaaggggctcgtcagctccgcgccgtcgcagaccgcgcagacgcctccggtcgccgggacgacggcgcccgccgatcagacgagcgaggcgaagcccgccgcgacgcccgatacggcgcatgcgacgcatcaggacggcgccgccaccgacggttcggcgtccggcagcaagttcacgcagcggctgcttgccgatggcaccgaggtcgatagcggcccggcggccgcgcccagcacgcaggtcgccgaaggcaagtccgtcgccgagcagaatgtcgcttcgtccgatccggtcgccccggccggtgccgcgacaccgccggcagccgcctccggcactgccgcgcccgggacgacaccaacagcggcgcccgccgacgcgcaggccgcccctgccggtgccagcgagaagatgttcctctacgaggagcgtatcggccagagttcgccaacggcgatccagggctcgatcgcctggagcctgcgccgcgaggccggcgccgacggcaagcaggaagcctccgttcagggcacgctgacggttcccgagcggaatctcacggcgcagatcaccttcaagcgcaactccgatccctccctgccggcaagccacatcgtcgagatggtgttctcgctgccgccgaatttcgaaggcggatcgatcgatagcgttcagcgcatttcgatgaagcggaccgagcaggatcgcggcgacgcgctggtcgccgttcccgcgaagatcaccgacgatttccacatgatcgcgctcaacgattatccggatgcccgcaaggccaacctcgacctcctgtcgacgcgcgagtggatcgatatcccgatcacctatcgcaacggccgccgcgcgcttctgaccatgcagaagggcccgaccggtatcgaagccttcaacaccgcgatccgcgaatggaacgccgccggcgacgtctcgaccagccagtaaggttggttgcatgagcagacaaacacaaaaagggcggatcttgagacccgttcctagccgaaatgtgaaatattagtgaaattcttgcgaaatcccttagagtgcaagctctgagggattttgcgttaatttaagaatctgaaggaagttaaaagccaagggtgacgtctgtgtttctgttggttcaaactataagcgggagcaagttctattggaccagtggcgaactgtttgtcactggtcggcataacgccttggagatttccaactatcggatggctcgcaaacagctaagacgagctgaagacttatatggaaagccgctcggggcgaagatcgagtacgctgatccatccgcgagcacgtggaaacgttttctgctatggctgtcgcagcagtaaattgcgcattgggcgcgatcgttttccgtaagcattccagattcaagacaaagggcggatcgtgagacccgccctttgtctgttgggaatggtgcggctcaggccgtggcttcgacgacgcggacggccttggcgcggtcgagcgcttccttgcggacggcgtcctggaccttttcgaaggcgcggacctcgatctggcgcacgcgctcgcggctgatgtcgaattcggtagacaggtcctcgagcgtcaccggatcctccgcgaggcggcgtgcctcgaagatgcggcgttcgcggtcgttgagcacgctcatcgccttggccagcatgcgccggcgggtgtcgagttcgtcctgctcgatcagcacgtcttcctggctgtcatgatcgtcgacgagccaatcctgccactggccgctgtcgccctccgacgccttgatcggcgcgttgagcgaggcgtcgccggacaggcgacggttcatcgagatcacttcttcctcggagacgcgcagcttggttgcgatctcggtcacgtgttccggcttcaggtcgccttcgtcgatggcctggatgcggcccttcaggcgacgcagattgaagaacaggcgcttctggttggcggtggtgcccatcttcacgagcgaccaggaccgcaggatgtattcctggatcgaggccttgatccaccacatcgcataggtggccagacggaaaccgcgttccgggtcgaacttcttgaccgcctgcatcagaccgacatttccttccgacacgacttcgccgatcggcaggccgtagccgcgatagcccatggcgatcttggcgacgagacgcaggtggctggtgacgagacgatgcgcggcctcgcggtcgccatgttcggaataccgcttcgccagcatgtattcttcctgcggctccagcatcgggaacttgcggatttcgtcgagataacgattgagaccggcttcgccggcggtaatggacggcaaactgcttcgggccattcttgcaccctcctatctgaattccggtccccgctttgacgcgtccctgcgttttgaaggcgaaccgggaacatgcggctttgtcaaagcccgcacgaagtcagtgtagagataagtgtggcgaaaccgtagttcaaggctcaaaccgggttcacgatgccgttacagctcggcattgcgcaatgcttcgaccagcgcgaccatgtcgtcgggcagcggcacctcgaagcgcatgatttcctcggtgcgcgggtgctcgaactgcagcatgtaggcgtgcagcgcctggcggccgaaaccattgaccgcctttttggcggcctccggcagaaggttggccttggtcttgaagccggcgccatagacggtgtcgccgaggagcggatggccgatatgggccatgtggacgcggatctggtgggtgcgaccggtttccagatggcactcgaccaacgaggccagcgacagcgcatccggcgtctcgtggaaacgctcgatcacctcgtaatgggtgatcgcctcgtcggcatcggccgtgcccaggcgcttgacggcgcggcgggtgcggtctccggtgtcgcggccgagcggcgcgttgacgctgccggtcaacgtgcgcggacggccccagacgacggcctggtaggcacgctcgatcggcatggtacggccgtgatcggcgaactgggcggagaggtggcggtgcgcgacgtcgttcttggcgacgaccatgacgccggtcgtgtccttgtcgagacggtgcacgatgccggggcggcgcacgccgccgatgcccgacaggctgtcgccgcaatgatagatcagcgcgttgaccagcgttcccgtccagttgccggcggccggatgaacgaccatgcccgatggcttggagatgacgatcaggtcgtcgtcctcgtagaggatctcgagcgggatatcctcgcctttcggcgtcgggtcctcgggctcgggcaggttgatctcgaagacgtcgccggggcggacctttttctgcggatcggcgacgacggcgcccttggaggtgacctggccctccttgatcagcaccttgacgcggctgcgggagaattcctcgccgagctgggccgtcatccacgcatcaagcctgccttcggcatgttcatccgccgtcaggactttcctaatgccggctgcttgtttaaaggggtcgctcaagacgcttcttctccgaagtattttatagaatggaacaccatatatgacgaatgtccagccagaagacgatcaggaagaaaagcccctcgatccggcaatggaaaatgtccgacgcaagatgatccgcctgcagatcgtctccggcttcatcatgttcgtgagccttatggcggtcttcggcgcggttgtctacaagacgatgtgggcgccggccaagcagccgacggcggtggcctccggcggaattccgtcggatgcgcctgtagccgcgacggcaagcctgcctgccggcttcgttctccagtcctcgtcgctttcgggcggccagatcatgttcttcggcaagaccgccgagggcgtgagcaaggctttggtgttcgacatcaaggcgggaagcatcatcgcggacgtgaccgtcaacggcggctgacgacaatggcccctcggctgatcgcgatcgacaatgccgacgaccccgagatcgccgagtttcgcgatattcgcgaacgcgacctgacgggacggcataaccggttcatcgccgagggcaccgtcgtgctgcgcatgcttgccgaggcgcatcgggcgggcggcgatttcgcggccgaaaaggtgcttttgctgcgcaaccgtgtcgacggcgtcgccgatattctcgagcggctgccggaggacgttccagtctatgtcgcggaagcggacgtgctcgaccgtatcgtcggctttcacctgcatcgcggcgtgctggcgctggggcggcggcagccacgggacggtgcgctgatcgagcggctgcccgagcgctcgctggtacttgtcggctgcggcatctccaatcatgacaatgccggctcgatgttccgcaacgcggccgccttcgatgtcgatgcgatcttcctcgacgagacctcgtgcgatccgctctatcgcaaggcgatgcgtgtttcggtcgggtcggtgttgagcgttccctatgaacgcggcggcgacgcgctggcgctgctgacgcaactcgccgagcgcgacttcgccatctggacgctgtcgccgcgcggcgaggtcgatatccgctccattccggcctccgagcggatggcgctggtggtcggcacggaaggcgaggggttgccgcaggcggtgctgtcgcggtttcgcagcgcccgcattccgcaatcgccagggctcgacagcctcaacgtcgccaccgcgacgggtatcgcgctgtttgccatgtcgtccacggtaaagcgtatctgagatcggtggttagccgggctgcgacaggatcgttgcggcccgctgggcgaggtcgatgcgctcgccgtccttggcttccgccgtctccggcagcagatcgcggatcggcgatgccttgccttcgttgatggcggtcagcgccaccatctcggcggcgatcgtcgcgatttcctcgcggatggcgccgtccttggaggtgttcagcctggcggcgaggatttcctctgaaacggcggcgctgcgggcgcgcacttcctcggcgaggcgtgccgcgacggctgccgtgtccagttcggagatcggggcgtcttcctgcacgggcttttcctgcggcgggatgaggacgaggggcgcgaggccggccgagcgaagcgcgcggttcgccttgcgcatgtcggcgttggcggctttcacctgatccttgagcttggtcagctcttgctgccggcgcgccagaagcgcctccttgtcggcaagcgtggccttgtcgcgctcggcgcggtcttccagacggatgaccgtgtgttcctgctgcgtcagcttctgttcggcatccttggcgcgcttctgcagcaggctcacgtcctggcggagctcgtcgcgctcgctgcgcaatccgctgtgcttgaaggtgaggttctcgaactcggtctcgcgcgcggccatgtcgatcttcagattgtcggtctgttcggcgatcttgttcaggcgaacacgcagagcgtcgagctcgccttccttggcggcactggcctgttcggcgatatgcaggctggtcttcagctgactgatgtagttctcgtccttgcgcagatgcgagcgcagttctgcggcctcgacgctcatatcggcgatctgggcctggagcgcgctgatctctgaggcgaagtggccggcgtcgcgggcgatctggtcgtatttcaattgcagcgacatcgacttttcgcgctcgcgaatcaggtcctgcgtcgtgcgggcgttctcggcggcgtaaagcgcgcggaccatgtccttttgcgcacgcacttcctgggggctgagaggcatcgtggcgcgcatgcggttttcggtgtaccagacgatacggcgatgaacggccggcgatacgaggaaaaccaggaacgccgcggccagaaagcccaatccgaacaagagcgcgtattcgatcacggcgaggccactgcttccagaagttgatttgcgtcagccaatgattaagcggccagcgccgttagggcaagtggcggatgggtcacggcgacacagagttcgccgtgcgcttgccgtcagaaggggttccaggtcggattttgggtaatcttgatgtagccgacgttgagaccgaggcgggcgccgacgccggtgcggatcggtacgacgaggacgttgttgttcttgagcagcgtcatgccgaagccggcgatgacgaaggcctggccgctgacgccgccgaaacgggcgtagatcgcatcggtcgacgggaggtcgtagaccagcatcatgacgcgcgtgccctggccaccataatcgaggccgagcgacggaccctgccagtagagcggatgctcgccggcgttcttggtgttgagctggccttcgccataggtcaggccggcgatgaaggcgccggagccttcctggccgaggatatagccgttcggcaagccgtatttctggaaggccgcttcgaccgccttggcaagaccgccgctggtggagccgaagaaggagtgaccggcatcgacgatttcctgaaccgaatactgatcgctaccggtctgctgggccgcggcctgggtagcggcaagcatcaggcacgagatcgcgagtattgagacccgccggcagtcggccagaaatcttcctaggattgaggggcgcatggtgtcatccgttcatcatggtcgatacatggagccgtttccggcgtttctatcattttgcgcggatggtcttaacaatcggtttaccaaatatggtgtcattatggcgccgagtacgctcgcaaacttcgtgcaatgatgaagcaatatgtgtggcggaatgaatcaccgccctcttggagacaatgatgtcgaagaatccaaaccttaccctgaccggccctgatctggccgcgcttctctgcagccgtgtttgccatgacgtcatctcgcccgtcggcgcgatcaacaacggccttgaactgctcgacgagggcggcgccgacgcagacgccatggatcttatccgcaccagcgcgctgaatgcctccgtgcgtctcaaattcgcacgccttgccttcggcgcttccggctccgtcggcgcgtcgatcgacactggcgaagccgagcgcgccgccaaggatttcgccgccgccgagaagaagaccgaggtggtctggaccggaccgcgcgcgatcatcgcgaagaaccgcgtcaagctgctgctcaacctgttcctcgtcgcctattcctcgatcccgcgcggcggccagatcgatatcacgcttgagaacccggaattcgacgcgaagttcacgctcgtcgccaagggcaagctgatgcgcctgccgccgaagttcgtcgagatttcgaccggtgagatcgaagaagcgatcgacgcccacacgatccagccctattacgcagtgctgctcgctgaagagtgcggcatgaagcttggccatagcgccagcgccgaagagatcatcttcaccgccgaagtcattccggcctgatcgaaaatccggccgggagaaaatcccggcacattgcttgtatcgaagtaatacttccttagccgaatgtttctatccttgcccgtgaagatgcccgccgggacagaagcggggcaatggagcagcgatgcaaaggttcatgatcaccgattcgtcggacgtcgttcgtaaggtcgggaagcggattctgtccgaactcgacttcatggtcagcgaagcctccagcgccagcgaagccctgtcccattgccaggtggaactgcccgattacctgatcgtcgattcgtccatggatggcgcgcttgatctgatcgtggcggttcgcgccatggaaggcggcaaggaggtcaagatctactattgcgtgatcgaggccgacctgaagaagctgatgatgggcaagcgggcaggggccacggacttcctgctcaagcccttcgatcgcaagatcctgaccgcggtcttcggcaatcgcgccatcgccgcctgacatttccatccgatccaaacgcaaaagccgccttcggggcggcttttgtcgtttcaggctgtccatggacacaaaaaatcccgccgtaaaggcgggatttcaaggatgatcggcgtagggaccgaaatcggatatcaggctgtttcggcgtactcggcgccatccggctcgcgcagaacgtagccgcggccccagacggtttcgatgtagttggcgccaccggccgcgttcgcgagcttcttgcgcagcttgcagatgaagacgtcgatgatcttcagttccggttcgtccatgccgccgtaaaggtggttcaagaacatttccttggtgagggtcgtgcccttgcggagcgaaagcagctccagcatctggtattccttgcccgtcaggtgaacgcgctggccaccgacttcgacggtcttggcgtcgaggttgacgatcagttcgccggtcatgatgaccgactgggcgtgacccttggaacgacggacgatcgcatgaatgcgagcaaccagttcgtccttgtggaaaggcttggtcatgtagtcgtcggcgccgaagccgagaccgcgaaccttgtcctcgatgccggccatgccggaaaggatcaggatcggtgttttaaccttggacaggcggagagtgcgcagcacttcatatccggacatgtctggaaggttgagatcaagaaggatgatatcataatcatacaacttgccgagatcgacgccttcttcacctagatcggtggtgtagacgttgaaactttctgacttgagcatcagttcgatgctctgcgctgtcgcgctgtcatcttcgatgagtagtacccgcattcttatcccctttaccgccgccgaaaggtggtctggcccctacgcgatacagaaatgtcactgcgtgatttggaagctgccacgaaatggttaacaaattctgattcactctggcaagaggtaatcaatttattaaatattttgtccattccgctgttttccaacgagaatccgcaaggccctattctcaactgttacattaagaaaggccggcaagcgattcattcgactcaccaatgaaacggaccggaaatcgcgtagttgtgtttaccgacccttaaatcatcggcactatcattaacgatgcccgtaaacgaaaggttaccagcggtaggtttttgttaacgccgagggaaattttttgggcaagtcgcatgaaggcggcagctaaagggcggtttcaagtgaagccggggtctcgcatcactggagtaatgcgtatgaagtcgcgtgagagcctagttcgtctgaaagagtttcaggtgaacgaaaagcgtcgtcaactgcagcagttgcagatgatgatgtctgaatttgaccgtatgacgaaggatctggagagccagatcgtcgtcgaggaaaagaagtccggcatttccgacccgaatcacttcgcctatcccaccttcgcgaaggcagcacgccagcgcgcggacaatcttcaggtttcgatcaaggaactgaggatgcaggaagaggccttggagcagacgctcgaagagatgcaggcggaatatgcacgcgctgccgcgctcgaggagcgcgacggagcggttcgggcacgagcctaagccaggatgatcgatgccttcgggcatccggggtgtcatctcataaaagccatgcatgacgggcgtgctgtccgtcatacatggcttttggcgtttttcgccgtcagaagctcaattgatgacgtcgcgccattcatcgtggcgaaccgcctgcgccttgaagaaggggcagagcggaatgattttccagccaccggttcgggcggcttcgaccgcgtgcaacgccagagcctggccgacgcccttgccgcgcagcgcgtccggcacgccggtatgatcgatgatgatgagtttcggcgatgtgcgcgaataggtcatttcggcctggtggccttcaagctcggccacgtagcggccacccgatgcgttttcttcgtcggtgatcttcatccgaaccgtctcctttcgattgcgtcgaacgaaacgtgccatggcgcccgcgcaaagcaaaggtcgccaaggggtgacgcattgttcgaagaaaggcagcgttttcgatgaaggggaattggcggggctggcgcttgcgaagccgatgccgagccttgctcgcgcagcccctgtccgagtggtctttgtggacggtggccgcgcctggagtgtcggttcagttcggcaatggaatgaatgccggcaagcaacaaaagcttcgggccggcttcacatcttgcgatgtgcggtcggcccgaactgaaatggaatgaacttcaaaaactaatcaatggcgatactgctggatgcgcgtggtgcgcaggccggcaagaccatggctgttgattgaggactgccaggagagaaactcctcgacggtcagggtatagcgttcgcaagcttcttccaagctcaacaggccaccgcgcacagccgcgacaacctccgccttgcggcgaattacccagcgccgagtattcggcggcggcaaatccgcaatcgtcagcgggctgccatcggggccgatgacatatttaactcggggacgtatcatttcggtcattggactctctacacaactcaagaccacgagagccactctagcttgtcacatttaaaaattgcctaaacgcatcgtaacactttgataataaatttaaccgcgtcggattacggcgctttggcgggtcgccgcgcatggcttcccttacgtaaatttgccatgagcgcatgggagccatgcacaatgaatattagttgtctgatcttcgtcaaactataagcctccccaatggcagatagaagatcgtgcgtcgtcgcgattgttctttctgtccgtgttggggatagaagtgcgggctttgcctggtgttgaagcgagcgatttttcttttcctatactttgattgttgctgccagaagagcgttttcaggcaaatttagcctttgaaggacgaaatcgatgcggaatgaagaacgcgccgtgcaagacggcgcggcggatattgcttttttatcgtcggaaaaaaccagcctatcgaccaccgatcccaggcagcgcctggcgcggctcgcgaaagcggcgggcttcaaccaatacttgttcgcgggttttccccacggcgacaatggcggtttcgcgggaaaccacatcttcagcagctggccggagagcctcgttgccgcctatgacgaggatgacctgtttcacaatagcgcgcttgtttgcgagctcaggaaatccagcctgccggtgtcattcgatgtgagcgcgttcgaaagcagcgcggcgaacccgaagaaccggcggatcaccggcctgtttcgggaactgggatttcgtcgcacatttgccttcgtgctgcatgacgccgatcgccagccgtatattttcgccttttccggcgcgcgggcggatctttcgcgccaggaggcgatggcgcatgtgttcagcgcgatggaatttctcgacctctacgctcgcctgcaggtctccgagcagccgctggagagcctcagcagccgcgagatcgaatgcctgcgctggtctgcggccggcaagagcagcgacgagatcgccatcatactggagctctcgccgcatacggtggtcggatatctgaagagcgcgatgcgcaagctcgattccgtcaatcgcatgcaggcggtcgcgcgggcattccgcttccgcctgctgtaatgtcgtcagagcattacggcgcagaattcggtcttcgcggctccgaattcgtattgcgccgtgccgctgtgcagcaaggcgagccaatctccccggttcagcgagacgatggtggtcgcgatctgccgcgcgggtgatgccgaggcggggccgttcgcattggcaacgaccgtcgtgccattgacctcgatcgccacgccgtggccggaggaggtgagggtgctcgaggacagcgacagcaggtaaaggccgtccgccggaacgatgagccgcgcgccagtgccggagggaacggcggccccgagttcaaagccgccctgctcggcgtggatatccgtaaagccggtgcggcttgccgatggcggagaggaggttccggccgcgggcgatgcccgcacgatcggccgggacggcgtgcgcaccaggccatcgggtgacacgatgagcgccgtcgaccagtcgtctccattgccgctgaccttgatcgaaaaggcgtcgcttcccgcgagccccatctcggcgcggcccgaccagccggtttgaaagagaagcgtgccggtttgagacggatcggccttgttgatcttgagctgatgaccttgcccttcgtgactgaagagactggcctccgaggcgaccgccagccggttgaccgcgtccgccgccgcattgacgccgatcataggcagcgagccgtcggcgtcgagcgagatcgtgttccagttcgtcccgtcaaaggcacgcagctggcgggtgtcgagaaagaaggcgcgccagcccggattgggcgacaggtaagcccaggcgccgtcctgccagacggagatcagtccttgccggccgagccattcgccctggggatcggcgccgatgaggtagcgatcgccttcggccggtgtcacggtcggcgtttcaggcggtgactggcgttcgccgaggatcgccagctggaccacggtgtcgaggcgctgcagcgcctcgttgtgcggcacatgcttctgcgcctgggacggcaggatgtagggcaaggcgaggttgtttgtctggtccgacacgatcgagctcccgttttgcggccggtttcactgccgcaaatcgtaggagcgtatcgggaaagggggacggcgcgcgtggtcgcccgctgatttcaaacggataatcgcgaaagacgtccccgcgctcaaagccggggagcattgccccaggaaatgaaatccggattggcaaagtcggcgtcgtgggcctgccttgtcttgccgtaggtgagggggcggccgtcgagcgttaccgtgcagccaccggcggcccgcagaatcgcgtcgccggccgcggtatcccactccatggtacgggtgaagcgcggatagacgtccgcttctccttccgcaagaaggcagaatttcagcgacgagccgatattcctgcactcggatatggcctgctcggccaggaagcgcgccgtccgcgggctgtcgtgcgaccggctggcaagcgccgtgcgttcggccctggcgaggcgaacattgatcggcagccgcttttcgacgcggaagtccgggccgatatgcagcttctcggccgtgccgctctcgccgagaaaggccacgcccatggcgggcgcgaagacgatgccggccgccgggtggccatcgacgatgaaagcgatgttgacggtgaactcgggccgcttgtcgacgaattcgcgcgtgccatcaagaggatcgactaggaagaacgacgagccgaccgccggcacgatgccggccgcgaccgattcttcggcaatgaccggaatatcggggaaatcgcgacggagatgcgcgagaatgatccgctcggcctcttcgtcggcgatcgtcaccgggctgttgtcggccttgctggcggcggtgcagccggcccggtacacatccatgatcgccttgccggcctgcagcgcggcacgttcaaacgtctcaagcatcgcggaccggttcgatcgcttctctgtcatgtctatcatatagtcgctttcgcacctgattgcaccgccgtgccgccgtcgcaaaaggacgcagccgtggtttggcggtttgtcgccggacaggcggaagacgaagatgcatgtgagaagtgaatttgcggtgaaaagtggcgttggaggctggattgtgttgaaaaaatcaactttctgaactccagaaagtcattttcaccaaaacggtaaagaactttggagcattgcaattttgcgcttcccttttgccttgaaaacagtatgaaatcttccaacaagggcccagcaagggctctaataacaagagacgcaggcttttcacgcttctgtgtccaggggaaagacatatggaatattttgtccagcagctcatcaacgggctgactcttggatccatctatggcctcgtggctatcggctatacgatggtttacggcatcatcggcatgatcaacttcgcccatggcgatattttcatgatcggtggtttcgccgcccttatcgtctttctcgtcctcacatccattttcgccggtcttccagtcgcggttctgctgctggtcatgctgcttatcgcgatgctgatgacgagtttgtggaattggacgatcgagcgcgtcgcctatcggccgctgcgcggttcgttccggctggcgccgctgatcaccgcgatcggcatgtcgatcgtgctgtcgaacttcatccaggtgacgcagggtccgcgcaacaagccgatcccgccgctgatcagcagcgtttataacatcggtggcatcaccatctcgctgaagcagatcgtgatcatcatcatcacggccgtgctgctcaccgtcttctggtatctcgtcaatcacacggcgcttggccgcgcgcagcgcgccaccgagcaggaccgcaagatggcggcgctgctcggcgtcaatgtcgaccagacgatctcggtgaccttcatcatgggcgccgcactcgccgccgtcgccggcacgatgtacctgatgtattacggcgtggtgaacttcaacgacggcttcgtgcccggcgtcaaggcgttcacggcggccgttctcggcggcatcggctcgcttccgggcgctgttctcggcggtctgatgatcggcctgatcgaaagtctttggtcggcctacttcaccatcgcctacaaggatgtggcgaccttcgccatcctcgctttcgtgctgatcttcaagccgacaggtatcctgggccggccggaagtcgagaaggtttaacgtcatggcaaatgttgaaaacacccctggcaagcccgcatccggacttgtccagaagggtattaaagaagctattttcgccgccgtcatctccttcggcatgttcgttctctatgtcggtctcggcacgcagcagaacatcagcaacgaactcgtcgtcgtgcagcgctggggcatgctggcgatcttcgtcgccatcgcggccgtcggccggttcgcgatcgtggtgttcctgcgtccgcatctggatgcccgcaagctcgccaaggcgcgcagcggcgagctcgatatctcggcggggaaggggttcttccacgcccacttcctgaagatcgcgcttctggcgctggtgctctatcccgtcgtcatcgtggcgctggtcggcgcccagggctcgctgaagtgggtcgacaacttcggcatccagatcctgatctacgtgatgctggcctggggcctgaacatcgtcgtcggtctcgccggtctgctcgatctcggttacgtcgccttctacgcggtcggcgcctattcctacgcgctgctgtcgagctatttcggcctgtccttctgggttctgctgccgctgtcgggcattctcgccggtctctggggcatcatcctcggcttcccggtgctgcgtctgcgcggcgactatctggcgatcgtgacgctggccttcggtgaaatcatccgcctcgtgctgatcaactggacggacctgacaaggggcacgttcggcatctcgagcattccgaaggcaacgctgttcggcattcccttcgatgccagcgcgaacggtttcgcaaagacgttcggtcttccgatgtcggccgcctattacaagatcttcctcttctacctgatcctggcgctctgcctgctgacggcctacgtcaccatccgcctgcgccgcatgcctatcggccgtgcgtgggaagcgctgcgtgaagacgagatcgcctgccgttcgctcggcatcaacacggtgacgacgaagctcacggctttcgccacgggtgcgatgttcggcggcttcgccggctccttcttcgccgcccgccagggtttcgtctcgccggaatccttcgtgttcctggaatcagccgtcatcctcgccatcgtcgttctcgggggcatgggctcgctgaccggcatcgcgatcgccgcgatcgtcatgatcggcggtaccgaggcgctgcgcgaaatggagttcctgaagctcatcttcgggcctgatttcacgccggaactctaccgcatgctgctcttcggcttggcgatggtcatcgtcatgctcatcaagccgcgcgggttcgtgggctcgcgtgaaccgaccgccttcctcaaggaacgaaaagccgtttccggcagcttcaccaaggagggccacggctgatgagccctcaggaaacaaccatgaccagcgataccctgctcaaggtcgagcacctgtcgatgaagttcggcggcctgatggcgatcaacgacttctcgttcgaagccaagcgcggcgacatcaccgcgctgatcggcccgaacggcgccggcaagaccacggtgttcaactgcatcaccggtttctacaagccgaccatgggcatgatcacgctgcagcagaagaccggcaaggaatatctgctcgagcggctgcccgatttccgcatcacgcgcgaagccaaggttgcccgcaccttccagaacatccggctgttctcgggcctgaccgttctcgaaaatctgctggtcgcgcagcacaacaagctgatgcgcgcgtccggctacaccattctcggcctgctcggcgtcggccgctacggcgcggaagcaaagaacgcgatcgagcttgcccgccactggctggaaaaggccgatctcatcgatcgcgccgacgatccggccggcgatctgccctacggcgcgcagcgtcgtctggaaatcgcgcgcgccatgtgcacggagccggagcttctgtgcctcgacgagccggcggctggcctcaatccgcgtgaatcggcggcgctgaacacgctcctgcgcggtattcgctccgacagcggcacgtcgatcctgctgatcgagcacgacatgtcggtggtcatggaaatttcggaccatgtggtggtgctcgaatacggccagaagatttccgacggcacgccggaccatgtgaagaacgatccgagggtcatcgcggcctatctcggcgtcgaggatgaggaagtggaacaagtgatcgcagacgtcgagagcctcgaaggaggtacgaactgatgaccggtcagccacttctcaaggtccagggcgtcgaaacctattacggtaacatccgggcgcttgccgggatcgatgtcgaggtcaacaagggcgagatcgtcagcctgatcggcgccaacggcgccggcaagtcgacgctgatgatgacgatctgcggcagcccgcaggcccgcagcggctcggtcatcttcgagggccgtgacatcaccaagatgccgacccacgaaatcgcccgcctgcgcatcgcgcagtcgcctgagggacgccgcattttcccgcgcatgagcgtgatggaaaacctgcagatgggcgccggcctcgataacctgaaatacttcaaggaagacgtcgagaagatctttgcgatgttcccgcgcctgaaggagcgccagacgcagcgcggcggcacgctttcgggcggcgagcagcagatgctgtcgatcggccgcgcgctgatggcgcgcccgaagctgctgctcctcgacgaaccgtcgctcggtctcgcgccgctgatcgtcaagggtatcttcgaggcgatcaagaagctgaacaaggatgagggactgaccgtgttcctcgtcgagcagaacgcattcgcggcgctgaagctgtcggaccgggcctatgtcatggtcaacggcaaggtgacgatgtcgggttccggccaggaactgctcgccaatcccgaggttcgcgccgcctatctcgaaggcggacggcattgagcatgacgaaggggagactttgatatgcagggacttttctttgaaggcgataccgtcgttcgcagcatcatccgcctgctcgtggtactgatcggtttctggaccgcatggcgtgccggcaaggcggcggccgacggctggagcgagtacccgatcgtcatcggttacaccgtgcttctggcggcggcgatgcagttcctgcatcacgcgctgttcaatggaccggcgctcagcctgttctactatgccatcgatttcgtgcttcttctgatcttctcgacggccggctaccgctatcgccggaccaaccagatggtcaacaactactactggctctacgaaaagacttccgccttctcctggaaggcaaaacattgacagccggttgaatctagggacaaattacctctccgagtggaacaggtttcccggcgcagtaaagtgggtgatgcgctgggtcatggaacggaacccgctaaaaaactgggagtaacataatgaagaagtctcttctgtcggcagtggctctgacggcgatggtcgccttcagcggcaacgcatgggccgacatcacggttgccgttgccggtccgctgactggtccgaacgctgcgttcggcgcacagctccagaagggtgccgagcaggcagctgccgacatcaacgctgctggcggcatcaacggcgagcagatcaagatcgtgctcggcgacgaccagtccgacccgaagcagggcatctcggtcgccaacaagttcgcggctgacggcgtcaagttcgttatcggccacttcaactccggcgtttcgatcccggcgtccgaagtctacgccgaaaacggcatcctcgaaatcacgccggccgcgacgaacccgcagttcaccgagcgtggtctgtggaacacgttccgtacttgcggtcgcgacgaccagcagggcggcatcgccggcaagtatctcgccgacaacttcaaggacgccaaggtcgccgtcgttcacgacaagaccccatacggccagggcctcgctgacgaaaccaagaaggccatgaatgccgctggtctcaccgaagtcatgtacgaaggcatcaacgtcggcgacaaggacttctcggctctcatcgccaagatgaaggaagccggcgtttcgatcatctactggggtggtctccacaccgaagctggtctgatcatccgccaggccgccgaccagggcctgaaggcgaagctcgtatcgggtgacggtatcgtttcgaacgaactggcatcgatcgccggcgacgctgtcgaaggcacgctgaacacgttcggtccggacgcgacgctgaaccccgacaacaaggcactcgtcgagaagttcaaggccgccggcttcaatccggaagcttacacgctgtactcctacgccgcgatgcaggctattgcaggcgctgccaaggcagccggctcggtcgacgctgaagccgtcgccgcggcgatgaaggccaagggtccgttcaagacggttctcggcgacatctcgttcgacgaaaagggcgacccgaagatcccgggctacgtcatgtacgagtggaagaagggtcctgacggcaagttctcctacttcccgcaggctgctgcgaagtaagaactttcgttctcaatctggaagcccggtctcgtgccgggcttctttcgttttgcggcaatccgaaccgtgccgccgcccagtggccttgcgatcgcggatgatccggttaggatcgcccgcgcattcaacaggttgcggcgccaaggatttttccgtcggcgtgcaaccagacatacggataggccatgccccgccccaaaattctgctgacgcgccgctggcccaatgccgtcgaggcggtactcgccgagcgtttcgaggccacgttcaacacaggcgatgtgccaatgtcgccgcaggcgatcgcagaggcgttgcgcatgtatgacgccgtgctgccgacggtctccgacaagcttccggcttccgttttcgaaggcgagatccgggcgaagatcctcggcaatttcggggtcggcttcaaccatatcgatgtcgcggcggcgaaggcgagcggcgtcgtggtgaccaacacgcccggcgtgctcaccgattgcaccgccgatatcgccatgcttctgatgctggcggtggcgcgccgtggcggggagggcgagcggcaggtgcgggccggcgaatggaaaggctggtgcccgacgcatatgatcggcaccaaggtgaccggaaagacggtgggcatcatcggtttcgggcgcatcggcaaggccttcgcccggcgctgccatttcggtttcggcatggatgtggtgttctacaatcgctcgacggtcgatcctgatgaggcggcgcgctatggggcaaggcaactcgcgagtgtcgaggatgtcttggcggcggccgatttcgtgtcgctccattgccccggcggggccgagaaccggcacctgatgaacacatcgcgtttcgcggcgatgaagcccggcgcctatctgatcaacacggcgcgcggcgatgtcgtcgatgaggcggcgctgatcgcggctctggaaaatggcgtgatccgtggcgccgggctcgatgtctacgaggcggagccgcaggtgccggaggcgctattgaaaatggagaatgtcgttctcctgccgcatctcggcagcgcgacggaagagacgcgcaatgcgatgggaatgaaggtggtggacaatctcaccgccttcttcgagggcagggagccgcctgaccgggtcgtctgatccgctctatcgctccacgccgacggtgttgcgacggcccgccgtgttcgccggcttggcatcgaggccgaagagcaggcgggcgcggccgggtatgaagtccacggcgatggcgaagaggccggacactacgaaggtcgcggccgcgatgatcaggaagctcggcacggcgggcaggccgagcggcagcacatagtagagcgcggcgacgacgaccgtctggtggatgatgtagagcgggaaaaccagccgattgagggtcaccagccgcgcatccggctggttgaaatggcgggcggcgaagccgacgagtgtcaggatcatcgaccaggcgagcaggaagatcgcggccttgaagagcggggtgtcattggcgtagctgccgatcgcctgctcggccggggcaagccaggcgaaggcatagagaaacaccgtcgtggcgagcgcgatcgcggcgctgacaaagcgcttcgcgatgatcggcccgatcagggtttggtgattgcgggcgatgaggaagcccaggccgaaccagctcgcccagaccgcgaaccaggcgccgtcattgtagagcgcattggtttccttcggatagatcggcgagagcgcgaggttcagcgccagcggcagcaggacgaagaggtagatggcccaggtcttcgcgacgcgctcgaaccaggccatgatcccgtttttcggccggctgaggtagacaaagatcggatagcagatcaccgacatcaccagcagataggcgacgaaccacatgtgcgcccaggtgaaattgccggtgggatagcgcccctcggtgaaatagcgtgtcaaccagaaggtcggcagcgagccatcgtagccgttctcgtacatgcgttcgtaccagacctgcggcacgaggaggactgccattgcgaagagcaggggcacgagtaggcggatggtgcgcttgtacacgaaggcgacgctctggtccgagcggaacgagaaggcggcgcccatgccggagacgaagaacagcagcgccagccgccaggcgcgcggaaagtccatgatcagggacagcgtctggctggtgcgcgcgctgtggatcagccagcccatgtcggggaagaaagcggcggaggagtggtagaggatcaggatcgcgaaggcggagatccgcaaccgatccacatagtaaagcctgtccttcatgacccgccaccaattcgttgcagccgcgatccctttcgggtttcaccagctttacgcgaatggctttaagaaatcctgtgcgcccagggccaagctacgtctcgtgcagcacgtgggctgccttgacggcggcggaggcgcggttttcgacgccgagcttgacgtagatctgctccaggtgcttgttgacggtgcgggcggagaggccgagaatttcaccgatatcgcggtttgccttgcccttggcgatccatagcagcacctcggattcccggtgggtcagcgcgaagcgctggcgcagcacctgatcgtcggcgcgctggctggcggtcaggcggaagagatattcgtcggggccgatcgtgcccagaaaggcgagctgcagcacgtcctggccgccatgggcgacggcgatggccgcgtcgcgggtggcgggggcgcggtccttcatccagttcgcgatcgttgcgatcaccgtgtccatgccgtcgtcgctgcccatggcggcattgacgaggcgggtggcctgcggggtcgaccagtggatgttgccgtcgcccttgaccgccagcagatggcggccggctgcatcgagcgcaacgcgggcgctctgggcggagcgggcgtttcgcaagtgcacgccgatgcgggcgcgcagttcatcgatgttgatcggcttggtcagataatcgacgccgcccgagccgagcgcgtggactacgtgctcggtctccgtcaggccggtcatgaagatgacggggatctggttgatcgcagggttggccttcagccgccggcaggtctcgaagccatccatggagggcatcaccgcgtcgagcaggatcaggtcgggggtgatgcgctcgacgatgttgagcgcggcggaacccgaagtggcgatcaggacggagaagccggattgctccagcgcgtcggtgagaaagccgagcgcttccggcgagtcgtcgaccaacagaacgatgtcgcgcgggagttcagccaatgtgttccaccttttcgtcgaagcggtgcaggaaggtcatgaagccgttcaggtcgaaggcggcgacataggatcgaagttcctcggtgaatggctgatttgcctccaccttggcaaggtcggcgagcttcgcctcgatgcccctgatatagccgatctcgccaagacgcagcagttcctggacatgcgcgtcgccggggctttgcagcatgacctgttcggccttcgggggcgatgcgggggctgcttcggcgtagagccatttcaggccgaggtgaagcgcgagcttgtcgcgcaggcggcggatgtcgaccggtttgccgatagcgtcattgtggctgtcgtcgctgtcgccatgggcggcgacgtcgccgatgttggcggagagcatgacgatcggtgcggtctggccggcttcgcgcaggcgcgagaccagctgccagccgttcatcccaggcatcaggatgtcgaccaggaagaggtctggctggatgccttcgatcagcgtcaggcaatccatgccgcttgccgccgtcagcacgacgaaatcgagcggcgccaggatctcgcgcatcatctcgcggtggtcctcgttgtcgtcgacgacgacgatggtgcggcgcgggccgtcgtagctgacgatcttcttttcctgcggcggggccgccatctcgcgcagcacggccgagagcatcagccgcaccttgaaggtcgagcccttgtccttctcgctggccaccaggatttcgccgccgagcgtgttggtcagaagccgggtgatcgtcagcccaaggccgagaccgggcatggggcggatgctgtcggcctcgccgcgctggaagggctcgtagatgcggctcaggtccttctcggcgatgccgcggccggtgtccgtcacggtgaaggtggcgacctggctgcgataggcgacgtcgaaggtgacggtgccctcgtcggtgaacttgatggcgttggacagcagattgacgaggatctggcgcaggcgcttctcgtcggtgcgcacgaactgcggcagggcgggcgcgcgctggtgctggaaggtcagtcccttggcgagcgcctgcgggcggaacatgtcgacgatctggtcgaggaaatcctggatgttgatctcgttggaatagacctgcaggcggccggcctcgatcttcgagatatcgagcaggccgtcgataaggccggagagatgttcggcgctacggcggatgaccttgatcgacgactgacgcggcgtcgggatggtctcgtcgcgctcaaggatctgggcgtagccgagcacggcattgagcggcgtgcgcagctcgtggctgaggccgacgacgtagcggctcttggcgcggttggcggcctcggcggtttcctttgcggcctgcagtgctgcgtcggtcttcttgtgggcggcgatttccttcaggagcagcgtgttctggcgcgaggattcctcctcggcgacgacgcggctgtcatgcgccagcacgtagaaccagcagacgacgccggcgatgacggcgaagacgaagaagacgatgaggatcgtgccgttgacgacctcggcggtctcgggcgaagccgaggagacctgataggcgatcatcgccaggatggcgccaaccgctgtcagcgccagcgcgacggcaatgccgtagcggccgagccgggtggtgagcttctcgacgatcgtctcgggcagcaccgcccgggcgacggtgccgacctgcgcattcagatgcgcgttcggtttgcacatgtcgtggcagcggctgtcgagcgagcagcagagcgagcagatcggcgcggcataggccgggcaccacgccatgtcctcgggctcgaacgcatgctcgcagacagagcaggtgatatccgtgagtttcttccagctctggcgcggcttgcgggcgaggtagaatttgcctttcgtggcccaggctatggcgggcgaggcgatgaaggcgacgacgagggtgatgtagggcgcgagcgaggcggcggtggcgccgaagacgccgaaatgggcgatgagcgccgctgtcgccgacagcatcatggcgccgaggccgaccgggttgatatcgtagagatgggcgcgcttgaactcgatgccgggaggcgcaaggccgagcggcttgttgatgaagagatcggccgagatggtgcagagccatgccatggcgatgatcgagaagatcccgagtgtttcctcgagcagcttgtagatgccgagctccatcaggagaagcgcgatcgccacgttgaacaccagccagatgacgcggccgggatggctgtgggtcaagcgggagaagaagttcgaccaggcgagcgacccggcataggcgttcatcacgttgatcttcagctgcgagacgaccacgaaggcggccatcaggagcagggcggcgttttgccaggggatcatgtagccgaaggccgtcagatacatctgggccggatcggcggcgcggtcggccggcaccccggaggcgaaggtgagcacgacgagaaaggagccggcaagcagcttcggcgcgccgatgatgacccagccggggccggcgaggaagacggcgaggcggtggcgccactttgtctgcttttccggcggcaggaagcgcaggaagtcggcctgctcgccgatctgcgacatcagcgccaggataacggccgacgcggcgccgaattcgacgagatcgaagggggcggtcgtgccgggcgggccggaggcatggcgaatgccggcaaaggcgcgccagaggtcgaacttctcccagtccatcacggcgatgaagaggaagggcaggatgttgaggacgatccagaagggttgcgtcagaagctggaaacggctgatcagccgcacgccgtgggtgacgagggggatcaccatgacggcgctgatgatgtagccgatccaaagcggtatgccgagcgtcagttccagcgcgccggacatgatcgacgcctcgatcgcgaacagcatgaaggtgaagctggcgtagatcagcgaggtgatggtcgagccgatataaccgaagctggcgccacgcgtcagaagatcgatatcgacgccgtggcggatcgcgtagcggctgatcggcaggccgatggccagcatggcgatcgaggcgacgatgatggcatagaaggcgttggtcgtgccgtaggacagcgtgatggcgccgccgatcgcctccagcgcaaggaaggagatggcgccgatcgccgtctgcgagatgcgctgcgaggagaactgccgggcgctcttggcggtgaagcgcagcgcataatcttccagcgtctggttggcgacccagcgattgtactcgcgcctgaccggaataatgcgttgccgcgctgccatgcccgtaaccggccccttcgttccccttgtcatgcgttcgtaacatggaacggggcgaggcttaagagtgcggtgcaacgcaaaactgcagatttcgccccgtcacctacgtcatatcacgtatacgctttcgcactgcagcaccggatagtcccttaagcaacagttaatcgccgtttcaggcctgttgtcggaacaagaagaggggatcaaccagatgaatctgcgatcatatgtttccggtgccttgctcggcgccgtcatgtcggccacggccgcgttccagggagccgttgcggccgacgacaccatcaaggtcggcgtcctgcattcgctgtccggcacgatggcgatttccgaaacgacgctgaaagacgccatgctgatgctcatcgacgagcagaacaagaagggcggccttctcggcaagaagctcgaagccgtcgtcgtcgacccggcttccgactggccgctgtttgccgaaaaggcccgcgagctgatcgaaaaggacaaggtcgcggcggtcttcggttgctggacgtcctcgtcgcgcaagtcggtcctgccggtcttcgaggaactcaactcgatcctgttctatccggtccagtatgagggcgaggaatcctcgcgcaacatcatctacacgggcgccgctccgaaccagcaggcgatccccgccgtcgactacctcatggagaaggaaggcgttaagcgcttcgttctcgaaggcaccgactacgtctatccgcgcaccaccaacaagatcctcgaagcctacctgatctcgaagggcattccgaaggaagacatcatcgtcaactacacgccgttcggcttctccgactggcagacggaagtctccaagatcaaggaattcggctcggccggcaagaagacggccgtcgtctcgacgatcaacggcgacgctaacgtgcccttctacaaggaactcggcaaccagggcgtcaaggcaaccgatatcccggtcatcgccttctcggtcggcgaagaagagcttgccggtctcgacaccaagccgctcgtcggccacctcgctgcgtggaactacttccagtcggtcgaaagcccggccaacaagaagttcatcaagcagtggaaagagttcaccaagaacgacaagcgcgtgaccaacgacccgatggaagcggcctatatcggcttcaatgcctgggtcaaggccgtgcaggccgccggcaccaccgatacggacaaggttctcgactcgatcgtcggtaccacggttccgaacctctcgggcggctacgccaccgtcatgccgaaccaccacatcaccaagcctgtgctgatcggtgaaatccaggcgaacggccagttcgaaatcgtccagcagacccctgctgtcgtcggcgacgaatggtccgatttcctgcccgactccaaggacctgatctccgattggcgcaagcccctgaattgcggcaacttcaacgttgccacgggcaagtgcggcggcaagggctcctgagtgctgatcaccccgtcactctgacgcctgaagacttccgcccggtctctcctgtccgggcggaaggtccatcttagaagcgcggcccggatgcttccgacggcagtggtccccgcgtggggccctgtcgagccaaggcccggtacttcttttccattgggccggtaggccaacgataaccgaggcagaaagccgatgtatcgcgccatcaagattttgcttttgaccttgtgcctggccctgccggtattcgccacggcgctgaaggcgcaggaagatttccgggtgctcgtcgatgcgcttggcgtcggcgacttccccgagcgcgaggtcgccatcaaggcgctggtcgcatccggcgatccccttgtcagccagatcctgcagcagctcagcgacggccggctttacgtgaattccgaaaacggcggccctgtcctgctccagggcggcacggaggacgagccgagcttttccgatcccgtcagcggcgaggtcgtcgccgatatcgatgcggactacatgtccaaggtcaggatcaacaattcgctgcgcggcgttatcgcctcggccatgagccagctgacgctgctctctcccgatcgcggtgcgcgccttgcggccgcgcaggggctgttgcgcgatgccgatcccgccaatctcgaactgctgaactcggcgcttgccgccgagagggacgccgaggtcaaggccacgatggaagcggccagggccgtgatggtgctcaagagcgatgtcggcgcagaggacaagaaggcggccatcgatacgatcgcggagcgtggcggtcgcaatgcgctgacgatcctgacatcggccatggcgaccgcgcctgacgcgctgaaaggcgatatccagacgcatatcaacacgatcaaccgcagcctggcggtctgggacgtggtgcagaacgtctggtacggcctgtcgctcggctcggtgctgctgcttgcggcaatcggccttgccatcaccttcggcgtcatgggcgtcatcaacatggcgcatggcgagatggtgatgatcggcgcctacacgacttatgtcgttcagcagtacatcgcctcgacattccccggcctcgaagtctattcgctggccttcgccgttccggccgccttcctcttcaccggcttcgtcggcctcgtcatcgagcggaccgtgatccgctatctctacggtcgcccgctggaaacgctgctcgcgacctggggcgtctcgctcatcctgcagcaggcggtgcgctcgatcttcggaccgaccaaccgcgaggtgcgcaatccgagctggatgtcgggcgcgttcgagctcggcggcctgtcgatcacctggaaccgcctctggatcatcgtcttctcgatggcggtgttcgtgacgctgctcatggtgctgaagcgttccgccttcggcctgcagatgcgtgcggtcacgcagaaccggcgcatggcgtcgtcgatgggcatccgcaccggctgggtcgatgccttcaccttcgcgctcggctccggcatcgccgggatggcgggcgtggcgctcagccagatcgacaacgtctcgcccaacctcggccagagctacatcatcgacagcttcatggtcgtggtgttcggcggtgtcggcaatctgtggggcacgctggtgggcgcgctgtcgctcggcgtcgtcaacaagttcctcgagcccttcgccggcgccgtgctcggcaagatcctggtgctcgtcctcatcattctcttcatccagaagcggccgcgtggtctcttcgcactcaaaggaagggcggtggaagcatgattacggccttccttctccggtctctcgatcgcaagatcatcgtcgcgctcgtcatcctcctggcgcttgccgtgctggtgccggtgctcaacctgatgacgccggaaacgagcccgctgcacattccgacctacatcatgtcgctgttcggcaagtatctgacctacgcgctgctggcgctggcgctcgatctcgtctggggcttctgcggcattctctcgctcggccacggcgccttcttcgcgctcggcggctatgcgatgggcatgtatctaatgcggcagatcggcacgcgcggcagctacggcgatcccatccttcctgatttcatggtgttcctgaactggaaggaactgccctggttctggcaaggcttcgatcacttctggttcgcggcgctgatggtgctcttggtgcccggcctgctcgccttcgtgttcggctggttcgccttccgctcccgcgtcaacggcgtctacctctcgatcatcacgcaggcgatgacctacgcgctgctgctcgccttcttccgcaacgacatgggcttcggcggcaataacggcctgactgatttcaaggatatcgtcggctacaacatccaggccgacgggacgcgcgccgccctgttttcggcgaccgcgatcctgcttgccctgtcgctgatgatggcgtcggccatcgtgcgctcgaagttcggcaaggtgctggtcggcgtgcgcgacgcggaaagccgcacgcgcttcctcggctaccgcgtcgaacatttcaagctcttcaccttcgtcgtctcggcgatgatggcggggatcgccggcgcgctctacgtgccgcaggtcggcatcatcaatccgggcgaattcgcgccggccaactcgatcgaggtcgtcatctggacggcggtgggcgggcgctcgacgctgatcgggccgatcgtcggcgcgatcatggtcaacggcggcaagacgatctttaccggtctctttcccgaattctggctcttcgcgctcggtggcctgttcgtggcggtgacgctgttcctgcccaagggcatcgtcggcacgatcggccagtatgtcggcaagcgcaggccatcctccagcgacacgccgcccgccaggcgcgaggacggtgtcgacgcagaaatccagcccgcggagtgagcgccatgatccctgacgtcaaacccaacagcgtcctctatctcgacaacgtctccgtctccttcgatggcttcaaggcgctgaacgcgctgtccgtcgtcatcgagcccggcgaactgcgcgccatcatcggcccgaacggcgccggcaagacgacgatgatggacatcatcaccggcaagacgcggccggataccggccaggtgttcttcaacggccagaccgatctcaccaagctcgacgaagccgacatcgcccagctcggcatcggccgcaagttccagaagccgacggtgttcgaaagccacacggtctgggacaatatcgagcttgcgctgaaccgccggcgcggggtgttctcgacgctgttctatcggctgtcgcgcgaggaccggtcgcgcatcgaggagatcctggcgatcgttcgcctgacgcaccgccgcgacgacctcgccgccaatctcagccatgggcagaagcagtggctggagatcggcatgctcttggcgcaggagccgaagctgttgctggtcgacgagccggtggcggggatgacggatgccgagacggcggagacggctatcctcttgaaggagattgccaagacgcggtcggtggtcgttgtcgagcacgacatggggtttattcgcgacctcggggtgaaggtgacgtgcttggctgaaggctcggtgctggccgaggggtcgatcgatttcgtcagcgccgatccgagggtgatcgagaattatctggggcggtgatgagggtcgagcaaggattacccccctctgccctgccgggcatctcccccaca

SEQ ID NO: 23 - DNA, 65057 bp, Rhizobium matallidurans
  source 1..65057: mol_type = genomic DNA
ttcctagctgatcgaccgcccgagagttgaactcggtgtgcgttgattgtgtatggagtgatacctgcatggaagagaacatcagcatcatcaagagtgttggcgtcgatgaacgcgaagagatcattgtggactttgccagatggcttgagaccgctgcaaacgaggcgctggtctatggagaagggaagttcgcgatgatgtccgccagcatggcagaagcaatgcgcgtcaatgctgacgaacttgctcgcgatgatcctgaaaaggccgaacgtgtgctgcaggaggccagcgcgatgatggcgcagttcaaggccgcctatccccatcgcgtcatcagtcgatctgtccattgatagggatggggtggcgaatccatgaaagctaagctcatgccggcgctgcggtaggtagcaatccttggtggtaacatggcgggtccgaacgatttggaagaaatgcaacgcgaagatgtcggcggatttcgggaccttctccgtcgttatcgcaccccactcgttgcaattgcgacggtgacgctgttctgcctcgtcggttatgccatcatgcagctgacggacgaggttcgctacgatgatgtagtcgaggcgctagcggaaatgagcctgagctcgatcctgttagctatgttctttactgcactgagcttcctggcgctcgtcttctacgatatcaatgcgattgattatatcggcaagcgcctgccttttccgtatgtcgcgcttacggctttcagcgcatatgcggtgggcaataccgcaggtttcggtgcgctgtcaggtggcgcgatccggtaccgtgcctatacacgactgggtctttcgcccgaggatatcggccgcgtcatcgccttcgtgacgttgtccttcggcctcggtctcgccgccgtcgccgcgatctctttgcttgtcatcgctggtgagatagcgccgctgatcagtttcagcagtttctggcttcgcgtgattgcggggacgatcctcgcgatccttggcattctggtcgtgcttggccgcgatggtcggatcatcgagatcggcccggccacattacgtctgccggactcgcgcacgtggtcgcgccagttccttgtcacggctttcgatatcgccgcctccgcctcggtgctctacgtgctcttaccgcagacggcgatcggctggccggtgttcctggccgtttatgcgattgccatcgggctcggagtgctcagccacgttccggctggtctcggcgtcttcgagaccgtcatcatcgcttcgctcggcagcgcggtgaatatcgacgccgttctgggctcgctggtcctctatcgcctgatctatcatgttctgccgctcctgatcgctattctcgcggtatcggcgaccgagcttcgccgcttcgtcgaccatcccaccgcctctagcctcaggcgcataggcggtcggctgatgccgcagcttctgtcggcgctggcgctgcttctgggcggcatgctgatcttttcgagcgtgacgccgacgcccgatcagaaccttgaactgctctccgactatctgccgctgccgattgtagaaggcgcgcatttcctgtccagcctgttcggcctcgcgctggttgtcgccgcccgtggccttggccagcggctcgatggtgcctggtgggtggcggttttgtctgcgcttgccgcactgacactttcgctgctgaaggccgtcgcgcttgtcgaagcggccctcctggccttcctgatctttgggctgttcgtcagtcgccggctgtttacccgacatgcctcgctgctcaatcaggcgatgacggcatcctggctgatggccatctcggtgatcgtcgtcggcgctgtcgttatcctgcttttcgtctatcgtgacgtggaatacagcaatgagctctggtggcagttcgaatttgccgcggaagcgccgcgcggtctgcgagcgttgctcggcatcaccatcatttccctggcgatctccatcttcagcctgttgcggccggcgactttcaagcctgagccggcggatgaagacgccgttcgccgtgcagtggacatcgtcgacaagcaggatagtgcggacgccaacctggtgcgcatgggcgacaagtccatcatgttctccgaaaagggcgacgccttcatcatgtacggccggcagggtcgctcatggatcgcgctgttcgatcctatcggcgatcatcacgccgtgcaggagctggtctggcgctttgtggaggccgcacgtgccgctggctgccgggcggtcttctaccagatctcgccgtcgctgctgtcccattgtgccgatgcgggcttgcgtgccttcaagctgggcgaactggcggtggcggatctgcgcaccttcgagatgaaaggtggcaaatgggcgaacctgcgccagacggcaagccgcgcccagcgcgagggtttgagtttcgaagtcatcttggcggaaggggtaacgtccattttcgacgacttgtccgcagtttcgagcgcctggctagaagaccacaataccagggagaaaggcttctccctcggcgccttcaagccagattacgtcatgtcgcagccagtcggcgtgttgaggaaggacggccgaattgttgcctttgccaatatcctcgtcaccgaaaccaagttcgaagccacgatcgacctgatgcgcttctcgccagatgcgccaaaaggcgccatggacttcctcttcgtgcagatcatggagcatctgaaagcggagggctacaagtacttcaacctcggcatggcgccgctctcagggatgtcgaagcgcgaaacggcccctgtctgggaccgcatcggccgcaatgtcttcgagcacggagagcgcttctacaatttcaaaggccttcgggcattcaaatcgaagttccacccgcactggcaaccgcgctatcttgcggtttcaggcgcgggcaacccgatgatagcgttgatggatgtgacctttctcatcgggggcggactgaagggagttgttaggaaatgatcgtagccggcgagcttagcgcggtaatcgcagcgcgacggccggctcatctgctggagctgccgagccagtctatttttgcgagcgacgacgccgcacttcggcacaactttttagttccgtgaacggtcgagagaaatggcctagtcgatggttcgaatctactcaaggcgccaaacctgaggtctcaaagttcatctgacattgaagcggcaatctcgctaatgctgaggcacatccgcatattgccgaaggggcatagcgcatctctcaacaaaagctgcaaaactgctcccaaagtgatcgcaaatagtcatgatgcatgctatgataatgcaatgaatttcggatgaatttggggggataatgtcagaactgaaacgctcgcgcggccacagatccttatctgcgggagtcgaagacgcacttcgagcgcagatcgatgcaggctattacgcaatcggagacaagttgcctaccgaacccgcgttgaccgacaagttcggggtcagtcgcaccgtcgttcgcgaggcgatcgctgctctgagggcagacgggcttgtcgaatcgaagcagggctccggcgtctttgtgatcggtccgcggcagtccgatacgggtcttgggctgtttacaggcgagactgacaagatatccgatatcattgaagaattggaattgcgtattggcatcgaggtggaggcggcaggtcttgcagccatgagaagttcaccggctcaggaagccgaaatccaagctcaggtcgagcgattctcaaatctcgttgcgattggaaatcccaccgacgaggctgacttccagttccacatggctatcgcaacggcgaccaacaacgcccgtttcaaaacgttcctcgaacatgtggggaggcggatgattccacgtgtgaagtttcgcacggtcatgggcggtgtcgacccgctgccgagtagggacgccccgatactcgacgagcatcgagatatcgccgaggcgattttagcccgcgatcccgaccgggcgcgcgaggctatgcggcgacatcttgtgacgggtatcaagcgttaccgctctctgacatcatggaggcaatctcataaaaaagatgaaaatggttgactcatcttaaaaagtcataatatgaattatcccaccggaaggttttcagtgtgggaggaaattcgttgtcgcctgaagaaatcaaatcgcgtgtgggctcagggctcctgtcctttccagtcacgcactttacgtcggactacaagctcaatctcgatagctatcgccgtcacgtagagtggctgtcgggttttgaggcggctgctctgttttctgccggcgggacgggagagttcttttccctgtcaccgtccgaggtgggggaagtgacgagagccgccaaggatgtctccggtaacgtaccgatcatcgcgggatgcggctatggtgcctctctcgcctttgagaccgcgtcgatcgcggagaaggctggggcagatgggattctcctgctgccgcactatctcacggaagcgccgcaagacggcattttcgctcatgttaaagccgtctgcgattccacgagcctgggtgtgattctctataatcgagccaattccgttgccaacgccgatacagtcgcgcgtttggcggaagcctgcaccaaccttatcggtttcaaggacggcacgggcagggtggatctcgtgcgccatgtgacggccaagctgggcgaccggctctgctatatcggcggcatgccgactcatgaacttttcgccgaaggtttcaacggtgtaggggttaccacctattcttcggccgtcttcaactttgtgcccgaactggcgcagcgcttctatcgcgccatgcgagcgggtgatcgtacgacaatggagactattcttcataaattcttcttcccctttgccgcgcttcgcgatcgcaaggcgggctacccggtctccatcatcaaggcaggtgttgatctggtcggctataccccaggtccggttcgtcccccgctggttgatctgacgggtgaggagcgggaaatcctgcatgacctgataaagggagcccagggttaagcaaagccgtcggcaggcgctgagagagcagcgcccgtcgacgacgcaatattaaaacttcatcgtttcacttttgggaggagtgcaaatgcctataaagtctattcgtttcatcgcgggcgcgatggtcgtggcaagtttcgccggccatgcaacagcgcagagttcgtctgaaatcaatattgttctgccggagcagccggcaaacctcgagccttgcggcaccatcatcaccaatgtcgggcagattcttggccgcaatgtcgtcgaaccgctgacggtcatcgatcccacgaacggtcaggcaacaccgggccttgctaccgagtggacccagacagatccgaacacctggcggctgaaactgcgcgaaggtgtgaagttccaggatggtgccattttcaatgcagaagccgtcaaattctcgatcgagcgcatgaccggcgggaaggtgacctgcagcaatattgccaagttcggcgccgccaagctcgcggtgacggctgtcgatgacctgacggtcgagatcacgtcggatacaccgcaaccgatcctgccgacattgctcagcgtggtcatggtggtctctccgaacacaccgatcgacaaggcggtcaatgatcctatcggtaccggtcctttcaagcttgcaagctttacgccgcagacggtcgtattagaaggctttgacggctattggggcaaaaagcccgccatcaccaaggccagctacgtctggcgtccggaatcctcgatccgcgctgccatggtggagaccggtgaagcagacctgacgccgtccatcgcgatccaggacgctgtcaatcccgaaacggatttcgcctatcttaattcggaaacgacagcgctgcgcattgatgccgggtttgcgccgctagacgatgttcgtattcgcaaggctcttaaccttgcgattgactgggaaggccttgcgcagcttttcggagacgataccaagcgcgcatcacaaatggtcgtcgtcggtatcaatggccacgacgacaagctggcgccctggacgttcgacgctgagcaggcgcgcgcgttgattgccgaggcaaaggcagcgggcgtccctgtcgatacggagatcgaactgatcggccgcaacggcatctatccgaacggtacggaagccatggaggccatgatggccatgtggcaggatgtcggcctcaacgtgaagctcaccatgctggatgtgaacgattggctgcgatatctccagaaaccgttcccggaaggccgcggtcccaacttgctgcagatgatgcacgacaacaacaagggtgatgccgccttcaccattccaatcttctacacctcggcgggtagctattccaccgtcagcgaccctgcgctggataaggaaatcgccgatgctctagcagccaccggagaggatcgcacaacccggttcaaggcggtcttcaacaaggtacatgacgaactggctttggacattccgatgttccacatgatcggctacacccgcgttggcaagcgtctcgactggaagcccgacatcaccaccaacagcgagattccactcgcgaatatcggcctcaagaattaagccacaacagaccgggcgggcgtggagaagatcttccgcgctcgcctgaactccaagtgaaaccagaggttccagatgatgctcggctatatcggccggcgggcgtatcacagcataatatcgctggtcggtctgctgacactcgtcttcttcctgacacgcctgacgggcgacccctcggcgctttatctaccactcgattccagccttgaggcgcgagaagcgtttgcgcgactgaacggtctcgatcagcccattcacgttcagttcctgcaatacctgcagaatttgctgtcgctggattttggtcaatcgctgcgccagaaccggtccgccatcgacgtggcgctcgaagcctttccggccacgttgaaacttgccttcgtcgcaatgacattggcaactgtgcttgcgatcatcgtcggcgctttggccgccgcacggccccgcagcgtgtttgatcgtatcgccggacttgtatcgctatccggtgctagcacacccgatttctgggttgcaatcgtcggcattctcgtctttgcggtagggcttgggcttctgccaacatctggcaccggaaccggttggcattggatcatgccaatcgcggtactcatgctgcgcccctttggtcttctagtgcaggtggtgcgcggaacgatgatctcagcgcttgcctcgccctatatcaagatggctcatgcgaagggcatggtgcgccgcaagatcatcttcggtcacgccttgaggaattcgctgcttccggtcattacagtcgcgggggatctggctacgggattgatcaacggcgccgttgttgttgagacaattttcggttggccaggcatcggcaagctgatgatcgattccatcatccagcgggatttcgccgttgtgcagtcgacgatccttataacggccatcgccatcttcatcgtcaacatcgcgatcgatctgctttatgtcacgctcgatccgcgcatccgctactgagggaggacgaccatggccgacgtgacaatcgcgtccgcgaaatcgcccggaaacgcgcggcaactggcgatctacctcgctcgtgacaagctggcgctctgcgccgcgctcttccttgtcctgctccttgcctgtgtcctctttggcccgctgctggtgggcgaccttgccggcaagctcgggctcagacagcgcaatctggcgcccttttccacagagcagggtttcctgtacatcctcggcgccgatacgttgggacgcccgattctggcccggctgattgttggtgcacaaaacaccctcggcattgccgccgccgccgttttcgtctccacggctactggcggcatgcttggcttgatcgccggctattccgagcgctggtacagtcatgtcatcctgcgtctcgctgacgtgatcatgagttttccatcattgcttctggcgttgatcgtgctctacacgctcggccccagcatgatgaatcttgtgatcgtcctggcgatcacccgcatgccgatctttatccgcaccgcgcgcgccgaggttctggaattgcgcgagcgaatgttcgtcagcgccgcccgctcgatgggcgcgagttccggccgcatcctgttccggcacattgcgccactggttttgccaacgctgggaaccatcgcagcaatcgatttcgcgaccgtgatcctggcggaatcctcgctgagtttcctcggcctcggtatccagcctcccgatttcacctggggcgcgatggtagccaatggacgtggttatctcgcatccgcctggtggattgccttctggccgggcttggcaatcctgctgacgaccctttccctgaacattctcgccagctgggcacggaccgttgccgatccgctgcagcgctggcgcctgcaatcgctgcgaaaggccccacgatgacagattcggacaaagccatcctcacgatcaagaacctgacggtcgactttctgtccgagggtgatccggtccgtgccgtcgacaacgtatcgttcaacgtctgccccggcgagacgctggttattctgggcgaaagtggatctggcaagagcgtcagcaccggaactgtgatgggcctgatcgactgcccgccgggcgatatcgtctcgggctcgctaattttcgatggcatggatatgtcgcgccttgatgaggagggacgccgcgcgttgaacgggcggcgtatcgcgatgatattccaggacccgttggcctatctcaatccggtctacactgttggacggcagatcgaagaagtctttgaagctcatagtgatggtgacgcgggctcggtgcgggacagggtcgtcaaactgctggagcgtgtcggcattcctgatgccggaaggcggatcgactattatccgcatcagttctccggcggacagcgccagcgtgtcatgatcgccatggcaatcgcgctgaaaccggacattctcatcgccgacgagccgacgacggcgcttgatgtcagcgtgcaatcgcagatcctggaactgctcagtgacttgcaacgtgaaaccggcatggcactgatcatgataacgcacgatcttgaggtcgccgcggcgatggcggaccgcatcattgtgatgaatggcggcaaggtggtcgagagcggcaaggcgcaggacgtcttcaccaaccctgcccatgcctatacccgtcggctgatgtcagctatgcctcacggcggtgaggcgtcggagcgaacgcggacggaggtcaagggcgacgttctgttgaaggtcgagaaactcagtaaacactacgttctcggcgccggtccgttctcgccgaaacgggaattccgggccgtcgatgacgtcagcttcactgtccgtcgcggcgaaacggtcggtatcgtgggtgagtccggttccggtaagtcgagcatcgcccgcatgttgctcaggctcgatgaacccacatcaggcaaggcgatttttggcgaggaggatgtgttcttgctgggaggaaaagcgctgaacggattccgacggcgcgtgcagatggtgttccaggatccctttggctcgatgaacccccggatgaatgtgcgctcgatcatttccgagccctgggcaatccatcgcgacatcatgccaaaagcaggctggaaggaccgagttgtggagcttctggagcttgtcgggctcaaggctgaacatgccgagcgtcatcctcaccagttttccggtggtcaacgacaacgcatcgcgattgcgcgggcattggccagtgagcctgaactgatcgtgtgcgacgaagctgtctcagcgcttgacgtgtcgatccagatgcaggtcatcgggcttttggccgatctgcgcagcaggctagggctctcttacgttttcatcacgcatgacctgccgatcgtgcgtgagttcgccgaccggatattggttatgcaacaaggcaaggtggttgaggaaagcgatacggaaatcctcttcaattacccggaacatccctacacaaagtcgctcttgaattccgtgccccggcccaaatgggcatgaaagtcatctatctgcatggtcgccgcagttgccggggcgtgtctggcgaactgattagctacggcctgaagtcaagctgctagagaaagcgaatatccatgagacttcatcagaatctgattgccggcgaatgggtcggcagtgatggcgttgaaaacatcaacccgtcgaacacaaacgaagttatcggcctttacgctcacgcatcggcagacgacgtggagatttccattgccgctgctaaggctgcgtttccggcctggtcgcgctcgggtattctggaacgccacgcgatccttaagaagacgtcggatgagatcattgcgcgcaaggacgagcttggccgtctgctcgcccgcgaagaaggcaagacgctgccggaggccataggcgaaacgatccgcgcgggccagatttttgatttcttcgccggtgaggcgctgcgccttgcgggcgaagtcctgccgtcggtccgcccgaacatcggcgtcgagatcacccgcgaagccgtcggcgtcgtcggcatcgttacgccctggaattttccgatcgccatcccggcctggaagatcgccccggcgctttgctacggcaacaccattgtcttcaagccggccgaactggttccgggttgcgcccacgccatcgtcgatatcctgcatcgtgccggcttgccgaaggcgtcctaaacctcgtcatgggcaagggctcggtcgttggccaggccatgctcgccagcgccgatctcgcggccatcacctttaccggctcgaccggcaccggcaagcgcgtcgctgcggcctccatcgaacataaccgcaagttccagctggaaatgggcggcaagaacccgatggtcgttctcgatgacgctgatctcactgttgccgtcgaagctgccgccaactccggcttctcctcgaccggacagcgctgcaccgcatcctcgcgcctgatcgtcaccgagggcatccacgacaagttcgttgcggccctcaccgaaaagctgaagacgctggtggttgacgatgcgctgaaggccggcacccatatcggcccggtcgttgacgagcgtcagctggcaaccgacaccgactacatcgccatcggccgccaagaaggcgccaagctcgctttcggcggcgagacgatctcgcgcgaaaaaccgggcttctacctgcagccgacactgtttacggaggccaccaaccagatgcgcatcagccgcgaagaaatcttcggaccggtcgcctccgtcatccgcgtcaaggattacgacgaagcgctcggcgttgccaacgacacgccgtttggcttgtctgccggtatcgcgacgacgagcctgaagcatgcgacgcacttcaagcgcaattcggaagccggcatggtgatggtcaacctgccgacggcgggtgtcgacttccacgttccgttcggcggccgcaaggcatcgtcgttcggttcgcgcgagcagggcaagtacgccgccgaattctttacaaccttcaagaccgcgtacacgctggcgtgagaacatccgtgcgcaatctgctctttggatcaacttggtaggtgataaaaatatcggctgtacccgaccgcccgacccaccatttgtatagggcactggattggacgccttcttgcctgagtgttaggaaagaaggcgtctacaaatccagggcctattcagtcaattaaggggtcaagggttcagatcctttcaagagcattacatgcctctttgaaacaaggcactattccatgacttggccggcaaggcgtaatcgttggacatcaacgcccggtgacgctccgaattcccgccgatactctcgattgaactgggaggcgctttcatagccaatttcgaagccgattgaggcgacgcttcgatgctctgagagcagcttcgtgcgagcgtggatcaggcggacgcgtttctggtactggattggcgtcattgatgtggcgcggcggaaatgccgatgaaaagatgtgacgctcatgccggctcgggacgcgagatcttcaacttgaaacggcgtggcataattctgcttgagccattcgatggcggttaccacccgcgagattgtgccgcccgccaggccgatctggcggatgatcgaagcgtgcgcgccagtcagcagacgccacatgatttcccgctcgatcgccggccgcagcgctctggcgtctgcgggcgcctcaagaaggccaaggagccggataagcggatcgagcaggttgtccgaaacggtgctggtcgccgcggtcgtctggatttctacctccaacggatggaggccggtttcgacagcaagggcagccaacgccgcaggatcaagcgccatttcgaaaccgaggaacggatcgccttcgctcgctagcgtaacatgggcgctgacggggacatccagagagacaacgagatagtctcccgcgcggtaatcgcagaccatatcgccgatcgcggtctgcttggcaccttgtgcgacaacggcgaatgtcggtacagccaagccaaaaagtggctctgtttctcgcgccgagcgcaacaggcggatacctggcagcacgttggtcatgtagtccgtgccggtattccgttcgatcagcgctgcaaattgtgaaagcttttccataggcagtcccggtattagcacccagtccgacacgtgcttggcaggaatgtgcaacagcttggcagcaatggtctacacccatcgcatcgtaaagcgatagataagggcgactgaattcgaacaacaggaggcggctatgtcgctggattcatttgtcacgctcggccgctcggcacttcgtgtcagcccgctcaccctcggtacaatgaccttcggcgaggattggggctggggtacggatgccgagcattccacggccatccttgccgaatatctcgatcgtggcggcaactcgatcgatacggcgaacatctataccaatggtcattcagagaagatcataggcgactatttcgccgggcagggatctagacgggatcgggtcgtcataggcacaaagttctttggcagcctgcatccgggtgatccgaatgggggcggtgctggccgcaagtcgatgatcgatcagttggacgcatcgctgcgccggctgaagaccgactatgttgatatctactggcttcataattgggacaggttcgcgccgatcgaagagacgctgcggaccctcgatgactttgtgcgatcgggcaaggtccgatatatcggcctctcggatctgcctgcatggaaaaccgccgaggcctccgtcctgtcgcattttcgtggctggacgccgatcattgcccttcagctcgaatattcgttgcttgagcggacgatcgaaggcgaacatgtgccgatggctgaggcgatggacatggccatcatgccttggagtccgctgaagaacggctttctgtccggcaggtacagacgctcggctgccgcgccgacagatgcggcacgcgcggtgataacaggcgctccgtcacaatccgactatgatgtcattgaggtactgcatcaagttgcagaggagctcgttgcaagcccagctgcagtcgcgctcgcctggctcaggacgcgccctgcagtccgttccttgctgctcggtgcccgccgcaaagaacaactcgtcgcaaatcttgcagccttggacgtaacgctcaccgatgatcatatcgagaggctctccgccatttccaagccaaccctgaattttccggcgcatgtgctggagacaggcacgccgatgcttggctatggcggaacaagtataaatgggttccagacgacaatctggcctatgcttgaaagcagcgctgcacgctattgagaactcggcaactgccattagccttaccagcataaggccggtggcgcggctttgctaccgtccttgtcggccttggctaaggtccgcacggttatggacgcctaccggaatctcgtcgaatggcctgcatcgatgcgcgacacggcttattcggtggcgctgaaagcctgtggcgcagcacttgcggcgagatcgaagcggagacggcgcgcgggctgttcgcagctttcgctgagaagcacgatctgctggcgccggagactgatatcatcaccgcctcccgtcgccggcacgacaaagatccatacgttcgctaggaggccgacacgcgcgagattttgcagcagctcgcaagcagcgccgctgcgatgggttcgacgatccttcagggcatggagatcgagcggccgcttgaggtagtgaaagcggccgcactctccgcagatagtaagtctccgattgtgctatggaaattacaaccataagataagataccgagaaattcaaaactaaccgttgacctctggcagtcgttgccttattgatagctaatcgatcttttgcttgccgagctttgttcaccgcgcgattggcaccgtgctctaagcgaacttccctttcaaaaatagtcggttttcgtctgcggagcacctgtttcgcggttcctcaatctatgctttgaaagggttcatcatgaccaccggcacagtaaaatggtttaattccaccaagggctttggcttcatccagcctgacaacggcggtgctgacgccttcgttcacatctcggctgtcgagcgcgccggaatgcgcgagctcgttgaaggccagaagatcggcttcgaactcgagcgcgacatgaagtcgggcaagatgtcggcctgcaatctgcagtccgcttaatcgatatctgcttccctttgaccacggatgtactggcactgccgggagcaattatcagtttaaggccaggcagttcgcctggcctttttcgtttggcttcaaagccacgtcgaggaaattcaatgacagaaacatatagcaaatctcgccagcgtgccgagacggccttcggcaatcttcagacggagttcttcgccaagaaccatgcggccgaagagcttgaatcgctagttcaggcgcgtgatgccaagaccctgaggctgcgcgacgcgcgcctcgccaaggagcaaaccgtccggatgtcggcaacatccgcgctccgtgccaaacgatcgaagtccaactgatcgtcccaaacactaatatcaggataaagatttgaaacacgccagaaacaacgaactcaccgaccgacgctccgccgctgcggacgccaaggcagctcttctcgcagcataccggaccgcgaagaccgccgccgagccaacacaagccgccagacaggcggagcgcatctcgcttgttgaagcccgggaggcgcgccgtgcggaacgggagcgactaaaacttgaggagcgcacccgcctcgaaactcttgcagcccgagaacaggcagccatcgaggcagcggccgcggccgagattgaagcgcgacagtccgccgaaaacgcccggatatcgcgggtcgtcaaagacgaggccgcccgcaaggctgagcgggacagacgctatgctgcccgcaaggcccggcaggcttaacgtgcaggcacccacccttagagtggatgcagccgtgaaatagatcagggcgcgatatacagccgcgctcgaactcactcactcctaaggagcctctaatggcaacggacacgaacgagctgcaggcaatcaataccgcctggcagattgcgatccaggaaatcctgcgaatggtcatacgggacatgtaccatggtgctggcgaagcggccttcagcgcccatatcaaacgaatagaagaagcggccgtcgacagcatccagaccgacttgaggcttcgcggcaccagcgagtggacggagatgctcgttaaggaacgggccagcaacttcgtcacaaccctcctgacgtccttcacctacgaccggccctgacgacgatagacgctcatgggagccgctcgtcttcacgtgaagcgatcgcctgcgtgaactttcttccggtcaacgaggttgatctctcacgcgcttgcctaaatcatgtccactgagcagaaataagccaagcggttgagcatgggcggacacaacgcagaagcctcgcaggcatcgccgagccttccttcgacgccatcatcagcaaggatctttccggcacaatcgtaagctcgaataaggctgccgaacgtatgttcggctatgcggagagcgaagcggtcggacaaccgatctatctgatcatacccgaccacaaacgggatgaggaaacggatattctgcgccggttgaagctgggagagcggatcgaaccgttcgagaggacgcggcgccgcctggacgggcagatggtcccggtttcgatcacgatttctccgatcaaaggccgggccggcaagctcgtcggaaatcaattatcgcgtcaaaaatcagtatgccgtggtaccagccgttatcaggcaaacggcgacacggtcccgttcgatcgaagaattcgagaggcgggtccgcgaaaggatcatggcgctttcccattcgcatgatcttctgtcacaggtcgactgggccggtgtcagccttgcagatctcgtcgcgcatcagcttgagccgttcgaggctctccacccgcttcatgttatcggccagcaaattatgctcgacgctaatgccgtccttgatcttggcatggccttccacgaactgattacgaacgcgatgcgcttcggggccacggatactggtcgaatatgcgttagctgggggctgacgagtaacgaaaatgggatgcttttgagctcgtctggtcggagtcggcggaggaaaatgcagattaaatagcacaggaagaggggttcggggcttcgtcctcggcaagattgtgccatccgctctagccggccaagaaaattggagtttcacggacggggttgatcgtctggaagctgaaggtgccgctggcacgcattcagatcgggctggggtcttcggccttcccctaaataggcccagtgggcaagcaggccagatgtctgcatcatcttcggccgagcgatcccacccagcgcggtaaaaccgcttcaccggcatggcactccaagaatcaggatttctttggctccccgccatccggcgtgataagcaccgaacgaatgtggttgtgagttgcaaatggcagaaactgaagaatcgccgataagcccggaaacggtagccgaccttcctcatcttggggaggcgttggatgatgaccgcttccgacaattcctcgaccacgttccgttcggagtggcggtggcagaactcgcgtcagacgaggtgcttatatacgccaatcttgaattcgagcgtttgataggcatttcgcctgaggacctgcagggcaagccatggtcatcactcccattggtgtactcggtgagtggagaccaggatctcgcgaatgccattgtggctggcgaggagtatttgggaacatttgcgccatcttccgggatggggccccagtcgttcattgacgcctggtcgaatacgatcgtcaatgacgcaggaacccctctctttcgtctcgtcgctatcgcgcccgccaacagtggacaaaccggcgctcacctggccaccacgttgacggaaaaggacgtgcttcttaaggagttgcagcacagggtcaaaaacaatcttcagatgatcacagcgctcatccgcatggaagcccggaacgcgcaacatccggatgaaagcgcgcggttcaaccgactggcaggccgtgtagacgcgctgacgatcctctaccgttctctgtccgatgcaaacgctgacgagactgtcgatctcggcacgtatgtgagccagatcgcctcggcgatcatggccgcacatgcggtccagggtattcggcttgacatgaaggtcgatacgtggcccgtttccgtcaacattgcgatgcccgtcggcttggtcgtcaacgaacttatgacgaacgcgctcaaacacgcattcaaggatcgtgagggtggtgaaattgtcctgcgctgcgtcgtggatgatgcgggctgccgaatctcggttgcagacaatggcattggtctcagcaatccatccgactggccgcggcgcggtaagctcagctctatgatcgtgcaatcgatcaaacagaacgccagggcggacgtccaggtggagtccctgccagggatcggcatgaaggtcacgatcgtttttgaaaagcgggaagcaaatcgggcttagagcggcatggatcgcgtcgagcaaaaatggatactccaggggtattcggccggcgctttgtccagttccctgcgggggagggatttcctgccttttcaaggccgccgggtttggcaaggatgttgcggagtgcagcaccctggtggtgatcatcagcgatcctgatagagtcgtccactgaccaagctgctttgcctccagtaaccacttgtctccgttggtccctttcataaaactctgccgtcgcttcgtacacagccctctctttcgctatcaaaacgatgcagccattcgatcgagttcagctgtcacggcgtcaacatagtatggtcttgggcaaaacactgcgcgggcagggaggtcgctatcgacgggatgcctttggccggacacgataatgatttcgatgagtggccagcggtttcgaacagcgcgtgcaagcttcatcccgtctatgctgcccggcatgtcgatatccgtaaatacgatgctgatatcggtgcgagtctccagtatgcgactgcctgatttgcacggccgcgagcacaaggcctttgcttcgtacaggctctctgcccatcatcccactcatgaaaagaaacgctgacccaatatcggcgcctggctcgaaacactgcgacggcaatgaatgttccggcgcgacacatgttcgacgggattcataacggtcgagcccaccgtaattatgtgcagggttggacatggctgagccggagtgtgcagcctcatattacaaataccggcgatattacccgttcggtgtgcgcctctatcccgtatgaagaggacgatgggcagccgtcacaatgcacatcttgcttcggctctaggccgctatcccacgagcggctttatgaatggatttggcatcgttgccatgctctgccacgattgccttcgcgtcttcaaaagcaatccgatatttcttggcaactgaaacggcgcttaaaggcgctccagcacctttttcgttggtcatttttgatctcctgggaaattgaccgtgccgaccgcgaagcggttagagaatacgcttcctaatggggcttctgacagcgagtttccacacctcaccgccaactatcgcttccagttctgttgcggcctcgatccctgtctcgcacgccggccggttaaggctaaaaccaagtacgtttcataacgaataaattaccttgatccccgtgggaacgatgtctgcggaaccagccttgagccagagcatttccttggcgaaatcgtaagggccttccgcttgaaactgttctttgccaccctcgtcttaccgccacgcgtttctcgatctgatcaacgctaccggtcgataccgcctgaaacctgccctcgcgctcattgaacgtacctttcccttcgaaaatcatgcgtggatcgctacactttgtcgaacctcagatctccgggctcggcggcaacccatcgccacctacgggataatcagattgacgaccaaggctgacgcagacgtcaaaaaggaaagcctcgtggagcaactggtcggctggctgcaagaacggccggctggccagcgttgggcgatcctgctcgccgtcactttggctgccctgctgcttgacgtcggcacctaccagcaacggtcgtcgatggcaggcctctatctcttcgcagtgaccatcgcctgctggacgctgagcacccgacaggccgtcctattcacaatagctgtcgcaatcgtcaccgggctacgatacccgatgttcaatcccgaccctgacttctggaccggtctcaacaacaacctcgggcgattgatttcgtttggcgtcaatgcggcggtcgtgatgggcctgaaagggtcacatgatcgagtagcctacctggcaacacatgatccgctgaccggcgtttataatcgcaaagcattcgaggacgagctgaaactgtggctgaccagtaagatcgtagcacgacgaccactcctccttgcctacattgatttggacgggttcaagggcgtcaacgaccagcatggccatactgcaggcgatcaggtgctgactgcatttgcagcgtctgcaaacagcttcatgttggaggggcagattgcgggacgtctagggggcgacgagtttgcgatcgccatactcgtcgcggaccacggcgaagcgattagaacggcgcaagatcttcatattcgattgacggaagcgctgtctttgaccggttatcaggtaggttgcagcgtgggcggacttttcgtcgacataagcgacgaccgctccgcggagcagttgattatcgcgggtgataatctcatgtacgcggcgaagattgccggcaaaggtaaagtgcagttgtcgatggtacctcacgcgagcaggttctcttcgaaccgaggcttcggaacgcccagcggagacgaagagcagaaaccttgccccttttgtaaaaccggcgcctgactcgagctcggctgctcaagccagcgtaacattcaggccgcacgccttaggtcgattaacgggcagcgcgcaataaggctctccgacagcaagcttcggctgagcaccctgtcaggtcatttgggcattaaaggctcgcagataacgacactggcatcactatagaggtggtagtttcgattcgtgctaaaggtgggaaattcacaagtctcgatgcggtcagggccctgcatccagaggccacttgaatgcaagacggaagcttacgaacgggtttactcgttattctgaagctaatgtaatcatcaatttagccggtcgagtcagcgggtcggaggtttcagatcctttcaaaccaaacactcgcgtactttactagcagacaagaaattcgagacgattttgctcagaggggtgctttaccaagtcttctttcaagtatgtctatgaagcagcgcaccttcgtacccaacatgcgagaacttgggtaaacggcatgaatgcccaaactttcagtggcgaaatcgggcaaaacctgttccaatcggccactcgtgatatgctcccgaagcaggaatgttggcccatacacgatgccgccgccgtccagggcagccgccagcaacatctgcatgttgtcagccttcaggcgtgacggtccagaaaccgtcaccgtcttgccttttcggtcggtgaaactccagtcacctgccgacgtcgccttactgaaggcgaggcggtcatagcgccgaaggtccgccggatcgttcggccgcccatgcttgtcgaggtaggagggagccgcacaggctgccattccgctttcgccgaacttgcgggagatcagactcgaatcgggtagggtgccgatacgtatcgccatatcgaatcccccttcgatgagatcaacgtaacgatcctccaggctcatttcgacgaagacgttcgggtagcgcgttgtgtattcagcaactggctggcccagataaagagcaccgaacgtggtcggcgctgaaacccttagcgtgccatgcggttggtcctgctgctgtgaggcgctgcggtcagcctcgtccagagcgtcgaggatgaggatactccgccgataataatccacaccgatgtcggtcaggtgcagctttcgcgtcgttcgctgcaaaagccggacaccgagctcggcttcgatcgcggccacatgcttcccggccatcgcgggagtaatgccgtgcgctcgtgctgcagcggccagactgccgttgtcgacggcggcgacaaaaaccgaaagtccgacaaagcggtccatcaattcgatcctgtggttatcgagtgcattaaatgattagtggattatcgctcgtatgggaacgtcatatttagacgatatcgaaatcactactgaaagaaacgatcgatggaaatcaaagcaaatggcatcaacctccatttcgaggatcatggggcaggcgagcagacgctaatttttcttcactactggggaggaacctcccggacttgggacaacatgatcaaggcgctgaagtccaaggttcgctcggtcgctttcgatgcccgcggctggggcaagtcggatcgtccggaaagcggttatgatattgtttccatggccaacgacgtcgaagccgcgatcgctgcattggagctgaagaactacatcctggtaggccactcgatgggcggaaaggtcgcccagcttcttgcttccaggcaacttgcgggactgacagggctcgtccttgtcgcgccgtcgccggctcagggcaagtcgctgcctgaagacattcgcgaaggcatgaagcgagcttacgcggtcgccgagtcgacggcatggaccatcgacaacgtcctcgcggagatttccctttcgcaggcagtgcgggagcaggtcattgaggatagcgtgggcggtgccagcgccgcgaagcattactggcctgccgccgcgatctcggaagacgtcagcgcggatctcggccgcatcgatgtgccggttcttgtgattggcggcgagaaggacaaggtcgacagcgtcgagctgctggaaaccgtcgtcgtcccgtctctgcccggcgcacagctgaccgtcattcccggtgtcggccacttgtctcctcttgaagcaccacaccatgttgcctcaaggatcgatgccttcttagctggcggaatggtaagcaccccatatccagaagatgttgcgacagctttcgacagcgggcttaacagcggcaacgtcgatggcgtcatggcgctcttccacccgcaggccgttatgcgcacgaccgacagcttggtggtcgagggtggcccaggagccatcaggggtgaaatcgagaagttggtctccatgaagccgatcatcaagaataccgtccgccgtgtcctaaaaagcggtgatatcgcgctgcttcttctcgactgggagatcagggtcgcgtctgacgaccattccagcgttcagcacggcaccgccacccagatcgtcgagcgctcggcgacgggaaattggcggctccgggtctcgaacccgctcggtaccggataaccgcctcaagcgaaggctccccaatagttagggcgcattgagcgtattttgaatgaacggccgcttgcaggacgagcggtctttccaagcccagtcggccacttgactccagcacgggtcggcggttcgtatcccctcaactggacaattaatctcggtccatgagctcttagaacaacgcggaaaggtcgcgccgaccgtccactactcggacgatttcaactgtatgaacgggaccgtcgtcggagtcggggcgtgtctcgtaaaggatgacatagggcgcttcgaccaacatccgggcgatacggaatacttccgggtggcgctcgcctagacgcggatactcgataagcatttccgcctcgcggccgaatctggcaaagtatcgctccgcgctcaggctgctcgctaattattgcaacgtagattttcttaacgtcagcgcgcgccttgggtgtccagagaagcttagcgggcatgaggggctggagactttacttcccggcggacttcatcgagcacggcatcaaaatccacttcgacggcaggaccacttgttttgccttcttcccacgtcgcacgcagcttaacgatatcgtcgcgcttctgcatccacttggccgaccagtcgcgcatggcttctcgtacaacttcgctcccgctagcctaagcgccgctgttaacggcatcgcgcaacggttctgcatgctggggcgtcatcaaaacgctgactttttcaacattgcgcataagagcctccgcttcgtttggtggcaattattaccaccaaacggattgcgcggcagcctacctatttgtcgcgctcaagcgaacatttggctcgcttgagccttacttgggaatatgacggagggagtttggaacagcatggtcaaaggttcacatcctttcagggcgcgggtggcacaccgtaggcctgtgtcattcatgaaagcccaccagaacgaccttcccgaacaatccgccggcctccattcggcgatgggcgtccgatgcagcggtgagcggatacgtcgctccaatgactggcttcagctcgtggccaaccctcggcagcacctgttccctgaaccggccgatcatcgctcgtttttctgaccgtgacctggatttcatcaccgtccccagcaattgcaagtggttgtgaagaacgatgtcgaggggaatgatggcgtcgttatcgcggcccagcaggccgacctggacaagccggccaccaggcgcaagactacgaatgttgcgggcgaggtaggacccgccgacaaagtcgatgatcagattgacgccgcgagaggcgggcgtaacgatctctgcctcgaagtcggcctgcttataatcgaagaccgcatctgcaccgagtgacagcacgttttcgatgttgcttgcagaagccgtggccagcacggccgctccggcggcccttgcgagctggacggcagccgatccgacaccgcctgcagcagcgtgaacgaggacggtctcaccttttgcggctttcccgagatttgaaagcgcctcccaggccgtcacgaagctctccatgaccgccgctgcatcggtgaaggacatgccggctggaatggcagcggccaatccgctgtcgagacgcgcatattgggcgtaggcgccgccgccgacgatgcccataacacggtctccgactgcaaagccggtcaccgcgtcacccatggcaatgacttctccagcgacctcaagcccgagaatagtgctgtcgccgtagctttgcgagccatagacaccttcccgttgcaggaggtcggctcggttgacgccagccgccatcaccttgaccagaagatcgtcggggcgtacttcgggcatggacgcttcgccaagccgcaggacatccgcggttccgaagtcatcgaatatgatcgctttcatcgcaacggctccttatttcgaaagcgctcgccgggcgatgcttgcagcaaacagtggtgtctcgcggctgttgtggtcgccgcctgcggcctgacgggctgccacggcctcttcgtagctgacaccatgctcttcgatgaagcacatgaacgcatccgtcgggtgcgcggtgaccttgtttgtatagcgggtccttctgtcgtcgatcttctcggcgatcagttcccatatgacgttgaccttcgtgcgcccattgactgtgaacacatccgagatcgagttcatgcggcaataggccggctcggcgacttcggccacatagtgctgtacgaccaggcccgaaccgatctgctcgacattgatcgacatccgacggccgtcgtcggtccaggtgacgccggcagcgatatgatcgggcgggcagcagcgaagatattcggcttcgggcaggttgaacagccagtcagcaatatcgatctgttcgagcggaacgtcgatctcggctgaataggcggactgggagagaattgtatcgaggaccttgaccatagtagtgttccttctgtttgttgggcgttcgcccgttcacgacgaggaaagtgcgccgaatgcctgcagatgataacgaactgaatggtcgaaacggttttgcgtcctaggcaaagatgagggacccacgcttcgccgaacatctcgcggtttacgtcgatgtcgtccgaactggaagcttttcggctgcgtctcggcgccgggccgtcacgccctcggctgtcgttcgacagatcgatgcattggagcaggatctgggtgttgctctccttgttcgctcgacacgggcgctgtctttgacggatgcgggccgtcacctttttgagcgcgcccagcgcctgcttgacgatctggcggatacccattccgaggtcgccgctttcgatggcgcggtcatcggcacgctgcgggtcgcctgtttcccgactttcggaaagcgctacgtcattcccgttctggcatctctcgcgcgcgaatatccaagcctgaatgtcgaattggatctcaccgaaaggctggccgacccggtcgccgagcggctcgatctggtggtgaggatgggtgatctacaggacagctcgctgatagccaccaagttggcgcctcttgatcgcatcgtcgtggcgagccccgcatatcttgagcactacggcgtgccggaaagtgcagatgcgcttcgccaacatcgtgtcctcgataagctccatggcaacgatcttctcggttggtctaatattcttggcgcgccgacaggggaagcgtgcgagcgcgtcgtattccggtccgacgattttgaagcgctgaacgcggctgcgatcgccgggatgggggtggcgttcctaccgagctgggtctcggggccttccgtccaggcgggtgatcttgtccgcctatcactgtcgggcgaagcatggaatgaacggccttccgggatataccttcttcgggcgctccaagtgccgtctgctaaaatcagagcattcaccgaggcgctcaaaaatcatatcggaacaccgccacgctggagctaagcttcccatgaaaggaagcttgtcagcttaaaagtatgagctggcggctgattgttaccggttatggtgttcgattccaatcaaggcgaagacgctggcaaggcaccttgctcgatcctacgtgtcagtcccagcgacgccttgcgccctcaaggctgtcgttcgtggccccttctgtctcagccaaagctgtcattcatttccaaccatgttcggcttcacggttcatacgggttttcacaagctcaaacctgtcacttcaccctctcctcaatcgcttagaccagtcggaaagatggcccatcattccgtaccttgatatttgggtcagatcgtgccccgtagcttggtgtaggtctttccggatttttactgcttgacatcagctgcgacattctcgcgtcgcgcttcaacggaagtttaatagccgatcctgtaaggctagccattcaacggagggctgatcatgccgacgcaatgtgatggctgccgcgatggcgccgctttcgaccttcctttttcgatggcgtttcagccgatcgtcaatatcagcacgggcgctgtctttgctcacgaggcattggtgcgtggtccgaacggcgggggggctggttcagttctcagccaagtcaaggagggaaatcgctatgcgttcgaccagcaatgtcgggtgaaggcgatcgagttggcatctgaactttacgatccggccgatgacgtcaagctatcgatcaacttcatgccaaacgcggtctatgagccgcgggcctgcattcgactgacccttgccactgcgatgaaggctggctttcctcttgatcgcatcatcttcgaatttaccgagaccgagcagctcgataccaaacacatcctccatatccttcgcacctacagagatatgggattcaagacggcaatcgacgatttcggtgccggtcattcggggctcggactcctaactcatttccagcctgacatcgtaaaactggacatggaccttatccgaggaatcgataccgaccccgtcaggcgcaaaattgtaaaacacacgctcgatatgctgggggatctggcgattgttcctgtgtgtgaaggggtggaaactgctgacgagatggctacgctgaaagatctcggcgtttccctcatacaaggttacttcttggcgaagccgagttttgaatccctggcaacgctcgcaaagccaaggccctggaaccagaggccacttaaatgcaaaacggaagcttccgaacggcttccctcgttattctgaagccaatttaggcagtattagctggtcgagttgccaggtcgcaggttaggatcccctcaaggcgtatcaatgattttagagtgccttactcatcgaccaagaagtgcgttccgcgatgaagtccgcgaacggttttacgttcatgtggacgctcgcctgttcaagaccggccaaataagtagaccgatcctcaaccctgaccactgcccatggacccacccgaggcgaacatggcgttcatcaggaggcgcgccatccgtccgttgccgtcaggatatggatgaacatagcgtatcaaccagtggccaaggactgccctaaccgctggctcgctttccttctccagtggatcgaacagggtctccattccatcctgaactgcttttgaacgcggtggtacatgccatgatccgcgcagaaataaaggcggtttcgatagcccgcgagggcgctgggtttcagaatacctgcggcgatcgagggggtgaacagctcgcggtaccaatccctatgttgcttccggatcacggctcccgccggtgcaccgcggagacagattccttcacgctttgaaacgcctgccagtagccgcgtgctgtcaaggcgccgcggtttcttctatcctgctgatccacgtccgcttcccacgtcccagcgcgtacgcgatcaatgagctccggagtaatgctgtacccttcgatcgaaagcgagtgatatgcgtcgtttttatatatgtcctcgaccgatttcataaattcggtcgtgtccgagggaagctcgggggcagcagggaaaacatcgaggaccgcctgacgctggctttcccatatagcattgagacgcgccccaaatgggagatccaccgacagctaaggtggagacttgctggttttgatcgaacgggtctgtctttctaacatcgtacatcgcacctttcatcgttttcaagatatcgtcggcgaactcgccttttcccatgcgccgaaatgccccggccagacggccggccacggccgaatgccctccgtcgagcaatcgaccgaggatacccgacaaatcgcgcagtgatttcagaacgatctgagcttcgataggtgatctttgaaaaaacgcttcagcaacttttaccagagcgacgtccgcagtatagaatgtcaatccatttttctcaacgagatcgacgcgcggtggcatttgcctggtcttgagatcgtagatggatgtgccaaaaagcagtgatacaacgaggccgacggttcagatcagttcaagagtttgagacaaccatatctagatggtcattcaacacctccactccaggtgagccgcaggatctgacggcctcaaggctgggctgaccgctaggagtgccttgcataagaagcgcatagccgaagcagcgagcgatgatatgcctccattacgcggcttgtgagcggacatcggatataactggtcaccacgagccggaggatggtatgatgccgccagtaattgaatttacaatcgtttctgcagccatagcgtgatcgtgctcagtaatattctgacggtggagtgcgtcgcaggcgagtggttcgaaatcgctgtagaactgtgtcgctccccaaagcatgataaagaaatgccgggcgtcgatttttctcatccgcccttcctgcatccactgctcaagaaccgcaacgtatctatcagtggccgcacgcatatgggcgcgatcttttttgctgaggaagcgggcgccctgtattatctcgcttgcgaaaagccgcgattcccgtggattttgacgcgcatatagaagcttggctttgacataatcacgcagcgcttgagcggggtcttggtcaacacgcaattttgagagggcatcatcccatccggcaatcaagtttgcgattatggccgagtagatctccgctttcgaggaaaaatagtaataaatgttagccttcggcagttccgccagttcggcaatctccgcgatgcgagtgccgtcgaaacccttgcgcgagaatacatccgtcgcgacatcgaggatcagcctgatattgcgggcgcggatcttctcatctaatttttccgcagtccgggccatgatccatcctttccctcacggcatacgccgcctgttgtaactgcggcgcgaaataggccaatacgctcgcagcgtgcgcgggaagttgcatttcctgccgcagcgatcatcaaaaaattgacgacttggtcaggttacatctagtctggcgctataacaatgaccggatccgtcaacggaagctggcggtccatgctcagtctggggagcgacaccaccaacatgtccggagccaaccgatgaccttcgatatactcgtcaagaatgccaatctccccgatgaccagaccggcatcgatatcgccgtttccggcggcaagatcgttgcggtcgaggccgggatctccgccgaggccggtcgcgtgatcgatgccggcggcaagctggtgacggcgcccttcattgacatccatttccacatggacgcgacgctgtcgctcggcacgccgcgtctcaaccgctccggcacgctgctcgaaggcatccagctctggggtgaactgaagccgctgctgaccaaggaggccgtgatcgggcgtgcgctgcgttattgcgatctcgccgtctcccagggcctgctggccgtccgctcacatgtggacgtctgcgacgaccggttgatcggcgtcgaggcgctactcgaagtcaaggacatggtgaaggactatctcgacctgcagctggtcgccttcccgcaggatggtttctatcgctcgccgacggccgccaagaacctgctccggtcgctcgacatgggtgtcgatgtcgtcggcggcattccgcatttcgagcggacgatggaagacggccggctttcggtgaaggcgctgtgcgagatcgccgccgaacgcgggctgatggtggatctgcattgcgacgagaccgatgacccgatgtcgcggcatatcgaaagccttgcctatgaaacccagcggctcggcctcaagggccgggtggcgggttcgcacctcacgtccatgcattcgatggacaattattacgcctcgaagcttctgccactgatcgccgaggcggaaatccattgcgtgccgaacccgctcgccaatatcgtgcttcagggccggcatgacacctatccgaagcggcgcggtatgatgcgggtgccggagctgatggcgctcggcgtcaatgtcgccttcggccaggatagctgcatggatccctggtattcgttcggcagcgccgacatgctggaagttgcgcatatggctgtccatacagggcacatgaccagccgcgatgcggtcaaattctgcttcaaggcgatcaccgaaaacccggcaaagacctttggcctcaatggttatggcacccgcgtcggctgcaatgccgatctcgtgctgctcgatgcgcgcgatacgatcgaggcggtgcggatgaaggcgaaccgtcttgccgttatccgccgcggcaaggtgattgccgaaaccgcgccgcgcaccgcgacgctgtcactcgaaggtcgtccggtaacaatcgagccctggctttacgcgccggtcgaagccggcgcccactgagataaagggggcggctcagaaattgcccatcgagccgccttccttccaggcgtagatttcccaaagctcgtcgtccgggccgatgaaataggcaccgcgcgcattccagacataatcggcgggcccaccgtaaaacggtacgcccttgtccttgagctcggtatacgaggcatcgaccgcttccggcgacggcacgcgcacggcgatacaggccttgtgcggcccttccgccttggcattggagacaccggtattgtcgctcagatgatcgatctcccagcaggcaagcgtcagcccggcgccgttgaactcgacgaaaccctcggcctgccggttgatctcgaaaccgagttttccgacataaaagtcgatcgagcgctgggtgtccttgacgagcaggcagatgtcggtgatcgcgtgttcctgggcgaaagccatggttctctcagttcttgttgaattgggctcttgttagtcttgggtggaaaggcggccggtcacgaccggccggcggtccggctttgccgagccgatgctgatggcagcggtgatcgcgctcgccacgctatcgaaatcggcctggctgcggcaatgcaggatgcagagagggttgccttcgacaatctcatcgccgatatggaccatgccggccaggccgacatcttggtcgagcaagtcgcttgcaactttccggccagcaccgagtctgaccatggcgataccgaccgcgtaggcatcgaccttctggacgaagccggtggtcggcgaggggaggggcgcgatgaccggagcgggcgggaaatggacatcgggatttgcgacgagatccaccggtccgccgagcgccgtaaccatgcgctggaaacggtcgagggccgatccatcggcaaggcgggcttcgacgagatcgagtgcgcggtccttcgaggtggccagcccggccatgacgaggatttcggcggagatatccatcacaagcgcccggatgcgactttcctgtctcaccctggagaggaagtcgatcacctcgcgcagctgcagccggctgcctatcgcatcccccatgatctcgtccatctcgacgatcggggcaaccatcggcaggccggcgatgcgggcgacggcaatcaggctttttgccagttcctgcgcctccgcataggtcggcatgaaggcgccggagccgtaattgacgctcatgacaaggccggaaacgccggccgcgagcttcttcgacaggatcgaggcggtgatgagggggatcgattccactgtcgcggtgacatcgcggatgtaatagatcgccgcatccgccggagcgagtcttggggtcgggccgatgatcgcggagcccgccgaaatcaccgcctggcggaacatttcggtggaaggcgcgatcgccacgccgggcatcgcctccatgagatcaacctcgccaccggtatggccaagcccgcgagcggaaatcatcggcatcgccacgccgcaggcggccacaagcggcgccacgatcaggctgagattctcgtcgcccgtgccgccggtcgaatgtttttcgatgatcgtttccggagcaaagccgcttcccgaccagtccaccacatcgccggaatcacgcatggcaagcgtcagggcggccgtttcccgcggcgtcatgccgttgaggaaacaggccatggtaaaggcgccgatctgcgcctcggaaatctcgcccgccccgatcccctcgacgaaacggcggatatcgtcattggagagaatttcgcgattgcgcttggcgcggatcacctgtgccgggagaaaagtgctcatgccggcatcctcaatgattggcgccgcgccagagcggcaggtcgccctgatagcggttcatgccgatgtcctggatcgtcgcgcggcgatacatttcgcgcacatagggctcgaaccgggcattcagcctttcaagttccgtatgttcggacatgtaggcgggcaggagctcgcgcagttcggcgaagatttcggcctggttgacggttagaagcctgccgtcctcgacggtaatctcgccgttcacgacgaccatgcggatgtttgagccgttctcgcaataaaccagatgatggtcgagccggttcatcggcgtgtaatcgtaaccggacatgtcgagcatgatcaggtcggcgcgcttgccgacctccagcgagccgacgacctggttgagcatggccgtgcgtgcgccctcgatcgtcgccgcgcgcaatacttgggccgccgtcatccagccgtccgtatccggtgctgcgatatcgtgcagcaatgcggcgaaacgcatcacgtcgaaaatccgggcggtgtcgttgctggaaagaccgtcggtgccgaggccgacatgcacgccggcattgagcaggcggcggaccggtgcgatgccggaaccgagcttcaggttggagacggcattgtgggcgaccgagcagccggcggcgcccatcagcgccatgtcgtcatcgctgacccagatcgaatgggcgatcgtggtgtttttcgtcagcaggccgagatcgtgcatatagcggatcagactcttgccgtagaattcggggccggtcaccgcctgcgtcttcgtctccagcacatgggtatgatagggcacgccccggtcatgtgccagcgccacgcaggcctgcatcatctccaccgagcagcgttgcggcgcggacgctgagaccataaagccgagccgtccggcgcggccatgctctgaagcaaatacatccctgcaataggccatgtagtcggcggtggtgatcgatgggccctcgacctcggcctgcagatcggtcggcattatttcccgaagatagggcatggtgtcgaagacatgtttgtcgatcacgcaatgagagacgttggcgcggatgccggcatcgtcataggcgtcgtagacccgtttcaggcggccgagatcgaaaccgggcggatcgaagaaatcatcgaccagcgtcgtgacgccggctttcaaggattccatcgccgtcagcaggctgcgcaggtaaagcagtcgttcagagatcggccctttcatcaggatcggataggaatagagcatccagacttcgagcggcgtgccctgataccgccccttgaagaaggtttccgaggaatgcaggtgggcgttgacgaggccgggcatgacgagcttgccggacgcatcaatcacgcgtgtctcgggaggcaagggaatatccgtgccgatcgccgcaatgctgtccccttcgacgagaagatctcccgtaaacggcgtagcgccgtaggttgcgtccatggataaaagggtggcattctggaagagaaggctcatttgatgactctatgattgcttttccgacctgccgacgagaagcggcagcaggaccagttcgagaccgattaggacgaggaaggaaatgccgaaaacgatggtgccgatcgcattgagcgacgggtcgatggcggctacgagtacggagtagatcgccaccggcagcgtcggctgaaaacccgagacaaaccaggcgatgatgaactcgtcgaaggagaaggtgaaggcgagcagccatgcgccaaaaatgccgggaagcgcaaagggaagcacgaccctggtcaccgcctgccattcggtggcgccgagatcccaggcggcttcttcgagcgacaccggcatctgcgccaagcgcagctggatgatggcgagtgccggcgcggtgatcagcacgacatgggtgaggaaaacggcaaacagcgttccggagagatggatccgcgccagaagccccaggaaaccgacgccgagaatgagcggcggaatgaggatgggcagcgtcaccagtgccagaaaggtcgtcttgccgcggaaggtgaaacggttgaaggcataggccgcgaagaaggcgatcaccgtggcgacggtcgcggccgccggcgagacgatcatcgtattgccgagcgcattcaggagcgtgccgtcggaaaacagcttttcataccattgcagcgtaaaaccctgcagcggaaagccgggaaaccggttcttctggaaagagaagagcaccagaaccacgagcggcaggaacatgaaggcataggcaatgccgagccagaggcggccgagaaagacccagggattggctttggtgcgaactgacatcagcttgtcctccggcgtgcacggtccgccgccacgaagccggcagcgagcgccaggaccatgaccacgatcaggatcgtcgccagtgccgaggtgcgcggcaggttggtggagctcgaatagtcggacatgatcatcgaggcataggtcggcagcttgccgatgatggatgtgcctgcgccgccgccgagcagatttccggaaagcgcgtccccgagcgagacgatgacggcaaagcttgcggccgtcatcagcccgaagcgcgagagcggcaagatgacgcgtgtaaaagcttgccagcgggtgcagcccagttcccgagccgcttcgatcagcaccttgtcgatcgcaagaatgctgacatagaggatgacgaccaggatcggtgccagataatgaatgaggccgatacgcgtcgcgatctgggtatagattacgtcgatccggtagtcggaaagaccgaactgtttcagcaccgagttgatgacgccgttgcgcgacaggatcgtctgccaggaataaagccgcaaaacatagctcgaccagaagggcgagatggcaaacagcagcgccagacgctgccagcggcccggcacggcaaaggcgatcgacagtgccaccatgtaggagaggatggttgcgaaaaaggcggtggtgatcgctacccagagcgactgaatgagcgacagtccgtaacgcgatttcgaaaagaagctcgcaaagatatccgcgtaattgccgagcgagaaatccggaatggtctgaaaattttcgacgcgccagaagccgatccaaagtaggaagatcagcggcagcaggaacagaaccgtcagccaggtggcaagcggcgccagaaaccagatttttagctggctgtcattcggcgttctcatgcgtttcgccgtgggactctcgactacggtcatgcggccccccggatcagcgaggcattggccggcgagaaccaggcggtggccttctggttgatctcgaccggcaggacctgctgcaccgtcatcttaacttcggtcccgtcgatgaggtcgagaaggtagatattgtgcgagccggcatattcacggccgcgcagcgtggcatccagccggttttcaccggcaaccaccgtcggggccggcgtcagcttgtcggcctgcaccacgacgaaaacggaggcgccgataggtggcgggtcatcggtcgtgaccacgacctggccatgggcacaatggacgatgacatggccttggccgacttcctggatgcggccggcaaaaagattgttggtgccgacgaaacgggcgacgaattccgttttcggccgggcatacatctcttccggagcgtcgatctgctcgatcctgcccttgttcatcaccaccacccggtcggccatcgaaaaggcttcgacctgattgtgggtgacatagatgaaggccatgccgagctgctgctggatgcggcgcagctcgccctgcatgcgaatgcgcaaatgtgcgtcgagtgccgagagcggttcgtcgagaagcaggatttccggttccgtcaccagcgcgcgggccagcgcgacgcgctgtttttggccgccggaaagctggctgatcttgcggcccatcaggtcggaaaggccgacgagctcggccatagccttcaccttaccggcgacgatcggcttgtcatgcggtttcagcgtcaggccgaaggcgatattgccggcaacgtcgagatgcggaaaaagcgcgtaattctgccagaccagccgcgtggcgcgcaggttgacgggcacatccgaaacatccttgccgcggatatagagctggccggacgaggctgtctcaagacctgccagaatgcgcagaagcgtggtcttgccgcatcccgaaggccccatgatcgccacgaactcgccgcggccgaccttgagattgatgctgtcgacggccgtgacggtgtcgaactgcttggtaatcgacaggagctcgagatcgggcgtggtggtggtcatcgcggctgccatgcaggtctccgattgtatattggccatagcgctcgaaggaagaggctatcgcatagggacaagatgaccctccccaccctccccacaagggggagggcttaacccaaccgatccgacgagactgaattgaagcagagcggagcggcaagttttctccaccttgtgggggagatggccggcaggccagaggggggctttagggcgactgaggggctattccgcccaaatcaagccgtcttgaactcgttgaagatgtcgatccaagcctgttccggctggttggccggcaagccgcgcggcatcgagcggtcaatcagcgtctcgacgagcatcttgcccggattttccgggtccggaacgtaggagagaagcttcttctggtcgtcatcccaatagtcgacgatcttcatgttcgggccgcgggccttgaaggccttggtatagacgagcttcgactggacttttggcgaggtcatgtacttgacccattcaatcgccagatccttgttcttcgaggccgagcagacgcaggcgacttcctgccagcgaatgccgccctgcttgggaatggtcgaggagaagttgtcgtaaccggcgagcttcaggtcaatatcgaggtcaccagttggcgaggcaaagatgtcgccggccagcatggcctgggcgattggctggttggacgagccgaacatgccgatctgtgggcggagcttggtcaggaattccttgaccttcttcagctggtcgtcggtgatcgcataaggcgtctggttgcccgcattgacggcgaggctggcattgccgaggttcggcaggtaccagtcgaacatgccgatcttgccggcatatttcttgtccagcagcgaattccagtcctgcgcctgctcggccgacatctcgtcggtattgtatgaaatgccgtagaaggagaagcgcgtcggaatgccgtagaccgtgccggcggtttcgcccctggttggtgcgaaatcgcggaatttcggatggtagttggcaagttcagcaaaaccgtcggtcttgtaggcctcgatcgccttgttggccttcagcttctgaacgtattcggcgtcggaaacgattgcgtcaaaggtgccgggcggcgtctgggcgaaaaactgcagcatctgctcgccgccgatatagatcttgaactcgaccttggtcttgtgaagatcctcgaactcggcgatcacgtccttttcttcataacccggccagcacagaacgcgcagcggctcggcggcctgcgcctggcgcgagaagattgtgaagtttccgatggtggcggccgcggcccccgctgcagcgcctcctagaagcgtgcggcggctgatctcggcagatggcgacggcgtgttttcagtcggctgaggtttgtcggtcatgtcgttcccctgatggcaatgttagcatcagttagaatcagcaagattcatgccaagagcgaagtggctgatatgattggagatatcaatgtctcagcacgcacttaccccaactggcggatcaaaaactgaccatatggtcaagaaatagcccgtgcgtcgccaaggattttttgatttgaattgccgattttcgctgagagcttacccggatgctgtcgtgacaagcaggaaccgggacgtggttctcctctcggagttcggcttgacgacctgttccattgaataatgagggcttgggaaggaggggccgcatggaacaatgtgaagaagcggttggaggttagcggcttcattttaactatgtctcagccgtcaggaggctggcatgccgccgccgggaggctatatcacaatatatgcaatcacttattttctcaggatgacatggttgtgggttcgaatctcttcaacccgcgacttacgattacgctaggtctgcttccgcccattgcagtcgtggcatgaccagcccatcggcgattgccagtagagccttctgagatcgccgttttgattgtctgttactgggtggcggcgcgaactggaaaggcagatggaagacgccggtatccgaaggtatctggaccacgcacgtgcgaggctaagcctctccgactatatcggagaggtcgacgtgttttagggcttcttctgcttgcttgactctacagccttggccccgagcgtagccggcgctgcgactggagccgtcttgtccttcttaggcttgcggacctctttgttgcttctagcttgacccttagccatcgattcctcctagttgagataacggcgcattactgagcagcgctcgagggaatgcaagctatatctcggccatcgagccggtaagtgtcaggccgccacatgggccgagtggccttcttcgactgaagatcgcgatgaaatgatatcggtcagtagttccgaccgacaccccacaccatgaacaagaacgaggccgtagcggcaaaagctgcgatggcgagattggtatccatgatgatcccctgtcaatttgtacgccctgaacgcgccaagcgatcagatagttccaagaccgttgggtgccgacatgcgagcgcttcttctcatcgatgttcttgccgccgtcgcgcgtatcgctgcggccgacgcgtctcgccagtgacttaacggagcgcggaattggtagcggtgcgtcaagcaacaggcggctgtcttacggccgagcagtatacgaggtggtgcgatatcggtggctacgcgcccatcaatgtcgatgtgttcgctcaagaccaatgatcgacgcgactctacagaggcgattgcttgaacgttcgtaaaacaacagcttttctgaacaccgaagtcagcatgtgtatccaggtgttgttgtcgaatttcgcagccgcgatagctttggcagcggcggcacggacgcgggaaagcggccgacgcgcaagctcacagacaaaaacggatagtttcgcttctcgcgctgtagtagatgaggcagcgcgtagggctggtcgagcctgatacccaacaattaaatcgtggtgcggagcagaagtcccgcgctgcgctcagaaacagctcggatcaaatgaactctcaaaaccacgaaccaaaatcaccaagccgggacacgaccggcgcttggatcaagattctggcgcaataccggcagccgcgatttggtcgcagcgtatttgagctcgtggtaacggctgtaccgttcgctgcgttctgggccggagcgtgcatcttcatcatgcaaggttcgtggctgggtgccttgctcattctgcctgctgcagctttcctattgcggctctttatgatccagcacgactgcgggcacggctcgttcttcgcgcggcgaaggttggacacatggacgggacgcataattggagttctgaccctcacgccctacgactactggcgacgaactcatgccgagcaccatgcctctgctggcaatcttgacgaacggggagtgggtgacatcgccaccctgacggtcgacgaatatcacgccctctctccggcaaggagacttggataccgcttctataggcaccctgttgtcatgttcggcatcggcccggtctgggtgttccttctaaaacaacggctgccgatcggtatgatgagagccgaattcttgccttgggtgtcgacgatggcaaccaatctggcgatcgcgctcgtcgctgcactgacaatatggttcgtggggctggtgccgttcctgttggtgcatcttcctgttgttttattggcgggagctgccggcgtttggctgttttacgtacaacaccagtttgaggaaacgcattggtcaaaggccgacgactggcaatttcctaaagccgctctccatggcgcttcgcactatgacctcccgctggtgcttcgatggctgacggggaatattggcgttcaccacattcatcatctcgctagtcgtattccgtactaccgacttccggaggtactgcgcgctcatcctgaattggcgagcattggccgcataacgctgtgggaaagcattgggtgcgtccgactggcactgtgggatgaacggcggggccggcttgtttctttccgggaagcccggaaactgctggcgcatcaatagcggtttccagcatgcggtcggcgattttattcgcctcaccacgctattttcaggcggcgcgaaagcggcgcacatcgggagtcgtccaccgcctcaaaatcaaagcctcaatgaacgggatcgaagctatcggttgactttcggcgtaaagcctctatctatgacttcatcgatcttttgcttgccgagctttgtctaccgcgcgattggcaccgcgctctattcgaaccttctctctcaaaaatagtcgtatcaccgtccgcgaagccttgcttccgcggtccctcactctatgctttgaaagggttcattatgaccacgggcacagtaaaatggttcaattccacaaagggcttcggcttcattcagccggataacggcggcgctgatgcgttcgtccatatctccgccgtcgagcgtgcgggaatgcgcgaaatcgtcgagggccagaagatcggctatgatctcgagcgcgacgccaagtccggcaagatgtctgcctgtaacctgcaagctgcatgattgaacaggccgccccattgaccacggatgtactggcaatggggcagcgcgtttgaagggccgggcaatgttgtccggccttttcgcttcatagccccgaaacccaaggaggtttcatgacccacagcaagtccaggcagcaggccgaagccgcattcgaccgcgtccaatcccaattcttcgcacacggtcaagccgtcgaggaacttcagaccgaggaacaggcgcgacaagctaagactcaacggcttcgcgaagcgcggatcgcgcgtgacgaggccagggatcaaactcgctgaattagcttccgccgcgagttgcagtgatgtggcgccacgagaggcacccgagcgatcgtaacacgatcccattttacggtgttgcaccttgtcgcattccagctatggtcgcggacatgagaggtcctatccatgtcagaagaaaagcaatcactatccgtagtcgttcgatccgatgacaagggtcattgggtggaatggaacaacgacggcgccaccgggtcgctcggaccataccagagcgaaaaaatgtccgctgacgtgcggatagccaaggaacgcgagttaactcaaaatgcgggccatatcgacgacgcttgaccacgcgtagacggcacctgagtagcgtgatcgctcgcctgtcgccaaagccgctcagtccgtcaataactcacggatcatcgtcacgacttcggctgagacatagggctttttggaggaagggcgagccttgggggagcttcccgacttcaggcggacggtaggcggatgtcacgatgattttgatcggggggcagcgatcgcgaacgaatgctgcgagtttcagcccgttcatgcttcccggcatgtctaggtccgtgaaaacaagcgtaatttcggtatgcagttcaaggacttcaatcgcctcatctgcagtgtcagcttcgaacaccccgaagtcctcatcaccagcttggctcctatcggcaagggacaagaggctcgtcatcgacaacgagcacgactactgggtccgtgggcatgagaggctcgcttctctaaaaaggtatgctccaagggcgcgggtgacacatcaatgattcgggagccttagcacccgttgcagatttcattgcaatcagcagcgggcgactagcggcggcggccacgctcctctgcttcatcctcgaagcctggtggttttgtttttacccaaccgacgaatttctggatcgtggggtcttcgagaatagcggcgatcgtggagaacttctttgccagctgcgcgtccgtgaaggctgcatgtatgtggctatggcatatccggtgcaacggcaccttgatcttgccgcccttactctttggaacaaggtggtgttcctctatctggtcgtgcggtatcgtccgctcgcacagcggacagatgacgggttcagcctcgggatccaccgaggcgatatcgtctctgtactttcgtgccatctatcaagtcttcccctcaaatggtggactgcgtctgtaccgtgttcgttagcctatcatcgcgctgacaacaacgcccagcttgtttcagcaaaacgttgagatcgaatcgaccacagcagcgtaacggatcagatcgccttgctcatggcggcgaccggtgcgatttcaaactcgagtgacaaacactagccctgatcacgtcaaggacggggtgaatgtcagaaaatttgcgatcgatcgtgagcaaaaacagcgctctgcgaagtcatgaggtcatcgcgctgcagcgcgcgcatcgtttttttggcaagcgctctccgtctaacgattgcaacggctccagatatctgggtcgacggttcttcacatccgatcaactccgaagacgggggacagctcggatgcgaaacgctccccacatccgagctcgacggcttagttcggattatgccgcttcccatacttgattgaggatcttggcggcaagagcagcctcgtcctgcggcaggaagcgaccgtagtgctgttgcacaaatcgggtgtgtcctggatagcataactcgcctactcgtatgatcctgtctgctttaatatgtgagttgcgagaacgtcgcggcgattgtgcggtccatgcggtaacagcctttgatcgcaccacgtccagtgtacggattatagatcccatcacgctggatcacggttcgccatgcttggtaaaaggtggtggagttggaaccttcgcgagttgcgtctgtgcccacgcgggcatccccgacatgggaacggcgacttgaagacatgaaatgcggcgagctgcgctggagtgatcgcgacaacggttgggagttccttatccccgcgggggcattcaagaattccagctcgtccttcttcggccaaaaaccatttcggttgattctgccggacctgctcgacctctaccaatatctcgatgcgaacatcgatcgtcaccgaggtgtcctaaagcgtgagccttcacgttttaacgccggcgctggaaccgtcgatccgtcgccgagcaattaatggcgaccagcgccgatgacctcggcggcggattgcaaaaatttctgctctagtgacacaacgcttgcagcgtcgtacctgatgtttggccaatcggtgttttgccagttccatctcatgagttatagccagcctttctatagctcataattattgccaaaaatgagttattgcaggcctagctatcgctcaacgccaaaatccgcagccacacttcaagcagcggcgaccaacgatgaaatcacgagattcttttgcggggtcttgctcgggatgataattcgaaccctttgactgatcgtctctcatcgcgttctccgtgcccttttcggcccggttcttgagatattcgcgagcacggtcggcattgtccgtgtcccctctctaagcatcgcttccttgatttttttctcatcagtcacgacagcctggtggtttattggtcgctgatcgaggggagatgcaagaaaacttcctcccgcttcctgtgatccaagggttcgacctgggtttgccaaaatgcctcggcctcggccgggtcatccccccaggcccggacgctaacgatattgtcgtcaacttttgcaagacgccggccaccgagccgaaggtacttcgctgctgtcctgtgtgacggcgtctctatctcatcgggctgcagctgttgttcgacttgctcccgggattgtccaaggacctgaaggagtgcggcatgttcgggtttgccaacactttgctcgagaaagaccgcaagaggtatgcgcgtttgatgcccacccgacggctcgttaccggtgtggacgacgacagtctctccgtcggtggtgtccagagcccaccgatcgccgttggcgctcatcgaaaattgtttggtttcacgcataggtattggccttcgttaaagcgagggagcggttacttgagccagcgctggcggtaagctgaggcggtcagctcaagagccaggcctgtaccttgctcaacccccgcaggcgctattcgttccgccatgccggaggttaaagctcgctcaaacggttgatgaccttgtcgagatcatacggcttgttaaagaattccgcggacggcggcagctctatatcggttagcgtcaggcgccccgaagcaatcaggatgccagcttgtgggaaccggtcggcgacaacatgcgcgagatcgagacccgaaagtttccctggcgtctggatatcggtgaacagcagatggatcgtctgatcgctgatgatgtcgagcgcttcatccgccgtgcctgcctcaatgacggaaaaccctgcgccctcgagcgcatcgatgagcataagtcgaatgagcggttcgtcttcgaccacaagaactgttcgcatgaactcctccggtacatctgactgcgaaacccaaagcagcggctggagttccggactttttctctgctacgtcattgtttgtgcgccggcgaattattggaaaggcgcaaaagccccctagatcaagcattgtgtaaagaacgttgcgaggccgacaacggaggtactgatggacggtcgaggtcccactcaattcgaatggaatgccgacgagcttcgaaaggcgatcaaatcggcgggggtggcgctctggacctggatggtcgaagacgacactttcgtcatggatgctaaagcctatgacctgtgggacatccccgttgaaaagaacctagatttcgagcatctatccgcgaaagtccaccccgcggacagggatcgcgtcagggctgcatttcttgcagccagggcgattgacggccccttcgagatcgattttcgcattctgaccaatgctgaggaggtccgttggatatcggctcgcggtcagggtaacgaaggcgatgcagcaaccaagaaaatgaccgggatcttccttgatgtcactgggcgtaagcaggcagaagagggccatgagcttctcgccggcgagatgagccaccgcgtcaaaaaccttcttgcgctggcatccggcttgaccgcaatcacgtcacgatcgaccgagaccaaggaggagatggtgcaacaattgacgcagcgcctgacagcgctaggccgtgctcacgatctggtgcgccccttgccgaacggtcaggggagcgctgctctgctgggcgatctcttcacggtcgttctcgcgccgtacgacgatgtcggtccttttgccggacgcgttcgcgttgccgtgccgcggatggggctcggccaaaaagctgcgaccggcctcgcccttgtcgtgcacgagctggcgaccaactcgctcaaatacggcgcattatcggacgacgttgggctgctcgatatctccggaagcaagacggatgatggtgtggaaattgtctggacggagcaggacggtccaaaggtgactgcaccgagcgccgcggagggatacggcagcaaactgttagaccgaacggtgagagggcagctgggtggctcgattgcctacaactggacggaaagcggcgtcatggtcacgttgcggctcaaggaaagccaccttgcaatgtagacgtcgcctctcgtctgctcctcaccgttggctaatggaaggttggagaagcaaagcctcggcgaggcggtccggaacgccggatgggaagagtttgacacttgagcggttcgttaagcggccagggatggacttccccggcgtgtgaccgggtagcgacttgaaggccgtgcgattccgtcgaacaggagaatacaagcatgggttcgacatccgacaagatatttggcaaggccaatgagatcgctggcaaatcgaagcaggcggtaggcgatgccactgacaatagcggcatggcagcaaaaaggcgccgcccaggaagccaagggcgatgcgcagcaggccaaaggccatgcgaaagatgccgtcaagagcatcatcgataaaacgtgagcttgatgttgggcaagccgattgtcgggcccgcttttagcggccctttattttggatttagcttgctgcttcaggaccgcagctcttggtcctttcgcggtaattcgtcagacgccgctctcgcggagcacaactcacctaacgtcttcagcggcaagccaagcgcgatgcaaaagcctggttcgaggtcccattcgtgctaaacatgggtgttacacatcgaatgtgttgtactggtttatcgaggaattgcgtcgcatgagttggaaaacaccgaaattcgaatacgtcaacggttacaagatcgtcgagatcgatggcccaaccttcagggtttacgaaggaagtgatcaggtcggcgatgattttccatattccggcgaggccgctgctttcgccaactcgcttccgaaacgagacaattcccgtccggcaaagcttggaccgcgcttttgaacctgcatcctcgctcagaccattgagttaaaagcgttatttaaacctttttcatacgagatgcgacccataaaggcacaacttattcgctagccaccgttcacagaaaaactaaaagttgaaattccgcctcttccgtcctacttctgtctcaacgatcttttgctttctgagctttgcttattgcgccctagcaaccgcgtcttggacgaacttccctcttcagaacatcggttttaccactcgcaacgccgtcggcgctgcgatctgtcaacgttgctttgaaagggttcatcatgaccaaaggcactgtaaaatggttcaattccaccaagggttttggtttcatcgagcctgacaatggcggcgctgacgcctttgtccatatttccgctgtcgagcgccggtatgcgagaaatcgctgaaggcaagaagcttggctacgagcttgagcgcgacatgaagccaggcaagatgtccggctgcaacttgcaggcagcttgatcgatatctgcttccctttgaccacggatgtactgctgggagcgcgttttcgatcgtgggccaggcactctgcctggcgttttttgtggttcacacggtaggccagttaggattcttcaacgacacaacactatggtaaatcacgccagacggcggagatcgccttcggtaacattcaaacgccgtttttcggcaaaaataacgcgagggacgagcttgaagcgatgacccggtctcgtgaggccaagacgcagagattgcgggaggcgaggcaggccaaagagttcgccgaccaggctgccgcaacgtccgccttgctcgccaagcgcggccttctgcgctgattgttcccccaaacgttagggcccccttttgaaaaatggcagacaaaacgaactcgcggatcgacgatccgcagctggtaatgcaaggcatctctgctcaaagcctatcaggcagccaagacagcggcggagccactgaaggcggtaaggcaagcccagcgcatcgtcgtcgtggaagcgcgcgatgcccgccgcgctgaacgagaccgcgtcaagcaggaagagcgtgcgctgctcgatgccaaggtggccgaagcaggcggctgcgcttgaagctgccacggccgagatccgagcacacgcagcggctgagcataatcgtgtcgctcgattgatcgaggatgaagccgcctgtagagccgaacgagacaggcgctacgcaaatcgcaaggcgagacaagcctaacgtttgagggcgagatctgccggccaaagggcagcacgcgattggtacgagtgcgtcgcgcgacgttctcagccgaaatgagactcatgcccgatcttcagcgacggcgaccgcgctcttctgcctcatcctagaagtctggtggttttgtctctacccagccgacgaacttctggatggtggagacctcaaggatagcgggggagaatctcttcgccaactgtgaggtatgcttgttaattgtccttcgactaattcatttgctatcgttcaagattaagcgcaagttgccggtctcggcagccattgaacgggcgctgtcgattgaagcccatccgcttcgccctgaccgaaaggaggacgatatgtcttccgcgattgacaccaccaatcttgcagtcaaagacctcagcatgctgaaagctgtcctttatggctacggctacaggggcgatatttcggtatcgcctgataatgagctccgtattgcggcgaggttgataatcaggctcttccaccaaggtttccgtgagccagctcaactttccgacgcgttgcaccgaaatttcgataggccaaagacccggcaacatatcttttacttctcgggcatgcatcggtacgcggtgcaaggcatcacaccactggcagagcgacggattcactgacctttccagcgaaacgtggacggaagacggctgacgaagtttggcaactcttgagaggccgtcacgctaaaagtcgagggtcaccaatatctcggccttgcccaattatcgtatctgcgggccgcaacaaccaagccgcgagatagcggcgccgcagggctttttcctcatcggatactactttgaaatgggacttggacggcactcgcactcacccgctagcgtcggagcagacatctacagtggaggatatgatgacgaaatctgcgaagaacggaatatcgggacaagatggcaaagccgggaggcccggcataggtaaccggccgggcaaaggcggcgctgggggcgctggcaggccttggggggcaggcgaatgacgaaccagggtgtggggggaccaggcagagcaattagactcgatcttggctggaatatatgagcaagtagtaattgcccggtgccggttctctcttgggaccagaacactgagctttttggagcctgttgagcgcccctcttcgggctcttttgcgatgtgaccggccttatcgaagcaggctggagtgctcgtctctttacagagttcaggttgaagctggaaattgatgcgacaagcaggagccggcatagttttggtgttgtctgttatatcgcatcaattcagagacgctgttccaaggcattgttttctaggctcaggcattgagttctcccccgagccgccatgacaaatgaggtttataagagctggccgagttgcttggcactctccgcatcaatcaccaagccagtgatgaatccagctttcaagatcgcatgggtcgcatggacctttgcgattcccgccgacagcaggataatatcgctgtgcgagagatccgagaggttaattgcaagcgtgcgccggcagatttgggaatcgatgtagtttccgttttcgtcgaagaacaggccaagcgtgtcgcccaccgcgccgagttcgttgagcgcggcaaggtcctccttcgacagatagccatagcgcgataggaacgaccccgaatcgcattcgcccacgctgatgaagcatgcctgcgcgcgcatcgctgtcctgatgatatcctggacaaccctttgctggatgaagacttccctgtcctcctcactgtcggcgatgaagggtacgggaagatatttcgcctggccgccggtcttcgaggcgatcttttgcacgacatcgaagggattggccgaggcagatcgcgtcaatgaaccaagcagggaaacgaactgcacatcgggtgtattgacgggcaggaatgcgtcggccatcgcgctgatggtccggccccaggcgaggccgatgaccgtctccttcgactgctcctgcatcaaaaccgtgcgcagaaatctcgccgcgaccatgccgacccctcgacgggcgaccgcctcctgaacgtcgcgcgattcacccccggcgtcttcatcgtcggatggcggtgtgatgtaacagaacttcagatcgaatttggttctgatgcgctcctcgagctccgattgcgcggaaagacgatgatcgatgtcgatcgtcacaatgccgcttgtccgcgcatccgcgatcagtcttgcgactttcacgcgcgaaagccccaagatcgaggcgatctcattctgtgttttttcagcgacataatagagccaggcagctctcaccatgacgtcgttttcgctttggtcccgttcgatcatagcgtgcatccttctctgtggaccggtctatcatttgttcattctctgatcaaaagtattttctatttgactttttgtgcagcgactgaacaaatgatcatgcttgaaggagcaagcgagttatctgggaggatttgatgactgagactgacgatcaatcgccgacggtcgggggcgtatcgcgccgtgaccttctcaagtggggcggacgtgccggcggcgtcgccgccgctgccgccactgccgccaccatgcccaatatggctgaattcctgctcggctcgacgccggcattcgcggccgacaagccgctcaatatcgccgtcatcggccagcagatgtccgcccagtccgatcagcgcgcctgggaaggtatgcagacctggatgaaggggatgggcgtcgacaagacctggaagatgaacctgacggatgccaagggcgatcccggcaagcttgtctcgcaaatccaggatgccgtgaccgccaaggtcgatgccatcatcgtcctcttcgcgacgctgacggcggcccatgccgccctcgacaccgtcaagacctcgggaatccccttcttcagcatcgattctggatggcaggacccggcgatcgccgacctgaccagcaacaactatattctcggcggcgcgccgtcgcagtatatggccgaccgcctgcttggcgctggcaagagcaaggccaagatcgcctcgatcatcgccaacttccaccacggcacgcgcaagcgcggcaaggttctcgaggttttgctgtcggaaaacagctggatcgaacaggtcgactcccgcgtcatccagtatgacggcttctatgaaaagacccagaacatcgtcaacgactggctgacccgctacggggacgagctcgattgcatctggtgcccatgggatgaaccggcgatggccgcctccgaggcgatcgttgccaagggcctgcaggacaagatcttcgtcgtgggcgccgatggccatccgaccgcgcttcagagaatgcgcgatggcggcgccaagtggccgcagaaggccaccagcgcccaggctttcgaactctggggcgcctattgcggttggctcgtcaacgagatcgtcggcaagggcggcgatgccaagaaactcgttccggttccgatcgtcgagttcccgaccccgctgctcgtcagcgaagtcaacgtccccggcaaggacgaccagccctggtcggcaaccgacctctactacctgtaccaggaccgcgtgctcaagggcatgaaaggctgacctcccaagccggccggcagcctcggctgccggcccctgttccagccttggatcaataaaagcgacgtaccatgagtgaagaacttttgcgggtcgaagccgtttcgaaggctttcggcggtgtgcaggtattgcaaaatgtcagcctctcgctgaaaggcggcgaagtcctggcgctggtcggtgccaacggcgctggcaagtcgacgctgatcaaggtgatctgcggtgcgcatccggccgaccggggcgcgatctatatcgacggacagaagcaatcctacaggaccgtgcgcgatgcggtcgcttccggcgtgtccgtcgcgcaccagcacaacatgacgatctcgcgcctgaccggcgctcagaacattgagctcggccgtgagccgacacgcttcggcctgatcgacaagcgcgagcttcgccggcgcgcggaagcgctatggcgggctttcgacgtcgatatcgatatcgatgcggaatgcggagacctgggccccggcgagcagaagatcgtcgatatcctgaaagcgctggcgacaaacccgcgcatcctgatcctcgatgagccgactgcgacgctgacgctcggcgaaagcaagcgactgttcgccttcattgatcaactgcgggcgaagaatatcggcgtgatcttcatctcgcaccaccttcaggaagttctcgagcactgcgacagcgtcgtcgttctcaaggacggacggttggtccatcagggcgtcgtcgatgaaaatctgacgcgcgaggacatcgtacagatgatgatcggccgtagcgtcgtgcgggaaaagcgcgcttcctccgccgttgccggcgacaccgtcatttccgttgatagcctcaaggtcgccaatctgcatgtcggtcacttcgaggcgaaccgcggcgaagttgtcggcatcgccgggctgatcggggcagggcaaaccgagtttcttcagtgtcttgccggcgcccgtcgtccagccgagacggggagcgtcaagctcttcgataagaccgggctgccgagaaccgtgggtgacgcggtcgtgagcggcatctactccgtgcccgccgatcgtatcaacacggcgatgttcggtgcgctgacggtcgaggaaaatctttcgtccgcatcgttggccgggctgtcgtcgcgaggtttcatgtccagccggatggcgaaggcacgggccggcgagctcatctcggcgctggcgatcaaatgcgccggacagggccagaaggtccaggaactgtcgggcggcaaccagcagaaggtttctttcgcgcgctggctgtcgcggccgggcctgagcgaggccagcctgaagaaccagatcttcctgctcgacaatccgaccgagggcgtcgacgtcggcgccaaggcggagttctacgatctgatcggacgtctcgccaggcgcggcggcacggtgatcgtcaccagcgccgaattcaccgaactgatcgccatctgcgatcgcatctattgcatctcggacagcacgcttcgtgatcatttcccggcggcggaaatgaccgaagaggccctgctcttgaaaaccaattgaaggacagacgacagtgagagagagctctatcaaggttcaggggccacgcccgataaactggatcgacttcgcaagccgctacggcaccgtcttcgccgcgctggtgatcttcgtcgtcttttctatctttagtccacgctttctcagcgccaacaatctgagcaacgtcctcatccagatctcggcattgaccgtcgtcgcgagcgcgctcaccgtcgctgtcgtcagcggcgagttcgacttgtcggttggacaggtcgccggtttgtcctccatgctcgtcgcgggcctgctcgtcttgaacaaccagccggttgtcgtggcgatcccgctatcgatcctggcaggtcttatcatcggtatcgtcaacggtttcctggtgacaaaactgcgcataccctcgctgatcgcgacgctcgggatgggacccatcgcgctcggcatcaactacgcctatagcggcggcgactccatctacgcccagatgccggactctttctactacctgtcgaccggccgaatccttgggttcctgcccgtgccggtgctgatcgcgatcatcgtcgtcatcgtcgtccatacgctgatcaacaagacccgctacggacgcgccacggttgcgaccggaaccaacatcgttgccgcgcgcctctcgggcatcaacgtcaatcgctgccgccagatcgctctgatgatctccgcgacaggtgcctctgtcgccggcgtgatgctgaccgcacgcctcggcaccggccagccgggcgcgggtgaaccatacctcatggacgcgctgacggctgtcttcatcggcatgacttgtttccgtccgggcagggcgtcggtcgaaggcacgatcatcggcgtgatcatcatcgggatgctcgacaacggtctcaacctgctgggcgcacccttctacctccagaacatcgttcgcggtgtcgtgatgatcgcggcggtggcccttgcggtgctgcgtggcgaaatccgctttttctaaaaggatcatattgtgtctcaggatcaaaatcagctgaaggccgcggccggcggttccacaccgacatccgacgcacagccgaagcgcaacagccagctcgtcgatctctatcgcgtcatgcggcgcatccgcaccttcgaggagcgtgtcggggagctcttcattcgcggccagtcggccggctccatgcttcatctgtcgatcggtgaggaatcgagcgcggccggtgtctgtgccgccatgcagccgcaggataccttcaccacgcatcaccgcgggcacggtatctttctggctcgcggcgccgaccccaagcagatgatggccgaaatcggcggcaaggagactggctactgcaagggtaagggcggttccatgcatatcgccgacatggcgcttggccatcttggcgccaatgccatcgttggtggcggcatccctgccgtcgtcggtgccggcctgtcaagcaagcatctcaagcagaactccgtttcggttgcattcttcggcgacggcgccatgcaacagggcatcctctacgagagcatgaacatggccgccctctgggggcttccggtgttctttgtctgcgtcaacaaccaatacggaatgggtacgcggatcgatcaggcaacgaaaagcagccggttcgacgagcgcgccaaggccttcggtctcaatggcgccgtggtcaacggccatgatgtggaagaagtcgaggcggcggcccgcgggctcatggacgacgcccgcgccggcaagcccggtttcctctcggtcgaggtctacaggttcttcggccatgcgcgcatggacaagagcccataccgcgccgaggccgaggagatcgaggggcgcaagaaagatccggtgctgtttgcccgtgagaagctgatcgcccagaaactcgaaacggaaagcgtgctcgacgcgatggacaaggagattgtcgccgaaatggacgcgacgatcgacttcacggtcgaatccaaggcgcctccactcacctccatgttccgagacgtctatgcggtcggcgagccggagccggaacccgttagcgtccggatcgaccgtgttcttgccagggatgatgcatgatgacctcgaccacctacagagatgcgctgcgcaaggcgctggacgacgcgatgaccgaagacgagaccatcgtcgtcatcggtgaagaggtcggacgttatggcggcgcttatggtgtcaccaaggacttgatcaagacacacggaccggagcggctgatcgacacgccgatctccgaacctgccatcatcggcgcggccgtgggtgccgcgatgaccggcctgcggcccgttgccgagctgatgtatatcgacttcctcggcatgaccatggatcagctggccaaccaggctgcaaagatccgctacatgttcggcggccagattggtgtgcccatggtgctgcgcacccagggtggaaccggccgttccgcaggcgcgcagcattcgcagagccttgaggcctgggtcatgcatacgccgggattgcggctcgccatgcctgcgaccgcggccgatgcctatcatctgctgcgccagagcctcaccaagcccgacccagtcgttttcatcgagcacaagtcgctctacacccgcaaggaagaggtcgatttcgaggccgaggccctaccatggggcaaggcggccgtacgccgcaccggtgacgacctcgtcatcatcacctattcgcgtcaggtcttctatgcactggaagcggccgatgcgctggcgaagaaggggatcgaggtcacggtcatcgatctcagaaccctcaatccgctcgatttcgatacggtgcgcgagcatgtcgagcgcgtcggcaaggcgatggtggtctccgagggcgtgatgacatcgggtgtcgcggcggaactggccgcacgcatttcggaagaatgcttcgatttcctggagcagcccgtcgtgcgcgtggccggcgaggacattccgatctcggtgtcgcaggaactcgaatccggcagcgtaccgtcgccgcgcagcatcgccgatatcgcggagcgcatgttgtcatgacgatccgggttctcaagatgccccggctcggggaaaccatggacgagggcaaggtcgtcggctggctggtgaagcccggcgacagcttccagcgcggtgactcgatcatcgagatcgagaccgacaagacgatcgcggagtttcccgccctcggcgatggccgcctggaggagattctggtctcgatcggcgatgtcatcgaggtcggcaagccgcttgccaggatcgatatcggcaccggcccggactggacggccgacgagggtgaggaggccatgccggcggatgaagccgcggctgcatccgccatggaaacacccgcggccgccttcacggaaaccgaccttgccatgccgcgtctcggcgaaaccatggaagagggccgcgtcgcgaagtggctgaaggcgccgggtgacagctttgttcgcggcgaagcgatcatcgagatcgagaccgacaagacgatcgccgagtttccggcgctgacggatggccgacttgtctcgatcctgcgcgatgatggcgagatggtgaccgtgggcgacccgatcgcccgcatcgaggtcccgggcgagacgattgccgttgatgaggccgccgctcgaccagctggccccaccgacgggcaagcggtgacgaatgcgccccccgtcaggaaaccgggtgttacgcggtccgatggccgcgtgcgcgcaacaccgcttgcccgtcgtcttgccagacggcacggtcttaatgtcgaaacgcttgtcggcaccggccgtcgcggccgaatcgaaaaggctgatgttctggctgttgtcgaaggcggcattgcgcctgccgcgtcacctgccgacgttcaattcgcgacactcgcgtgcggctgcctggcctatctcgacagcggcaagggcgagggcaacccgatccttctggttcacgggtttgccggcgacaggacgacttgggccgcggttgctgccggcctaaagcgggcagggcgacgtgtcatcgtggtggatcttcccggccacgggctgaccaacagcgtcgccaacgcggccacggatctctccgccgatcttccggccttcctcgatgcactcaagctttcgaaggtggagatcgtcgcccattcgctcggcgccgtcgccgcactcggcctcgcaacggcagcgcccgggaaagtcgcatcgatctcgctgatcgcaccggccggtctcggctcagatatcgacgggcacttcgttcatggaatggcgtcggcgaaaacgggcggcgaagtcgcgcatctcctacggcgtctctcggtgcacggcgtcgatctgtcggaggcggccttgaatggtctggccgcctcgctttcgaagggacggctcgtctcgctggctgaggcgatcgcgggcccgtctgggcagaaggtcgacagtctcgcggcgattgagagactatcggcggagctgccggtgcgcgtgctcttcggtctcgaagaccggatcatcccctggaagcaagttctttcgctgccgccgcgcgtcgcggtgcatctgctcgcccgttccggccacatgccgcagtgggatcagaccaaggaagtgctcgaaattctcctgtcgcgagggaccaaggcatgaccgacatcaaggaaaaggtgaaagacgcccagcggcgcatcgcaacgctcgccaaggcaagccccgagcttttcggcggcttctcaagagtgagcaaggttgccgccagcgccggaagtttcagctcggcccagaaggaactgatggcggtcgcgattgcggtgtcgaagggatgcgaggattgcattctctaccacgtcgacgcggccatgaagcacggcgcgaaggaaaacgaactcatcgaggcgctcgacgtggcgatcgagatgggtggcggtccggccgtaatgtacggcgcgaaagcaatggaaatcatgcgcgcgctgcagtagcgctatgacgcgccagccgggagggccggcgcgggaggagacagaatggcttactttctcaccgcggacggcggcaccgaaagtcttcgggcacgcgtctacgacctttccggcacttgccttgccagcattgccgttccgtacgagacaaaattctctgccggcgcgcgcgccgagcaggacccggaggattggtggtcggccttcgtcaaggcgtcgcgtcaggtgatttcgcaatccggcgtcgatgccgcggcgataggggcggtgacgctcgcgacaaccagttgtacggttgtggcgctcgatcgcgacggaaaggcgttgcggccggcgatcatctggatggatgtgcgcgccaatgccgaggcggatgcggtgctggccaccggggatgcggcactgatcgccaatggtggcgggcgcggtccggtctcggccgaatggatgatcccgaaggcgctgtggatcgcccgcaatgagccgcatatcttcgaggccgcgcatacgatctgcgaatatcaggacttcatgaccctgcggctgacgggcgaacgcaccgccagtctgaacaacgttaccctgcgctggcactacgccaccgaccgcggcggctgggctgcctcgctggtcgaaaaacttgggatgtccgccctcctcgaaaaatggccgcagcgcgtggtgccgccgggcggcgtggtcggcaatctctccgccaaggccgccgcggagctcgggctctcgaccagggtcaagctcgtgcagggcggcgccgatgcgctgatcgggatgatcggccttggcgtcgccaagcccggccagctggcgctgatcacgggctcgtcgcatctgcagttcggcgtcaccgaaaaggcggttcacgcgccgggcgtctggggcacctatcgtgactgtgtctatccggatcggtacatcatcgaaggaggccagacctccaccggttcgatcatcgcctggctcggccgcataatgaacgggacaatggatctcgacgagctcaaccgcaaggccgcggcactggagcccggatgcgacgggcttctggtccaggatcattttcaaggcaaccgcacgccttacaccgatccgctctcgcgcggcgcgattgtcggcctgacgctcgcccatgagccgcagcacatcatgcgcgccatcatggaaggcatcggcttcggcacgcgcgcaatccttgatgcaatggcggacgcaggctatcgcggcaccgagatcaccattggtggcggggccggcgcatcggatttgtggttgcagatccatgccgatacggccggtcttccggtctgcgttccggcctcccgcgacgctccctccatcggttccgccgtccttgccgcgcacggcgccgggcatttcgccacgatcgacgacggtatcgccgccatggtccggtccggaaaacgcatcgagccgcgcacacgtgaggtcggcctctataacgagatctatcagcaataccgtgcgctctatccggcgctgaaatcggtgagcgagaacaaggggcaatctgcatgagcgacgccgatttcagactggacggaaagctcgccgtcgtcaccggcgcggcgcgcggcatcggccgggcgatcgcagagcgcctcgcgcaagccggcgccaaggttgtgattgccgaccgtgatgtggctgagggtgaggtggttgccgccgcgatcatcggagcgggcggcgctgcctcttgcgttttgcttgatgttaccgacgcggcagccgttgcgaatgccgtcgaaacgatccacgccgcccatgggccggtggacgttctcgtgaacaatgccggcatcgttcgtaacgcgccggcgaccgagatgagcctcgacgactggaaatccgtcatggatatcgatctcggcggcgtcttcatctgcgcccaggccttcgggcggggcatgatcgaggccggccgcggcgcgatggtcaacatttcctcgatctgcggcgaagtcacggtcacgccgcagccccaggtatcctacaatgccgccaaggccggcgtgaatcttctgaccaaatcgctcgccgtcgaatgggcgaaacgcggcgtgcgcgtcaatgcggtggcgcccggatatgtcggcacggaactgacgttgcgcggccgcagcaattccgaatggttcgagacctggatgcgcatgacgccgatgggccgcctcggcgagccccgtgaaatcgccaacgccgttcttttcctcgccgccgatgcatcgagctacatcaccggtacggtgctgacgatcgatggcggctacaccgcaatgtgagccggagatctgatatgaccgataagattcgcactgccctcgtgaccggcgcaagccgcggcatcggccgcgccatcgcggttgggctcgccaagcgcggctatgatgtcgcggtcaacgatatcgaacggcagaaagacgttctggcaagcgttgccgcggagatcgaggcgctcggccgtcgcgcggtaacagtctttgccgatgtcagcaacaagggcgaggtcgaagccatgtcgaggacgatcgccgtcgctttcgaccatctcgacgctgtcgtcaacaatgccggcatcctgatcgccggtgatgtcgacgggctgaaggaggaatactgggacagcgtcatggatgtgaatgccaagggcaccttcctcgtcatccagtccgtgctgccgataatgaaggcgcgcaaatacggccgcatcgtcaacatcgcctcgatcggcggcaagcacggcgcgccgtcgcaggcgcattattcggcctccaaggccgctgtcatgggtttcacgcgggtgctggcgcaagaagtcggtgtcgatggcatcacggcgaactgcgtttgccccgggatcattttgaccgacatgggccgcgtcaatctggatgaccccacggtcaagaagagctggcaggataagaccgccatgcgccgcatcggcgaccccgaggatgtcgtcggcgccgtcgccttcttcgcctccgacgatgccgccttcgtcaccggacagacgttgaacgtcgatggcggtatcgttttcagttaactgcattgtgttgctgcgggcatgttagcccgcaaagccgggagatttttctcctggcctttccttttgcgtgagttttcgtaggcaagccgcttttcgacctgcaggtcagtcgatcgcgcctcgtggcatcccgagttcgttattcaggccgaattgctggcacggagcttgccgtttgcaacacgtcagagctcgatcaatctcgcagcggtgaacttgtcggtaatgagcgtatcgatgacaccggctcgaagtgcgccagcgatcgaaatcgtcttcttctggcccccctgcgaggccgaatttaacggaaccatatctgcatttctaggtagttctggcattcggcgggctggatggtttcgaccagcctgccgatatggcgccatgtgccgtcgatgttgcgcttttgcgcgtctctcatccagtgtttgatcttggagaaggcctgttcgatcggattgaggtccggcgaatagggcggcaggaaccagagccgcgcaccggcggctttgatcaactgacggatggttgccgacttgtgactgccgagattgtccatgacgacgatgtcgcctggcttgagcaccggcaccagctgctgttcgacataggcgcggaagcactggccgttcatcggtccgtcgaagacacagggcgctgtcagccgatcgtttctcaaggcgcccaggaatgtcagcgtgcgccagtggccatgcggtgcaaatgcccgcagtcgcttgccttttggcccccagcccctgatcggcgacatgttggtcttgatccaggtctcatcgatgaagaccagccgttcggggtcgagatgattttgcagggccttccaccgctgtcttctgcgagcgacgtcggtacgcgcctgctcaagggcgaacagcgttttttttgaagcgcagcccttcgctgcgaaggaattcccagatcgtattgtgcgagacggaaatcccccgctcggacaactccgccttcaggccatggagtgtcacgtgcgggttctcggcgagccgttgcacaatgatatcgcgatgcggttcgagtatccgcttgcgatggccgcccatcttgccgggatgaaccgatccggtcgcacgatggcgctgcgaccatttcacgacggaagacgcggcaacttcaaaccgcgtcgccactgaacgaacgctctcgccactcagtacggcggcaacaacgcgctcacgaagatcattcgatatcggtgcggtcattggatgcttgcctccatccagccagcatcaatgaatcagaagaaaactgatttgaatcgcattcgattcagaaaaacgcggaaacgctaagccttctccagccgtgagttccataatagagtcctatgtcgcgcaatggcataaaaaacagaggactaatcaagccagttaagggccggcggttcgattccattcaatctgctggaaaggtttcttcccaggaaagcgatggcttgtcccggcgctacgcactccacctcatgagtagtcacatgctgcattcgtgcagaagacttcaagcaaccggctctgttgttacgtgtcgcgaaaccttcgctagagtagagccaaggcgacgatcagagccggcgccatcacgaagcatccgattttcaggaatgacagcgcgctcacgtggaccccttcgcgtctgagagccgccagccacaaaattgtcgcaagggatcccgttaccgaaaggttgggtccgagatcaacgccgatgagaaccgcgcccgccacccgatcggaaacgtgcg

SEQ ID NO: 24 - DNA, 63134 bp, Rhizobium matallidurans
  source 1..63134: mol_type = genomic DNA
gaggatgagacatggttgctcccctaggggagagggtagggtgagggggccacacggtaggatcatgcttcggacgtcttccagcaataacactcgactgcttggctctgttggctgacattcgatgataacgacggtagattgctctggttggtggggagttggatgcttatcatattgggtggattgccgggcgccgggaagagcactgttgcgcaagccctggcggcgcggataggcgcctgctacctgcgggtcgacacgatagaacaggcaattcgtacgtcagcgccactggccaacgggcacgatgtgggtccgagcggatatgtcacgctctgcagactcgcgagcgaaaacctccggcttggccacactgttatcgccgattccgtgaatcccctggagatcacccgaagcgcattcagaaatgtagcgatcgaagcggatagtttgttcattgaggttgaagtcgtttgctcggatagcatgacacaccgtcgtcgcgccgaggcgcggtcatccaccgttgaaggtctcaccccgcccacttggaccgagatccaggcgctgcactttgagcgatgggtgccggatttgcggattgatacctttcaactgtcgttggaagaaagcgtctctcagatcatgcgtctgctgggccgatgagccatccatccggcgccccgtccgatcagatgccgtatcaaccggggggatgagccctgccggggtagaagcatgtgtggggggtaaaaattggctaacgtcagcgccagcggccccctcatccgcccttcgggcaccttctccccgttggggagaagggaagatggagcgagcggccggccacgagtcccttctccccagcggggagaagatgccggcaggcagatgagggggccaccggcacaacaccagcccacccctccatccactcagtctaagccctcaagccgccttcgccacatccccatgcgggtcgagcacgaatttcgtcgccgccccgtggtcgaagctctcgtagccctgaacggcctcttcgagcggtatcaccttggcgttgacgatatcggcgatcggcaggcggtcgtggaggatcgcctgcatcagctgccggttatacttcagcaccggcgtctgcccggtgtggaaggattgcgccttcgcccagccgagcccgaagcgcagcgacaggttgcctgatttggcggcgctgtcgacggcgccggggtcctcggtcacgtagaggccgggaatgccgatcgaaccggcggcgcgggtgatgtccatcatctggttgagcacaatcgccggctgctcgccgcccgaatggccgcgcgcctcgaagccgacggcgtcgatggcgctgtccacctcgttgcttccggtcacctgagcgatcatgtcgcccaggcggtcgctctttgacagatcgatcggctcgaagcccaccttggcggcatgcgccaggcgatccttgttgaagtcgccgatcatcaccacggcggcaccgaggatgcgggcggaagcggccgccgcaagcccgaccggaccggcgcccgcgacataaaccgtcgagccgacgccgacgccggcgcgcaccgcgccatggaagccggtcggcaggatgtcggagagcatggtgagatcgcggatcttctccatcgcccggtcgcgatccggaatcttcaggaggttgaagtcggcataggggatggtgacgtagcgcgcctgtccgccgatccagccgcccatgtcgacatagccataggcgccgccggcgcgcgacgggttgacggtgaggcacacgccggtgtcctgcgacttgcagcagcggcagcggccgcaggcgacgttgaagggcacggagacgatgtcgccgacttcgagcatctcgacgtcgatgcccttttcgatgatctggccggtgatttcatggccgagaaccagccccggcatcgccgtggtgcggccgcgcaccatgtgctggtccgatccgcagatattggtcgagatcaccttcaggatcacgccatgctcgatgcggcgtccatcgggggcctcgagcttgggatcgtcgatgtcatggatttcgacaacgccgggccgcatgtagacgacgccacggttcttgctcattttcatctcctccgttgaaaatgctgcggtccgcgcgggctcctctcccgtgcggtcatcatcgcagcttagaggagaatgtcggccacgtcgtcccgtttacgacggtttcttcgtccgaaacggtcgtaaacggagaagtgaggagaggggctcgaagaccggggagggccaatctttgcatcttgcccacgggcgcattcccactatgctctgccgataacaatagtttgggaggcgacatatgatcctgcactcggtgctgatgcggctgaaatcggccatcacgggcgaagaaaagcagtccctgttcgaacagatcgtcgcgctgaagcaggtcattccgggcattctggatatcaagtatggcccgaacgtctcgcccgagggcctgcatgccggcttcgtcgatggctttgccgtcaccttcgaaagccccgaggcgcgcgacgcctatctcgtccatcccgagcatgtcgccgtcggcgagcgcatcgtctcgtcgctggatggcggccttggcggcctgatcgtcttcgacctgcaggtctgatcccgcaggtcggagatagcgttcgcggccgtcagcccgcgttcgccgaggtcgtggggatcggctcgatccccactttggtcaaaggctcgctcagagttgctcgatcatcgtcgcggcgctggaaaccgtcgcctggcctggattctcctcgacgttgagcgacttgacgacgccgtcctcgaccagcatcgagtagcgcttcgagcgcacgccgaggccgccgcccgaaaggtcggcgtcgaggccgagcgccttggtgaaggaagcgtcccagtcggcgaggaagtggatcttgcccatgccgcccgaggattgcgcccaggcgcccatcacgtgccagtcgttgaccgcgacgacggcgatgtcgtcgacgcccttgttgagaatggtgtcgcggttttcgagatagcccggcaggtggttgagcgagcaggtcggggtaaacgcgccgggcacggcaaacagcacgacgcgcctgcccttgaacagcgcctcggtcgtggtctcgaccgggccgtcggccgtcttttccttgaatgtcgccgaaggcagggtatcgccgatcgcaatggtcatgaatgtctcctcatggtgggttggcgggcggcgcgttggccgcgggatttcaatcgaaggcaagcgggctttcgatggcgcgtgccccgtcgatgacgagcgcgctccagctcttgcccgatatgtcgtagttcttgggcagcttgccgatcgcgaccgtcgtcgtcagcgccgtgccgtcgcgcttgctcatcagctgcttggtaaacacatagccgctggggccggcaacgatgacgtcgggtgtcgtgtcgccgatgtcgggcagggtgatgtcgagcttcagctccgtccggtcgggcgaaagcgtatgctccgtcaccttgaattcggaggaagacgcttccggcagccgcgcctcggcggcatcgagaatggcctcttcctgcggctgcgattgtcccgccgccggaagcgcgaccgtaaggtcggcctggaagggcacgcagatatccttgcagatgccgatgaaagcctgcgccttgatctcggtaacaccgctcttggccgacagggtgagcggcagcgtcaccggcgcgtcgtagccgacgtcgtcgatctcgtcgctcttgatatgcttgggaatggggtagctggtcttgtcgagcgtcacccccgtcccgggcgcgatgacgatctgcggcgggatgccggtgttgccgggttcgcgccagtaggtgatccatccggcattcggttcgatctgcagccccgcgcggatcttgccgttgtcatccggtgaaagcgccaccagccgcatccgtccgcccgcattctcggcccaggcgctggtcgcggcctgcgccggggaaagcgccggcagggagaagccaaggccgagaggcatggcgactgcgaaagtaagggcgaggcgttgtgtgtgcgatgcgaaggtcatgcgacaatggttattcaaatccggcgtccttcgccagaagccttggtcgattaaattttcattttcagttgattgaaacaggacattggcccatgtttctcttgtcggggcctcgggcggtctggcatcaggaggtatcatgtccctgtcgaccctgaaaaacagacgagaacgcggcttcttcgacggtcagttcctgatcgccatgcccggcgtatcggacagcaacttcgcccgcacggtcatctacgtctgcgcccattccgatgccggcgccatgggtttcatcatcaaccggccgcaggaactctcgttcaccgacgtgctcatgcatctcgacatgatcaagagcgacgaggcgatcctcatgccgccgcccacgcgcgatctgtcgatccaggcgggcggaccggtcgaaagtggccgcggcttcgtcctgcattccgacgactatctctgcgattccagcattcccgtcagcgacgatatctgcatgacggcgacgctcgacatcatccgcgccatcgccaagggcgagggcccgaagcgcgccaccatgctgctcggctatgccggttggggcgccggccagctcgaagccgagatcgccgcgaacggctggctgaactgcgcggccaacgacgccctcatcttcgatgccaacctggatgataaatacgagcgcgcattggctggcatgggcatctcggccgccatgctttccaccgaagccggccacgcctgaagaccagaaaattcgcggaacgaatagctgcaagcgacgttctcttttcgcaccgggcacgaggcccgttccaaaaggagacatcagatgggtagcaccaccgacaagatttccggcaaggcaaacgagatcgccggcaagaccaagcaggcggtcggcaaggcgaccggcgacaatgcgacccgcgccaagggcgccgtccaggaagccaagggcaagtcgcagaccgccaagggcaacgccaaggacaagctgaaggatgccgtcgatcgcatgtgatcgccagcattccggcaatgacccgtcgcgcatccgcgctgcgggtcgttttgtatcaataccgcttgatggggcgttccatgcggctttttgcctgcgacagttgcgatcaggtcgtgcatttcgacaatcgccaatgcgttcgctgcaaccatcgcctcggcttcctgcccgacgatctctcgatgcgcgctctcgaaccgcttgacgaaacgctgtggcggatggcgtcggagcccgggcgcgccgtgcgcttctgcgccaatgccggtctcgatatctgcaactggctggtgaatgcggatgacgaaaatccgttttgcatcgcctgccgctacaaccgcctggtgcccaacactcatacgcagcagggtgtcgatcgctggcgccgtatcagccaggcgcagcgccatctcttctattcgctgctgcgctggcgcctgccaccgcccgatcgcatcgaggatccgcaaggcggcctggtcttcgactttctcgaagatgaagtgcaggtcgacggaaacgtcatccccgccatgaccggtcacgacgaaggcgtcatcgccatccgcgccgccgaagccgacgacatcacccgcgagctcgcccgcgcctcgatgaacgaaccctatcgcacgcttctcggccatttccgccacgagatcgggcacttcgtctggaaccgtctggtccgcgaccggaacgccttcaatggctttcgcgccgtcttcggcgacgagcggcaggattacggccaggcgctgcagaaccattatcagaacggcgcgccgccggattggcagcaggaccacatcagcgcctacgcgacgtctcatccctgggaggacttcgccgaatgcttcgcgcactatctccacatcgtcgatacgctggaaacagcccgcggcttcggcatcgcgatcgatccgcgcggccatgaggaaatggcgtcagaggtggatttcaacccctatcgcgccgccagcgccgagcagctggtcagcgcctgggtgccgctatcggtggcgatcaacgccatccagcgcagcatggggcagccggattcctaccccttcgtgctctcgaacgccgtcgtcgcaaagctcgaatacctgcaccggctgatccaggatcgcgtcgccgagccccgccagcacgccgcctgacctttcgcggcccgggagacctcaggcgcgcttggtcagcggaaaccgctccttcagcagccgcagaaccgattccgtcgccatcggcgggccgaagagatagctctggccgtaggtgcagcccatcttcgccagctcgatcgcgtcctcgttggactcgatcccctcggccacgaccttcatgtcgagctcccgcgccatcgagatcaccgagcgcagcaccgtcgacttccggtcgctggcgccgcagaccagcgtcttgtcgagcttgatcgtgtcgaacgggaagcgcgtgaggtaggagagggaggaatagccggtgccgaaatcgtcgagcgccaggccaagcccgacctcgcgcagcttttcaagcaccagccgtgcctgctccgggttctccatcaccatcgtctcggtcagttccagcttcagccgggtcggatcgcaatgggtcttggcgagaaccgagcgcacgtcgtcgtaaagatcgttgttcagcaactgcgcgctggagagattgatcgacacgaaaatcggcagctcgccggtctggctctcccaggccatcaggtcgttggtcgcctgttcgagggcgaagacgccgagcatgttgatgatgtcggaagcctcggcgatcggaatgaattccgacggcgggatgttgccgcgcttcggatgctcccagcgcatcagcgcctcgaaaccggcgatctccacgtcttcaaggccggcgatcggctggtagaccatcgacagttccttgcgttccagcgcacggcggagatccgattccagctgcagccggtcggcgccgaaatcgcggaaggcgggctggaacggctcgacgcgattgccgccggcgcgcttggcccgatacatggcaagctcggaatcgctgagcatccccgtcgcgttctcctgctggtcgacgaaggaggcaaggccgatcgacgccgtcaggatgatctcgcggttggcgaagttgatcggcaccatgatcgccttgctgatcgcgtccgcgaagtcggcgatcttggccggatcgcgctccgaaaccaggatgaggccgaactggtcgccggagaggcgcgccagcgtgtcctgcggcttcagcagccggcgaagacggcgcgtcagcgcgatcaggatattgtcgccggccgcaacgccgagcgcgtcgttgaccagcttgtagcggtcgatatcgatcaccatcaccgtcggacgcagcgtatcgctgcccggcgccagcgccagcacgccctgcaggcggtcgaggaaaagctggcggttgggaaggccggtcaggttgtcgtgcagcgcgtcctgcagcaaacggtcgaccgagttcttctgctcggtcacgtcgatcaccgtgccgacgcagcggatcacctcgccgttggaatccagcaccggtcgggcgcggatcagaagccagtggaaatgcccgtcctcggcgcgaatgcggaattcgtggttcagccggccgcggcgatgttccagcagaacgtccagcgtggcgcggaagcggtcgcgatcgtcggggtgcaggcgcggcagccagttgcgggcggcgccatgcatcgtgccgggcgaaaggccgagcttgacggagacgtcggggatggtgacgacgcggtcgcgtgccacgtcccagtcccacaccatgtcgccggagccggtcagcgccagcgattgccgctcgagatccgagaacaggccctgctggaacgttccccccgcgaaggcgtgctgcatgaccgtgaagccgatgaggagcacgatcagcaccaggccgccgccgagcgccggctggatgatgtcgttgtcgagctggccggtgatcgtcagccaggcgccgaagatccacaccaggatcagcgcccaggccggcaccagcaggatggcgcggtcgtagcggttgatgccgagatagacgatgagcagcaaccccatcgtcgccgtcagcgcgaaggagaggcgggcgatgccggcggcgatcgccgggtcgtagatggcgacgccgaagagcagggccaggcccagcacccaggcgagcgtcacatagcccagatgcgtgtgccaccggttgaggttgagataggtgaacaggaagatgacgaaactcgatgccagcgccacctccgcgcaggcccgccatattcgctggtccgccgaggcgatgctgacgagctttccaagaaagccgaaatccacgcagatatagccgagcaccgcccaggcgagcgcggccgtcgccggcaacatcgaggtgcccttgacgacgaacaggatggtgaggaacaccgcgagcaggccggcgatgccgagcacgatgccgcgatagagcgtgaacgcgttgatcgtatccttgtaggcgttgggctcccacagatagatctgcggcaattcgggcgtcgacagttcggcgacgaaggtgatgacggcgcccggattgagcgtgatgcggaagacgtcggcctcgtcgctcggctgccggtcgagcgcgaagccttcgctcggcgtgatcgcggtgatgcgctgcgagccgagatccggccagaacagcttggagttcgccagacggaaatgcggcgcgacgatgacgcgctccagctgttcgtcggacacgttggcgagcgcgaagaccgcccagtcgccctggtagttgccggaactcgagcgcacctcgatgcggcgacggatgccgtcggcgccggccgcggtcgaaacctggaaggcttcgccctgattggtgtagatttcggtggtcttggtcagatcgagcgcggtgtcgtcgcgcgaaatcttgaccggctcggcggcctgcgcggcccctgacatcagcgcgaaggcggacaggaaaagcgctgcgatcaccgcgacgaaacgtcctgatggtgacgagtgcagcatgcgttttttggtcatcggctgtcggttatcctgcctttatccgtatcggtggcaagcagtgaaaacatcacgtgatcatgccactgaccgttgatcttcaagtatccgcgcagatagccttcccgctgaaacccggctttttcaagcaggcggatgctccgagcgttgtctggaatacaggctgcttcgatacggtgcaactcgaggcctgcgaagatgtagggtataaccaattgaagtgcggcgaacatatggccttggccggcatgcgcctcgcccatccagtagccgatcatgcagctttgcgcggccccgcgcctgatgtagccgatggtgatgccgccaagcagcgtcatgttgtcccggtggaaaagcagcagcggaaccgcctgcccggaggcgtattcctgcttgccgcgaatgacgcgggcccgataggagccctccgtcagttcgtcgcggcgccatgtcggctcccagcgctcgagaaagccgcggcttgccgagcgcagcttgtgccactggttgaaatcctggtagcgcggcagccgcagcacataattggcgtcttcgatttcaactgcttccggctgccgagacaggaaccgaaacaccgattttggcatcgatcactcccggagccgcgaatgcaggttcaaacgacggcttgcttgccctgcggggcaggcgagatgagcgacgcggcgatgtcttccatcggcgccagatgctcgagcgggccgatcgccgacagtgtcggtaccgtgtcgaagaacagccggccggcaaggtcggtcagcctttcgatggtgatgccttccagtcgctccatcatttcaggattggagatcggccgcccgtagagcatcatctgccgggccacctggccggcgcgcgccgccgggctttcctggcccatcagcaactgcgcgcggatctgggcgcgggcgcgctcgatttccttctggtcgatcgaggtcgccgacttgtgcagttcgttgatgatgacgggaaccagctccggcaggttctcgccgccggtcgcggcatggatgccgaagatgccggtatcggaaaagccccagtggaaggcatagatcgaatagcagagcccgcggatttcgcgcacttcctggaacagccgcgaagacatgccgccaccgaggatgttggcgaggatctgcgaacagtagaagtcgcgggcgtgataggccttgccctcgaagccgagcaggatctgggcgtccatcaggtcgcgggtttcgcggatattgccaccaatatacttggcggggtccatgaccggcgtggcgctcggcgccgtcggcagcgaggaaaatcggtcctcgaccatgcgcacgaattcgtcgtgctgcacggcgccggccgcgaccacgaacatgcggtcggtcgtgtagttgcggctgagatagccgcgaatctgctgcggggtgaacgagaccaccgtctgcggcgtgccgagaatggcgcggccgagagtctggtcgcgataggcgacttcggaaaaccggtcgaacaccacgtcgtcgggcgtatcgttggcggcgttgatctcctgcaggatgacctgcttctcacgctccagctcttcctcttcgaaggcggattcggtgaggatatcggccaggatatcgacggcgagcggcacgtggtctttcaggacgcgcgcatagtaggaggtcgtttcggtcgaggtggcggcgtttacctcgccgccgacatcctcgatctgttcggcgatctcgcgggcgctgcggcgcgcggttcccttgaaggccatgtgttcgagcaggtgcgcgatgccgtgctcgtctgtcgtttcattgcgcgaacctgatttgatccagactccgagtgctgcactttcgagatgcggcatgttctgtgtgactactgtcagcccggatttgagccgggtgcactcaactgtcattggctatctttctgcgccttccgctgattaggcccgggaatgctggtcgataaacgtctctacctctttgagctcgggcttaacgatctgaaagcgctcctccttgtccatcaaatcagcaagccacgtcggaagcgcggggtcaataccggatgcggattttacggcggcggggaacttggccggatgcgcggtggcaagcgtcaccatcggcgaattggcgttttcgtgcttctcggccacgaaaacgccgatcgccgaatgcggatcgagcagatagccggtcttttcgagcgtggtcttgatcgtctcggccacctgcttttcgctggcgcggccggcgcggaaatccttcttgatgaaggacatggcatcggcggaaatgtcgaaaccgttcgactgcttcaggctgtccatggcggagcggaccttcgaggcgtcgcgtccataggcctcgaacagcagccgttcgaaattggacgagatctggatatccatcgacggcgaggtcgtcgccttgacgtccttcatctcgtagcggccggtcttgatcgtgcgcgccatgatgtcgttttcgttggtggcgacgaccagcttgccgatcggcaggcccatgcgcttggcgcagtaaccggcgaaaatatcgccgaaattgcccgtcggcacggtgaacgaaaccttgcggtccggcgcgccgagcgtgatcgccgtcgtgaagtaatagacgatctgcgccatgatgcgcgcccagttgatcgagttgacgccagagagcttcaccttgtcgcggaacgcgccgtcgttgaacatcgccttcaccagattctggcaatcgtcgaaattgccctcgacggcgagcgcatgcacgttggacgccgtcgatgtcgtcatctgccgctgctgcaccggcgaaaccttgccatgcgggaagaggatgaagatgtcggtgcgctcgcgtccggcgaatgcatcgatcgcggccccgcccgtgtcgcccgaggtggcgccgacgatggtggcgcgctcgccgcgcttctccagcgcatagtccatcagccgcgccagcagctgcatcgccacatccttgaacgccagtgtcgtgccgtggaagagctccatcacgaagctgttcgggccggtctgcaccagcggagcgatcgccggatggcggaaggtgccgtaggcttcgtcgatcatcgcgcggaaggtgtcggtgggaatttcgccgttggtgaacggcgacaggatggtaaaggcgatttcctggtagctcttgccgcgcagcgcccggatttccttcttggagaattgcggccattcgcgtggcacgtaaagtccgccgtcacgcgccagaccggccagcaatgcatcgcagaaaccgagggcaggggctttgccgcgggtcgagatatagtccactgtcgtcatccttgatgtgccgggcctgaagaaaatccggattgaagagaaaacctgtgtcccgccgtctctaagccgcagctttggccttcgccggctgcaatcccgaaatgtgcatcaaaacagtgcttacccaatcgatttttgtttgcgccgctgatatagaccatcgcaaactgtcacgaaaggccctgttttcactgaacgggcccggcaaaaaactttgtgaagagggtgcaataatcgtgttcggcaaggtctctcgtcttatcgcttccgcatccgtcgcggctgttctggtcggctgcaactcgctcgggatgggcggtggagacagcaagacatcggcgtcggcgccctccggcggcagcgcgcaggtgatgccgatggccccggccaatccgtcttccaacgatccgtcgatcggcacggcgaccaccgcgtccggcaacacggcgcccgtcgtgcagggcgcttgcccgaccatctacatgaaggacgccgaagcgatctattaccgctacgccggcggcgccaagaccggagcgcccgacaagctcgccttccaggcctcgatcggcaactacacccgccagtgcacgctgaacgaacagaatctcgtgatgaccgtcgtggcgcagctgcgcatcgtcgccggaccggccggcgcctcgggcaacgtcacgctgccgatccgcatctccgtctacgacggcgaggacgcgctctattcggaagtcaccaatttcgccacccagatcgacccgaacggcgccacccaggtcctgttccgcaaggacggcatcaggctgcccgtcggctccggctcgctggtccgcgtcaacgtcggcttcgaccagggcgcgcccgccaagggcaagggcaagaagaagtccagctaaggtttggggtaggggatcgcggctgcgattgcgtcgcgctattcaaagagtgaggtggtgccgtgtggccccctcatccgcctgccggcaccttctccccgcggggggagaagagactcggagctggccgctcgctccatcttcccttcgccccataggggagaaggtggcccgaagggtcggatgagggggctgcacggcaaaacgcccaaggctcacgccccctcaacacccctcaatccaaactcaagccacgccttcccattccgccagcgccgcgaccacgcccggcagatcgaccatccgcgagatcaccgtctccgcgcccgcatccgtcagccggtcggcgtgcgagggataggtgtgcgaggcgccggtgaagccgatcacccgcatgccggcggcgcgggccgcgtggacgccgtgcacggaatcctcgaccaccacgcaacgcgatggcgaagcgcccatctgcgtggcgccgtgcaggaagatatcgggcttcggcttgacgcgatcggcgccgagatccttggccgagaagatgttcggcgcgaagaactggctgagcccgaccttggacagcatcatggcgagccgcgcgctcgacgagttcgagcagatgcagcgcttgaggtcgatgcgcttgagcaccgcctcgacacccgcgatcgcctgcacctcggaagcgagccgcatgtcgaggagcttctcggacttgtcgagcagggaggccgagagcggaatgctcgcttcgcgctcgatctgcagcaggatattctgccaggtcatgccggcgaaccgctcgcccatttcctcgatgctgatagggtagcccgcttccgtcagaagcctggactcgacgtccgccgcgatgatttcggaatcgaccagaacaccgtcgcagtcgaaaagaatgaggtcgaagccgttcatgtaagtctcaagccttcgttgggggatgagcgggctttacacgatgcctcggccgatctcaaccggccgcgcgtcatggctggcctgcggtcgtcggatggctagggttacgcgctatcgaattgcctgcggatgcggggccttgtctcctcgacaagccatggttcgccctctaatggaagggtatggcaaaggaaccggaagacacaatcgcaagccgcatcagccgcgtgctcgccgaccgcatcgttcgcggcgaactgccggccggcttgcgtctgcgccaggaccatatcgccgaggagtttggcgccagccacgtgcccgtgcgcgaagccttccgcaggctggaagcccaggggctggcgatcagcgagccgcgtcgcggggtgcgcgtcgcctccttcgacatcaaggaggtccgcgaggtggccgagatgcgggcagcgctcgaggttctcgcgctgcgccacgccgccaagcacctgacgcctgcgatcctcgatgccgccgaggaggcgacccgcgagggcgatgcggcggccgacgttcacgcctgggaggaagccaaccgccgcttccatcgcctgatcctcacgccctgcaacatgggccgtctgctcgcctcgatcgacgatctccacgccgccagcgcccgcttcctgttctccgcctggcgttccggttgggaaaaacgcaccgaccacgaccaccgcgccatcctcgtggctttacgccagggcagggcggaagaggcggccggcatcctcgagcgccacgtccagtggatcggccgcgcgccgaaatccaccagcaagggtggcgaaaacggcgaagccttcgccatcgtcggctgaattctcaaaattatagataattcatgatcgacgtgaattccctggaatttcacgcttttcgggccattttcgccgtcggtacggcgcgcgatcgcgtttgtccactgcgcaatcgtatcgcgaccgcttgccatcgccaaaaatccctctcataaaatagatgggaatcaaaaattatctataatttgagaaggagagttcatgtccctgttcgatcaatcccaggagttccgtttcgacccgttgcgtctcgccgctcgcccggccgccatcaaggccgtcttcgtgctggcgggcacgctcatcctggcgctcgcctcgcagatatcggtgccgatggtgccggtgccgatcaccatgcaaaccttcgcggtgacgatgatcggcgctctctatggctggcgtctcggcgcggcgacggttctggcctggcttgcggaagcggccatgggcttcccggttctggctggcggcgccggcggtctggcacccttcgcggggccgacggcgggctacctcgcatccttccccgtgatcgcggcccttgccggctggctcgccgcgcgcggctggaccggcgacgccgtgatccgcagcttcgccgcccacttcgccgccaatatcctgtgcctggcgatcggcggcctgtggctcgcaaacctgctcggcatggaaaaggcctggctgctcggcgtcgtccccttcatcctcggcgcggtgctgaagtcggcgctggcggcagccgtgctgaagggcgtcaggatctataccggccgctgaggtgaccgttcatctgcgcgcccaccacctgctctgcatgctgaccttcgtcggtgaaggctacacgcccgccttcaccgagaactacatccgcattgcctggcgcctgtcgtcgggcgaggagatcgaggtggtcgatggccccgacgatatctgcgcgccgctgctctcgggagcggcggcgcattgccacaacgaaagcgtcgtggcgcgggacagggcggcggcgcaagccgtcggccgtctgttggggatcgcggtttggaagggcacccgcatctatcccgacgcggcgctgttgaaacgcctccgtcgcaatttcgccctcggcacgatccgcaaggcttgcgacgaatgtgagtggagcgagctctgcggccatgtcgccgagcgcggctttaccgatgtgctggtcgcgccgggctgacgcatgtctcccgaaagcggttcgcggtttcgggataaacacatgcgcgaaaacaagcgcctgaagcgtgccgcgcttcaggccgcgaccggcgtctccaccggaaacagcgccaggaactgccgttctccatcaggcgaaaagatcaccgagcggctgcccgccgtgcgccgcgcccagcccttgtcgaagaaactcgtgagcaacgccttgccgaggctgccggccagatgcgcgcgccgctcgctccagtcgaggcacgagcggcagagaggccgccgcgatgccttgaggtcggcgacatcgatgccgatgcactgaaacgtttcctcgcccttggcggtcagcgccagcccgtcgcccacggcgtcgatcgcgcccttggcgacgaggctgtccagcatccgcaccccgtaatcgccggccaggtggtcgtagcagatccgcgccttgcgcagcgccggctccttcggccccggctggtggcgcagatgcccgcggctggccgcgaaacccatcatgctttcgatcagccgcgcgaccgcctcgtcggcaaggctgaaatagcgatgccgcccctgcttgcgggggaggagcaatccgccggcctcgagcttggcgagatgcgcactcgccgtctgcagcgtgatgccgccgaccgcggcgagttcggtcgcggtcagcgccttaccacccgtcagcgccgccagcatgttggcgcgggcggggtcgccaatgagcgcgccgatctgcgcgatatcaggtccttccttcacggctcacctcctcaggatggcatcttccatacttcgaccgtagccgaagcatctccgtcccgcaacatggcaaaaccatcctgcaatcaaggagacaaagagatgatcacctgcttcatccgctacgaaatcgacccgttcaagaaggatgccttcgccgaatacgccagcaactggggccaggccatcccgcgcaacggcgccgatctcatcggctatttcgccccgcacgagggctcggcgaccacggcctacggtgtctacaacatcgaaagcctcgccgcctacgaagcctaccgcgcccgccttgccgccgatccgctcggccgcgagaactatgaattcgcaaggcgcgagcgcttcatcctcaaggaagaccgcatcttcctgaagaacgtctcgcttccccacgccgcaagggtgctgccatgatcgccgtcatcttcgaagtcctgccctatacgggcgagcgccatcgatatctcgatctcgccggcgaactgcgcgcagaattggagaagatggatggcttcatctccatcgagcgcttcgaaagcctgaccctgcgcggcaagcttctgtcgctctccttctggcgcgacgaggaggcggtcaaacgctggcgcaacctcgaacaccaccgcgccgcccaggccgccggccggggcggcattttcgccgattatcgtctgcgcatcggccatgtcgtccgtgattacgggatgaacgagcgggcggaggcgccggaggatagccgggcggtgcatgatgcggtatcttcaaagggatcagcccggccgctttgaagggctgagctttccatcctcatcaagatcgtcaagttcgtaaggcgcgtcggtttcaacgcgcgcattgcggattagccgaatttcttcatcggtcaactctcccgcgagaatgctcttgccggtcggttgcttgcctgagctttcggctgccttggtcgatcgcatcgcgtgttcgctcctgagaattcaatcatcggcaatggcccgcaaaccggcaagtagctgcctgtgacgcgctctggagattttattttcccgaaatcgtaccccggttcaggctttggtaaccaagatgagtaaccataacagacagtaaagagcgtaatgtgtatgagcgagttaaaagatggcgtctgtatttccgcttgccgatctcaaggcctccgcaaagccgggctcctggatcgacacgatcatcaagggcgattgcgttgccgctcttgaagccctcccgacccattccgtagacgtcattttcgccgatccgccctataacctgcagctcggcggcaacctgcatcgtcccgatcagtcgctggtcgatgcggtcgacgacgaatgggaccagttcgcctccttcgaagcctatgatgccttcacccgcgcctggctgctcgcctgccgccgcgtgctgaagccgacgggcacgctctgggtcataggttcctatcacaacatcttccgcgtcggcgccacgctgcaggatctgaacttctggatcttgaacgacatcgtctggcgcaagaccaacccgatgccgaacttcaagggccgccgcttccagaacgcccatgagacgatgatctgggcgagcccgaacgccaaggccaagggctacaccttcaactacgatgccatgaaggccgccaatgacgacgtgcagatgcgctccgactggctgtttccgatctgcaatggccatgagcgcctgaagggcgaggacggcaagaaggtgcatccgacgcagaagccggaagcgctgctcgcccgcgtcatcatggcctcgtccaagcccggcgacatcatcctcgatccgttcttcggctcgggcacgacgggcgccgtcgccaagcgcctcggccgccacttcgtcggcatcgagcgcgaacaggattatatcgacgcggcgtccgcccgcatcgaagcggtcgagccgctcggcaaggcggaactcaccgtcatgaccggcaagaagcaggaggtccgcgtggccttcaacacgctggtcgaaagcggcctcatcaagcccggccaggtgctgaccgacgccaagcgccgctatagcgcgatcgtgcgcgccgacggcacggttacggctggcggcgaggcgggttcgatccacaggatgggcgccaaggtccagggtttcgacgcatgcaacggatggacattctggcacttcgacgatgggcaatccctgcgcccgatcgacgatctcagggccgtcatccgcagtgatctggcaaacgcgggctgacccgcgaaaggcccgatcgagactgccgtcgaccggtttttgtacctccagttgcggaagacggcaaaaggcgcccgggatcataccccgggcgtcttcatttcgggcgccgccgtcaagacgcgcgtgcccgacgaggcgcgcgataaaaagcgccccggcttttgaccggagcgctcgatgtcgatcgatgtcgtggtttcgggctcagcgctgcagcagcgccatccgttcttcgtcctcgtcgcgctggcggccgccgattgcggcggcgacgctggcgatgaaggcaccgacgaacagcgacagcgcgccgaacagggcaatggcggaagccgtcttgcgggcgtcgtccgccgctttctgcgcggccgtcttggcctcgttgatccgcgtcagcacggcatcgatccgggccttggcatcggcttcggacagcccggtgcgcgaggcgaccacctgttggaggtaggtctggtcgtcggccgaaagattgccgtcaacgatgccgttcaccagcacccgcgacacctcggcgctcacggcttcgttgctctggtttgcgggtgcggcggccggattggagggccgcagcagcgcgtccgtgaagtaggcgggcgagaagccgctcctgttgtcagccgcgcttgccgtcgccagcgctccggcggttccggcggcgcccaccgcgcttgccgctgcctgcgtgccggtgcccagcgccgacgacagcgtcgagcccagcaaaccggcgacgacgacggttgccagcgcccatgcgaggaagccgtgcgcggtgtcgcggaagaacacctcataggtatggacgcccacccacttcgcgcggagccgtccggtgagatagccgccgagagccgcggaaacccactgcacgacgatcagccagacggcggcggtggcccccagcgtcgtcagcgacgcgctttcaccggaccatggagagaccatcgtcagcccgagaccggagccgaccagaatgaatatgagcgagatggcggtcgccgccagcgtgccggcgatgatcggtccccagctcacggcggacgccgaggattccagcggcgcgtcggtcacgacggtggacgaggcataggacatcgccgcctcctagcgccagaagagcaggataaggatgatcagcggaatcggaacgccaagaaaccaaagcaagatacctctacccatcgtaacctcctgtcagcacggctgattcattgttctgattgagcccgcgatgcgcgggtgctctcaaaaccttcagcggcgctgattgttcctgaggcggtggaaaattgcggtttccctcacgtcgggacagaggcgcaggatttaaaacgcctgatagtccttcacatccacccgcgtcacgcgtccctcttcgttgaaggtaatcgtttcctcgccctcgcgcaccagcggcttgccggtcttgctgtgggtggcgcgcaccgaccacacggcgcgcccggcaagggggctgacgcgttcgaccagcgtgttgaaagccgtctggtcggggtagtcgtcaaaatacttgcggaacgccgtcatgatctcgtcgcggcccgaaagactgccgacgccgttcgagacataggtcgcatcctcggcgaaatagtcctcgatcatttgataatcgagcctgttgatcgcgtcgtgaaacagggtgatttccttgattggatcgaatgccatggtcagaccctcacgccgcgttccgcgagatcggcgcgcagctgctcggcgccggtgaagagcaccgcgtcccatcccgccttcttggcgccttcgatgttcggcgccgaatcgtcgatgaagatcgtcgccgccggattgaggccgaagctcttggtatgcgcttcgtagatcgcgatgtcgggcttgatcaggccgatgtcgccggaaacggtgacgccgcgcggcgtgttgaggaagggaaagcgcacctgcgcctcgcggaaggtgtcggaggcgaagttcgtcagcatcgtcacgtcgcggccctcggcgatcagcccttccatgatcgcgacgctgtcgtcgtaggaatgcgataccatctcgtgccagtgcttgcggaaggcgcggatattcgcctcgcgatcgggatgcgtttcgatcagaagcgcctcggcatccgcccatgtgcggccgcggtcctgctcgatgttccagtcgtgggtgcagacattgtcgaagaaccatttgcgttctgcggcatccggaatgatccggctgaagggaatatcagggtcgtaatggataagaacttttccgatatcgaaaacgatatgatcaataggcatttatccgtccttggactgttgaaacgcgcgtggaatagccgctgtgatcgcttttttcatgacggtgggcaatgcctgcgcgtcaagatttgtaaccggctcccaccatccgtcatccccgtcgatcctgccggggatcgccacgcgccagatcgacagcctgagctcgaaatgggtgaagacatgggtgacggtgcccgatggctgccagtcggccgaaaacggggcggcgtccgccgaggtctcgccgtcgatgcgcgccgtccagcccgtcgtcggcacctcggtcatgccgccaagcaaaccgctctcgatcctgcgccgcaacagcacttcgccatcatcagtcaccgccacgaaggcggcgccgacgcgaacgggcttcgccttcttggcggccttgaccgggaaatgctctggatcgtgcagcgctaaggcctcgcacgatccgttgaagggacagagcgcgcaggcgggccgcttcggcgtacagatcgtggcgccgagatccatcatcgcctgggcgaaatcgcccggccggtcggatggcgtcagcagcgccaccttctgcttcatcaacggcttggctgcgggcagcggcgtcgaaatcgcataaagccgcgagatcacccgctcgatattgccgtccatgacggcagcctgccggttgaacgcgatcgcggccacggcagccgccgtataatcgccgatcccgggtagtgccctcagcccgtcctcggtatcgggaaacacgcctgaatgatcgttcgccacggcctccgcgcatttcttcaggttgcgggcacgggcgtaatagccgagccccgcccaggcggccatcacctcctcgctaggtgctgcggcaagatcgccaaccgttggccagcgcgaaaggaatttcaggaaataggctttgacggcaggcaccgtcgtctgctgcagcatcacttccgacagccacacatgatacggatcggccttgatcccgcgctttgccatcggcggcgaaacacgccagggcaggtcgcggtgatggcgatcgtaccagtcgagcaggggctttgcggagggggccgaaatggccgatgatgtgcgtgcgttcattccgtccgaagatagggaatgaaacaggcggcgcaactgtctggccgcttgaagctggggattgccgaaactcttttacaaggcggagcagcaacatgaacttgaccgagcttttccaactttcgccggcttttgcctcggccgccgcgtcagtcgtatgtatctacgtcatcctgcattctctcgatagcataggcaggctgctttctcccgagaagggcagtctgccagcaatggttagcgcggtcctgcgatggctcgagaaagagttgaggcctgtcggacagccctcgagaaggtcgcggctcgtctttatgttcacaagcgcggtgatgttctacgtcttgtcggtgattgtctttatcagcggcaatgctgtgttgttgaccgcctatctgcattcccgcgacgagggcgttttccccctgcagatgctctgcgtggccttttttgctttctgcattgtcgtagcacgcctgctgctggtaaatggcggacacgactggcgggcgtttcgtgatctcttgaggggcaggggcgttcgctgaaggcgaaatggagcaatggtggctaacgggcaggcgcctcgttcacgaggtgaaaaacagatctccgaactggccaacggcctgatcgatcccgtgctcgccaagcgcgccggcatcaacacggcgctgctcggctcctgggacgagatcgccggcgaggatttcgccgattgcacccgcccggaaaagatcgcctgggcgaggggcggcgatgacggcagcttccgccccggcgtcttgaccatcgcctgcgagggcgcccgcgccctgtttctgacgcatgcgcagggcgaactcatccagcgcatcaacagcttcttcggcttctccgccgtccaccagatccgcatcgtccagaagccggtctcccaagctttcaagcgctcccgcacgccgccgccattgaaaggcgaggccgcccgccggctggagggaatgatggagggcatcgacaacgagaagctgcgcgatgcggtgaagcggctgggcacggcggtgttggggaagaaggggcgttagcatgccgttggccatggcttcgcaatgtgctatacatgtatagcaaggagaacgacgatgcttgccatacgattgccggctgaaatcgaagagcgtcttgatgaacttgccaagcgcacgggccgcagcaagagcttctacgcacgcgaagccatcctggaacaccttgatgatctggaagactactatctggccgagaagcgtcttgaagactttcggcaaggcaatgcccgcacggtgtcattggctgagttgatggaacgctatggcgtggaggattgatttcgacgaacgcgctgagcgcgaactcgacaagatcggccatgttgcagcccagcgaattatacgtttcctcaatcagcgcgttgcaaagctggacgacccgcggtcgatcggcgaagccctcaaaggaccggagcttggcgcgttctggaaatatcgcgtgggagattaccggattatcgccagtatagaggacaacgtgcttcgaattttagttgttcgtgtgggcaaccggcgtgacgtctatcggtgattacgacgttgcaacccgcaataacgccccttggtcccaccaaggtcacaattgtttgaagaaactcccccatgcgtgccttgtttgcggccgcgcgccgttatatcgcactcacagccgctactctcatttatgaggaaattatgcagatgtccgaaatgcaactgaccaagcgccagcttctgggcggcgtcgctgtcgcgaccgccagcctggcggtcttcagcagcgccaatgcggctgtggaaattccgaagccggacggcgatgtcgacatggccgccgtgctgaagccgggctcgctgccggaaatggtgatcggcaaggatgatgccaaggtcaccatcgtcgaatacatgtcgatgacctgcccgcactgcgccaacttccacaacaagaccttcgacgagatcaagaagaagtacgtggacaccggcaaggctcgcttcatcatccgcgagttccccttcgatccgcgttccgcggccgcgttcatgctggcccgctgcaatccgtccaagccggaagacatgagcacggccgaccagtatttcccgatggtctcgatgctcttcaagcagcagcagacctgggtcgctgccgaagatggtcgcgccgctctgctccagatgtcgaaactggctggatttagtgaggatagcttcacgaagtgcttgacgaaccagaagctgctggatgaagtgaacgcgacgcgggaacggggttccaaggaattcggcgtcaacgccacgccgactttcctcatcaacgggaagcgctactctggagacatgtcggttgacatcatgtcggcccttatcgacagcctgctttaagctgagccgttcctataagacgggcgacggcggaagccgtgcgcccgttttttcgttgcttttcccttctcccccacggggagaaggtggcccgaagggtcggatgagggggcccttcgctccgaggtccaccgcatgaaattcaacaaacttcgcctcgtcggcttcaaatccttcgtcgagcccgctgaattcgtcatcgagcgcggcctgaccggtgtcgtcgggccgaatggctgcggcaagtccaatcttgtcgaggcgctgcgctgggtgatgggcgagaactcgtacaagaacatgcgcgcctcgggcatggacgacgtgatcttttccgggtccggcaatcgtcccgcccgcaacaccgccgaggtggcgctttatctcgacaatgccgaccgcacggcaccagccggcttcaacgatagcgacgagatccaggtcacgcgccgcatcgagcgcgagcagggctcggtctaccgcatcaacggcaaggaaagccgcgccaaggacgtgcagctgctcttcgccgacgcatccaccggcgcccgctcgccgtcgatggtcgggcaggggcgtatcggcgagttgatctcggccaagccgcaggcccgccgccagttgctggaagaggccgccggcatttccggcctgcattctcgccgtcatgaggcggaactgcgcctgcgcgccgccgaaagcaatctcgagcgtctcgacgacgtgacgtcgcagctcgaaagccagatcgagagcctgaagcgccaggcccgtcaggccaatcgcttcaagtcgctctccgccgatatccgcgcacgcgaggcgatgctcctgcatatccgctgggtgcaggccaaggaggcggaggccgaggcggacagcgcgctcaaccaggccacctccatcgtcgccgaaaaggcgcagatgcagatggaagcggcgaagtcgcaaggcatatcgagcctcaagctgccggaactgcgcgagggcgaggcccgcgcggctgccgccctgcagcgcctgcagatcgccaagacccagctggaagaagacgccaaccgcatcctgcgccgccgcgatgaactcacccgccgcctggcgcagctctcggaagacatccggcgcgaggaacggctggtcgccgacaatgccgagattctccagcgtctcgacgccgaggaagccgagatcagcgagatcctcgccgattccggccgttacgcggaagagacccgcgaggccttcgaggaagccgccgccaggcttgccgacagcgagcgcatcttcgccggcctgacgtcggaacgcgccgaggccgccgccggtcgcaaccagctcgaacgcgccatccgcgatctcgccgaccgcaagatgcgcctcgagcgccagatggacgaggccaatcgcgagctgtcaggtatcggcgagcgtatcgcgacgctgcccgatcccgatgaaaagcgcatggtcgtcgaagccggcgaaagcgccgtcgccgaggccgaggccgccatccaggcggtcgagcaggcgcttgccgctgcccgtcagacggaagcgatgtcgcgtgcgccggtcgatcaggcccgcgcccagctgaatgccatcgagaccgaagcgcgcaccatctcccgcatgctggcatccggcgccagcgccggcgaattcacgcctgtcgccgatgatctcaaggtcgatcgcggtttcgagaccgccgtgggcgctgcccttggcgacgatctcgaatccccgctcgacccgaaggcgcccgcccactggtcggaaaacggcgatggcgcggccgatccggcgctgccaccgggcgtcacgccgctgatcacgcatgtccgcgcgcccgcggcacttgcccgccgcctcaggcagatcggcctcgtctccgacgcggatgccgaaggcctgatggcgagcctcaagcccggccagcgcctcgtcacccgcgatggcgccgtctaccgctgggatggccatgtcaccggtgccgacgccccgagtgccgcggcactccgtctcgcccagaagaaccgtctctccgagctcgaaggcgaagcatccatcgcccgcgacgtgctcactgaggctgaagagcagctggcgatcgcggccgaagccatctcgggcgaggagcatcgcctggccgaggcccgcgataccgcgcgcatgtcggcacgccagctggcggaagcccgtgaggcgctggctgctgccgagcgcgcctcgggtgatctcatccgtcgccgcgatgtcatcgccgaggccgtcagccagctgcagagccagctcgaagacatcgccatccaggaagaaaacgcccgcatcgagctcgacgacgcgccggatctctccgcgctcgacgaacgcctgcggctgcagcaggccgatgtggcgaccgatcgcggcgcccttgccgaggcgcgcgcccgccacgagagcctgaaccgcgaaaacgacgcccgccagcgccgcatcgtcgccatcggccaggagcgcgaaacgtggcgccagcgcgcggcgagcgcgcaggaccatatcgcgacgctgcgcgaccgcgaggaggaagcgcgcgaggaagcggccgatctcgaaatggcgcccgacgaattcgacgacaagcgccgtgggctgttgaacgaactgcagaaggccgacgacgcacgccgcgctgccgccgatctgttggctgaggccgagctggcgcagcgcgatgtcgatcacaaggcggcgattgcgctgtcggaactcgccgaaagccgcgagcgtcgcggccgcgccgaggagcgcctggtctcggcccgcgaaaaacgcgtggagacagaggcgcgcatccgcgaggcgctgaacgtcgcgccgcacgaagccttcaggctggccggtctcgatgccatgcaggcgatgcccgatttgcgcgaggtcgagcgcgaactggagcggctgaagatggaacgcgaacggctcggcgccgtcaacctgcgcgccgaggaagagcagaaggaactgagtgaccggctggcggcgctgatcaaggagcgcgacgacgtcatcgacgcgatccgcaagctgcgcggcgccatccagagcctgaaccgcgaaggccgtgaacgcctgatcgccgccttcgatgtggtcaacacccagttccagcgcctctttacccacctgttcggcggcggcacggccgagttgcagctgatcgaatccgacgatcctttggaagcaggcctggaaatcctcgcccgcccgccgggcaagaagccgcagaccatgacgctgctgtcgggcggcgagcaggcgctgacggcgatggcgctgatcttcgcggtgtttctcaccaacccggcgccgatctgcgtgctcgacgaagtggacgcgccgctcgacgatcataacgtcgagcgctactgcaacctgatggacgagatggcggcttcgacggagacgcgcttcgtcattatcacccacaatccgatcaccatggcccgcatgaaccgccttttcggcgtgacgatggcggagcagggcgtgtcgcagctggtttcggtcgacctgcaaaccgctgaacaattgcgcgagatcgcctgaggtcaaggcgaaacacccaaaaaaagtcgcctctgagtaggcttctcacccaataaggtgatgcgtttttactcatactgcattagaagaaactgtacgtgcggtccgagaggatcgcgccaccggttttgcgtacagattgccgtgcgcatgtggtgaggcttcctcctcgtcgtgtcggcatgctgaaccccccgtccggttttcctggccggacggaaataaggctttgcgggactttgttgcagtcccgcaaagctttattactcttccctagagttcaaacggttagaatgcgcggatgttgtgcgctgcaacattttggccgcatttgtccgattttcattttaacaccaagggattaagctgatcccgattttggtgttggggagagcatgaccaagtgggtctacacattcggtaacggcgctgcggaggggcgggcgctcgaacatgagatgctgggcggcaagggggccaatctcgccgagatgtgcagcctcggcctgcccgttccccccggcctgaccatcaccgccgacgcctgttccgcctattatcgcgatggccgtcgcatagcggatgaggtgcgcgcgcaggtgctgtcaggcatcgcaagcatcgaggccgtcaccggccggcgcttcggcgcgggcaacagcccgctgctcctgtcggttcgctccggcgcccgcgtatcgatgccgggcatgatggatacggtgctgaacctcggtctcaacgacgaaaccgttcaggcgctcggccacgatgccggcgacgcgcgcttcgcctgggatagctaccgccgcttcatccagatgtatgccgatgtcgtcatgggtctcgacaacgaggtcttcgaggaaatcctggaggacgaaaaggcgcgccacggctacgaatacgacaccgagatgaccgcgagcgaatggcagcacgtcgtccatctctacaaggcggtgctggaggaggagctcggcgaggagttcccgcaggacccgcaggtgcagctctggggcgctgtcggcgctgtgttttcgagctggatgagcgcccgcgccgtcacctatcgccatctccacaatatccccgaaagctggggcaccgccatcaatatccaggccatggtcttcggcaacctcggcaattcgtctgccaccggcgtcgccttcacccgcaacccgtcgaccggcgaaaaggcgctctacggcgagtttctggtcaatgcacagggcgaggatgtcgtcgccggcatccgcacgccgcagagcatcaccgaggaggcgcgtatctcctccggctccgaccggccgtcgatggaaaagctgatgcccgaggccttcaaggaattcgtggcgatctgcgaccggctcgaggcccactatctcgacatgcaggatatcgagttcaccatcgagcgcggcacgctgtggatgctgcagacgcggtcaggcaagcgctcgacccgcgcggcgatgaagatcgccgtcgatatggtggacgagaagatgatcaccgaggaacaggcggtgctgcgcatcgagccgtcctcgctcgatcagctgctgcacccgacaatcgacccgcgcgtcgcgcgcgaggtgatcggcaccggccttccggcgtcgcccggtgctgcatccggcgagatcgtctttaccgccgaagaggcggtcatggcggaagaggaggggcgcaaggtcatcctgctgcgcgtcgagaccagccccgaggatatccacggcatgcatgccgccgaaggcatcctgacgacgcgcggcggcatgaccagccacgcggccgtcgttgcccgcggcatgggcatcccctgcgtcgtcggcgccggcaccatgcgcatcgatctgcgcaacgagcggctgatcggcatgggcgtgacgctgaagaagggcgacatcatcaccatcgacggatcggcggggcaggtgctgaagggcgaggtgccgatggtgcagccggcgctctccggtgatttcggccgtatcatggaatgggccgatcgcgtccgccgcatgacggtgcgcaccaatgccgacacgccggccgacgcgcgcgctgcgcgctccttcggcgccgagggcatcggtctttgccgcaccgagcacatgttcttcgagggcgagcgcatccatgtgatgcgcgagatgatcctggccgaggacgaggcgggccggcgcaccgcgctcgacaggttgctgccgatgcagcgggaggacttcgagagcctgttcaacgtcatgcacggcctgccggtgacgatccgcctgctcgatccgccattgcacgaattcctgccgaagacggacgaggaaatcgccgacgtcgcggccgccatgaacatggacgcgaccgcgttgcgccagcgcgtcgatgcgctgcacgagttcaatcccatgctcggccatcgcggctgccgtctggcgatctcctatcccgagatcgtagagatgcaggcgcgtgccatcttcgaggcagccgtccaagcggcgcgcgagacgggtgctgctgtcgtccccgagatcatggtgccgctcgtcggcctgcgctccgagctcgattacgtcaaggagcgcatcgacgccatcgcccgcgacgtgatgacggaagccgacatgcggatcgactatctcgtcggcacgatgatcgagctgccgcgcgcggcactgcgcgcccacatcatcgcggaagccgccgaattcttctccttcggcaccaacgacctgacgcagaccaccttcggtatctcgcgcgacgacgcctcggccttcattccgacataccagcgcaagggcatcatcgagcatgatcccttcatctcgctggatttcgatggggtgggcgagctgatccgcatcgccaccgagcgcggcaggcgcacccgcgccgacatgaagctcggcatctgcggcgaacatggcggcgatccggcctcgattcatttctgcgagggcatcggtctcgactacgtctcctgctcgcccttccgcgtgccgatcgcaagattggcggcggcgcaggcggcgatcaaggcaagataggggttatcagggacagctaccgatgccggtagtaggggccgccgtaatacgggccacccatgcgccacgccatgtccgccatcgcgtaatcgctgtcggcccgcgcttgcgcctggcggttgaggtcgatgcgttgcaggcaggtggcgaatccttcggtcccgcgcttgaagccatagctcaggcactgccggtcgtccgccgcccgccgctcttccggcgtcatggtctggcaggccgaaaggccgatcgcaatggcggccatggtgagcgtcagcgggagaatgcgcatcgttctgtcttcaacggattgatcttgctgatgtagcagacgccaacgccgcgcacccgtcaacaaaaaactccgtccgccgaaaaacttgtcaggcggcgccggccggatcgccgatcggcagaagcgccggatcgagcgtcgggtcgttcgggttcttgctgtcgccgggatcctgggcgggtgtccgcggcggcttttcctgcacgcggtcgggaataccgggtgtcggcgtcgggccgcggggcgtctcgggcgtcggtacggggatcggatcgcgattgggcatgattgtctccttctggtccaaggaaaacgatgccccttcgctttggttcccgctttcgcccggccgagaaccgctatatgaagacgcctcacggaaatggaagcgactgatggcactgcgtgatcgattctcgaaaaagctgacctgcccgcaatgcggcaatagcggctttgccgaagcctccgagacggacgatccgaagcgcaagcatccgggcttcaacatcgaccagttgccgcgcgggcttttcgtccagcgccagaccaattttcaggaaaccagcgtgatcaagtgcgaatgcggccgcaagttcgcgttccgcacgctggccgaagccgcatccggccgcgattgaactagactagattagaaccgctccagcacctcgatgaaggcatcggcgaactgcgcgatatgggcggtctcgggcgccgggctttccatgcggatatcggtgccgttctggtcgagcaccgcgagcacgatccgcatgtcggtggaggcggaagggatgcgcagcaccgcgatccgcttgcaatcgtccatcagtccttcggccggcaggtcgaacaggaattcgccgccgctctttcccgccgccgtgcgaaccgcatcgcaaaagtcggtgtcgccgtcatagccttcgagcgaaagctcgagctcgagaagctccatcggcagaagcggatcgctcgcatcggccccggcaagcgtcggcatggggctttccattgcaagctcggatgcgatcattgctcttctcctgttcgtccgcgaccgatgaggatgctgcaattgcgggaaatcaactcaatatcagaaaatgctcacgtaagccatgcccgtattggccgcggaaattggtcttcatcgtggattggacacgctcgcgtaagacaacagtttcaatttaggcgaatcttgcactaaacaagtgcttgggcgatttgcgcgttcatgcgggacgcgccgcttgcgactaaccggtaagtttgatggcaatccgtttcgaccgccccgtttccaatgccgcccgcttctccaggcggttcgcggcctttgcgctggtcttgtgcctggcggcgctgatcggtcaccgcttcgccggcctcgccacgccctatctcgtgctcgtcctgatcgtctccaccgggttcggcatcctggccgccgttctggccgcggccggcctgcgcagcctgtggctgatggggtccgagggcgggcatgacgcgctgaaggcgctgatcttcgccgccttgccgctcgtcatcggtggactggcggttgaacgctatctcagcatgcccgtcatctatgacgtctccaccgatcccgtctccgcgccggactggctgaagacgcccagcgccgaccagatctggctgaagcgagtgccggtgacgcctggtgatcgcgaaaagcagctggaagcctatcccgaactgacaggccgccgttacgacggcgccatcgaccgcgtactggaggccgtcaagaaggtcgccaggatgaacggcatccgcatcacgagggccgagggcgacagcatgccgacgcgcgatccggaggacaagccggcgggcaagtcgcaggcggacaatggcgccatccccgacgcggcccccgatatcgttcccgttccgacgccgcgcccctatgacgacgacgtcgcccagctgatccgccgcgccaatggcgtgacgctgcagggcgaaaagcgcacgctggttctcggcctgcgcttcgacgtcatcatccgcctgcgcgaggaggcggagaccacgttcgtcgacgtccgcgtcgcctcgcgctacggcccctccgacctcggcttcagcgccgatatcgcggatgattacctgaaggcgctggacgcggagctgctcggcatcgccgccggcagctgacgcactggccagcccgtgtggttggcgcgcgtggctggcccctgcgggttgtcgatcatccgagaaaacgatcgcgttgcgccggcgtcggcacgaagcagcttgcccgccgccctgagatccgcagccggttgcgcgccacgaatgcgtagagccgatcggcgatcgcgcgcggcaaaagccgcgatatcgtcaccgccgaccagggggcgcccagccccgccaccatgtggatcgtcccatccgacttgaaatacgcgcggccgccttcgatcaggatgttggtctcgtagtcgcgctcgttgagcccgtagtggcggtagagcgccgcgccaagcggcgtctgcgcggcgacaaaacggtagcgctcgcgcctgtcgtgtttcagcacgaaccgcacccaggccgagcagaacacgcactcgccgtcgaacacgatcagcggcttgtcgtcggggaaatcgggaacggccgcatcctggcgatagctgtaatccggccgcatcgtctcatcctctcccggccatccggtacgaccccagaagcgccggcgggccatcggtctcgatctcgccgcgctcgatcaggtcctcgatatgcgcgagcacggaaagagcggcggcgccgtgcaggcgcggatcggtgtcgcggtagatgactttgaccatgtcggggatattggtgtcgccggccctgatccgccccagcaccgcgcgctcgcgcatccgcctgtgcgtcttcaaagcccgcatgaaggagatcggcttgcgcaccgggccgccatggccgggcaggagcagccggtcgcgccttgcgatcagcttgtcgagcgaggccatgtaatcggccatcgatccatccggcggcgcgacgacagacgttgcccaggccatgacgtgatcggccgaaaacaggatgccggtgtcctcgagcgcgaaggccatgtgattggcggcgtgtccgggcgtgtggatacccgtcagccgccagccgtcgccctcgatcgcctgcccatccgcaagcgcgatatcggggcggaacgccatgtcggagctttcggtaaagggattggtctcccccgcatgcagcggccgcgccgcccggtgcggcccctcggcgacgacgatcgcccccgtcgcctccttgagccggcgcgagagcggcgagtggtcgcgatgcgtgtgggaaacgagaatatgcgtgacctcgcgacccttgagcgccgccatcagggccgcgagatgcgcgtcgtcatcggggccgggatcgatcaccgcgacggagcggtcgccgacgatatagctgttggtgccgtgaaaggtgaaagcgctcggattgttgaccgtaagccgctgcacgcctggtgccaccggcacggcttggccataagaaggctcgaaggcgagattgaagtctggattggccatgtcgttcctgcggtcgtgcgccccggcaaggggccgaccaattacttgtactcgatctcgatgaaggacatcggcttgtcgccggcattgacgacattgtgctcgatgcccgcatcgcgccggtaggcggcgcccgccgcgatatccacccgccggctgccgtccttctcctccagcaggaaccggcagtccgtcatcggcacgacgacatagcccatgccatgcgtatgcacgccggtatcggcgccgggctcgaagtcccagcgcgtgatccggaccacggcgtcgtcgacgagaagcgtggcaagggcaggcggacgggcgcgatactggctcattgtcactccgaggcggtattgtctcgcaacagacctagcatgccgcccgtagcagcgcacaaaaaaggcgcacagaaatatgctcgccccgaaacttaatgattgtgacgtcaacggacctttgctaatcaggcgacgcaattggcaagcgtttctcgctgccagtctctggtggggcgtcgccaagcggtaaggcaccggtttttggtaccggcattcccaggttcgaatcctggcgccccagccaccgcggtaattctcggccagcaatatcccaagacatcatcacgccgatcagcacgtatcgttgctgagcctccagctctgttgtcgcaacacagcccaaaaaccaaaaaaggcggaacccgtgtcccgcctctcatgtctctcgcctcgctgcgccttactgcgcggccggctgggcaggcgccaggaattcggcgcagtaggaggggccgttcacgccggggatgtcgccggaaacgcggatggtgcggatcgtgtagtcggcgtttgtggtgatctcgacctggcagcgcaggtactgcttgcgggcgggcgcgatctgcttgccgcgcttgccctcagtgccatcggcatacttcgccggaacgttgacggtcttgtagccgcccttccaggtgtagacgttgccgctgcccgtgtcggcatcggtgagcggcgggccgtaggcggcgaagaacttgccggcggactggccgacccagcggctggagatcggatcggcggccgtcgggatggtcgtgcagccggccagggcaatggccagccctgcggctgcgaaagtgcggagtttcatgatgtcgtccctgaatttgtcgcgcattcggcggcgggaatcactgcccctgcagcgtttcagcctgtcctgacgagcgctttagcgcggaacccggaaaaagaaaatcggctctttccagcgatcgcgaaatttgcggcgggtgtggctttttgctcgcgcgcaggcccggccgcgcttctcgcagccgccgtcataaaaatgcaacccgctttggattttggtgcttgcgcaagccgttgggccggtctatagaggcgccgctggtcacggagtgtagcgcagtctggtagcgcaccacgttcgggacgtgggggtcggaggttcgaatcctctcactccgaccagctgaaaatcccggcagcacaggattttccgcccgatcccgaatttttccgaatacgtcgccttgtcgcagcggaccgattgcggaccgtttggtatcgccgcacgatctcccaaacaccccacctaagcacgacacttccgccaatccgcgtattgcctcgccctgaccgcgcgcttaaaccttgctgtcacctgatgtcatgagaagcggatcgatgagcagagattactattccagcatgggcggcctgccgccgcagaccgagcttttgtcgagcaaggcggtgttcacgaccgcctatgccgtcatcccgcgcacggtgatgaccgatattgtcaccagctatctccctcattggcagggcacgcgcgcctgggtcatctcgcgcccgatgaccggcttctccgagaccttctcgcaatacatcatggaagtgcagccgggtggcggcagtgacaggccggagccggaaaagcgcgccgaaggcgtgctcttcgtcgtcgatggcgaggtcacggtcgatcacgagggcgccacgcatgtgctgcgccccggcgccttcgccttcctgccggccggctcgaaatggacgctgtggaacaagggcgcggttacagccaagttccactggatccgcaaggccttccagccggtcgaaggcctcgagccgccgccggcgctcttcactcatgaagaccagaacccgccgcaggccatgcccgataccggcggcgtctgggcgaccacccgcttcatcgacccggccgacctgcgctacgacatgcacgtgacgatcgtcacgctcgagcccggcggcgtcattcccttcatggaaacccatgtcatggagcacggcctctacgtgctcgagggcagggcggtctatcgtctcaacaaggattgggtcgaggtcgaggccggcgactacatgtggctgcgcgccttctgcccgcaggcctgctacgccggcggtcccggccgcttccgctacctgctctacaaggacgtcaaccggcacatgccgttgttctaagcggttcgcgaccgcctccgcaaaggaaaacggggccgatcggccccgtctcaagtcgcatgtcagatatcgccgccggcgttggaccagaggttggcggcctccgccgccgtcatccggcgcacctccgcctcgtcgcggcggctggaaaacagctcgcttgccatgatctggtcggcaagatcggccggcagcgacagcagcacgcggccgtcgccactgcgcaggccgctgagctccgagcgcttgcccgtcaccatgccgccggccaccgtgttgttggtttccggatcgatcaggatgaaggcgcccgacgagcggttcagctcgtatgggtcgaagatcgccgcttcgtcgaaggtcaggtgcaccttgccgatggcgttcatgtagagcgtctcggccgaggtccaggtgccggtcttcagctgcagctgtgccaccggctggacctgaacgcgctggcggcggctgccgctcttcagccagtagcgcttgccggactcgatgccctcgggctgcaaggcgacgatctgcgcgtcgaaggacaggcccacctgcggctggctgtcgatcgagacgatcatgtcgccgcgcgccacgtccacctggcggtcgagcaccagcgtgatcgcgtcgcccgcgaccgcggcattgcgcacgaggtcgaaggtgacgatcttggtgacgttggcgaccatgcccgacggcaggatcatcacgctgtcacccggcttcacggagccgccggcaaccgtgccctgataaccgcgaaaactctcgcccgggcgcgacacgcgctgcacggagaggcggaagccgaccgtctgcgacgagcgcacggtggcgagttccagcgtttcaaccagcgtcgggccggcataccacggcatcgaagcctcgccggaatagacgacgttttcgcccttcagcgccgacatcgggatcgcggtgatctgcttgacgccgagcgacagcgcgaattcgcggaattcgtggacgatcttctcgaagccggcgcggtcgtagttcgtgaggtcgatcttgttgaccgcgagcacgaactgcttgatcccgagcagcgaggcgatcgtcgcgtgacggcgcgtctgctcgagaatgccggcgcgggcgtcgaccaagagaatggcgagatcggccgtggatgcgccggtcgccatgttgcgggtgtactgctcgtggccgggcgtgtcggcaacgatgaacgagcgcttgtcggtcgcgaaatagcgataggcgacgtcgatggtgatgccctgttcgcgctcggcctgcaggccgtccagaagcagcgcgaagtcgggcaggccgagatcgttctgcttgccggtggaatcgcggcgcagcgtcgccgcctggtcttccttgacggccttggtgtcccagagcaggcggccgatcagcgtggactttccgtcatcgacgctgccgcaggtgatgaggcgcaagggtcgcgtgtcgcgcgcggcctgctgaggctcggcgaggggagcggcgatggcgcttgctgttgctgctgcagtcatctcagaaatatccttcacgcttctttttctccatggagccggactggtcgcggtcgatggcgcggccctggcgttcggagacagtggcaatttcaagttcggcgataatgtcgtccatcgtcgtggcggtggacttgatcgcgcccgtcagcgggaagcagccgagcgtgcggaagcggatgaagtcttcctgcttggtctcaccgggcagcaactccaggcgcggatcggtcgcatcgatcatcatgccgtcgcgttcgacgaagggacgcttggcggcgaaatagagcggcacgatcgggatattctcggcctggatgtagcgccagatatcgacctcggtccagttcgacagcgggaaggcgcgcacgctctcgccgctgcggatctggccgttatagatgttccagagctcggggcgctggttgcgcgggtcccagcggtggtcgggcgtacggaaggaatagatgcgctccttggcgcgggatgcttcctcgtcgcgccgcgcgccgccgaaggccgcgtcgaacttgccggcgtcgagcgcattgcgcagcgcttccgtcttcatgatgtcggtgtagcgcgccgagccaaaggtgaacggcgtgatgttttcggcggcaccgcgcggattgatatgctcgatcaggtcgagatcatattccttcacgatcttgtcgcggaaggtgatcatctccgcgaacttccagccggtgttgacgtggagcagcgggaaggggacgcggccgggatagaaggccttgcgcgccagatgcagcagcacggaactgtccttgccgatcgagtagagcatcacgggacgctcgaactcggccgccacttcgcggaagatgtggatggattcgttttcgagcgccttcagatgagggtcgagcggcggcttggtgctctgcggattgctgagttccgtatccggacggctatcgggcatgtcttactccagacttccaattccttggcgggggaggcgggcctcaccctgatttcgttttggtcttcactggccttctaccgtgcggccccctcatcgcctcgctggcgctccggcacttctccccgctggggagaagggacgtgtcgctcgcgttttcgtcccaacaactgtcggagaagggctggggcgctcgccgcttgtctcttctccccaacggggagaaggtgccggcaggcggatgagggggctccgagcacgaagcccaccatcgtcaattctactgcgcgatcgtcaccgccgaagcctcttcagccacgtgcaggccgcattcgcgcgtctggtcctgttcccaccaccagcgcccggcgcgctcgggctcgccgggcttgatggcgcgggtacacggctcgcagccgatcgacgggtagccgcgcgcatgcagcggattgatcggcacgctgttgtcggcgacgtaggccttgatgacgtcgatgtcccaatcggccagcggattgaccttcaggagatggcggtctgcgtcatattcggcgaacggggtctcggagcgattggccgattggccgcggcgcaggccggtgatccagatggttgccccattgagtgcgcgcgcaagcggcttcagcttgcgcacgccacaacaggcatgccgggcttcgacgctctcgtagaagccgttcaggccgtattgcgccgcataggcatcgatatcggcctgctcgggctcgtagcggctgatgtggatgtcgtactgcttttccgtctcgtcgatcaagttcagcgtctcggcaaagaggcggccggtctgcagcgtcacgacgtcgatcggcagtcggtgattgccgatctcggcggtgatgacctggtcttcgataccaagcgacgtcgtgaacacgacccgcccgccaaggccggcgacgaacgacaggcgctccgccagagataggcttgcaagtgtcgcgttcagcgtttccgcttcttcgattgtatgggcaacagtcatggaaatcctgtcctagatgttgactggagtatcgcagcttggcgatggacaggacagaaacaggcgtttcgaaagcgggctggaaaggagcaaatatctctccccggccgctgcaacgcagaaaagccgccgcaccggcatgcgcagccgacgtcgcgctataatctctattaatttagtagagttacacgccgcctgtcaatcggaaatctgatttgatgcctgcggagcggctttttcgggtaaattcgcgattgctgaattgagatggaaaacaaggcggaaaagcctgtatctcaacgctttcgtgcgtttgttcaaactatgttcatccagcgcgtgagatagaaggaagatgaagagtccggccggacgccgtgagtgtccgccgcttgtgtgtcgatggctgaaaatgattacgcagaaggcgaaatacgcgcttagggcgctcaccgttctggccgaggccgatgacggcgaacctgtgatgatctccgatatcgcggcgcagcagaagatcccgaagaagttcctcgagcagatccttctcgacctcaagcaccagggcatcgtcgtcagccggcgtggcaagcagggcggatatctgctcctgaagccggccgacatgatcaccttcggcgaagtgctgcgcatcatcgacggcccgatcgccccgcttccctgcctgtcgatcaccgcctaccgcaaatgcgacgactgtgacggcgagcagaactgccagatccgccacgtcttcgccaaggtcgccgacgccacccgcaaggtgctgttctcgacgacgatcgccgacgcggtcgcgccggcgcgcggcgccgaggtcacgcggatgctggcctaaggcacgccactggtcctaatgggccggctcttcctggtgtgaagccttctccgccgcgcgccgcgcccggatcgccgccgcgatgaacacgcgcgacaggccgtgatagagcggttcgcgcgacaggaaacgtgacgtcacgtagccgatcatcgacaccgccatgatcgggatcatcgcctcatgatcgccggtcatctcgaagatgatcacgaaagccgtcatcggtgcctgtacgacgccggcgaaatagccggtcatgccgaggatggcagaaagcgcgatgctgctgccgatcagcgtgccgatcgtgctgccgaaaccggcgccgacggcaagcgaaggcgcgaagatgccgccaggaatgcccgacatcatcgacaggaagctggcgagcagcttttccgcgaagaagaacagcggcagcgcctgcccctcgacagcacctctcgcctgctcgtagcccgtgccgaaggtgttgccgccagaggcgatgccgatgacggcgatcgccaggccgcagccgcccgcgaggcagagcatgcgcttcaagggctggggctgcgcccagcggcgcacacgctggccgatatggagcgcaaggccactgaagccggcccccagcgccccgccgccgacgccgcagatgagaacgaggctccaatcggccatgttcatgggcgccaccgaggtggagccgaagtagttgtagctgcccgacagccccagcgctgcgagaccggagaggatcaccgccgtcagcaccagcccgttcgaccgcgactcgtaggtgcggctcatctcctcgatcgcaaacacgatgccggcaagcggcgtgttgaaggcggcagcgataccggccgccgagcccgccaggatcagccctcgcgcctgcgccataccgccgaaacgggcgacggccagcatgatcgacgcgcccacctgcaccgtcggcccctcacggccgatcgatgcgccggagaagaggccgagcacggtcagcaggatctttccgccggcgatccggagcgacagcagccgcgtgcgatcggcttcgtcatgcaggtgacgggccgcgatcgcctgcggaatgccgctcccctgcgaattcggaaacagcttcgccgccaggtaggctgacagcacgaaggcggccggcgtgatcactagcggcagcaggaacgaccaccgccccgatgtcgtcaccgccgcgaatgccttctgcgagatgtcggcgagttccgcgaaggcgacgctgatcaacccgatcgccagcgcaccacaccagaagaccagccgcggacgccagagcgagaacgagccccgaaacacgcgcgaacggcggagcagcttggatttgcggtagagtgggggcatgtcggtcacttgcggtggggggcaggatagggggcaccggtcttatctgccccgtggccggcgtttgcaagccccggcgaatatgcgggggagcttgcggatgtcctatttcgtctgacggtcggctgatcgcccgccgagccgcaacttgccacctgtggcccgctgccgtatgatgcatcgcaattgcaacgcgcgaggtccgtcatgaaatccgcaacgcttccgtctctgcgtgtcgatccagagctgcgtgccgccgctgaaagcgtgcttgaggaaggcgagacgctatccgcgttcgtcgagaattcggtgcgagcccaagttcattttcgacggacgcaggacgagttcatcgcgcgtggactggccgcccgcgatgaggctaagagaaccggtgtctactatagcgcggaggaagtgcacgccgagcttcggcagatgttggctgataagaaagccgagcttcgcaagtgagtttcgagctgcgctattcccccgcagcaagattggatatccggcgcctctatagatttctattggatcgcgatccagtcgtggccgaaaaggcaatcaatgtgatcgaaaaggcaatcgggaacctcgcggattttccgttctcgtctcgaaaggcccgagggaacctcccacgaatacgagaacttgtgatccctttcagcaattcaggctacgtcgcgctgtatgaaatcgaagacagcacaaccgtgaccatcctcgccgtccgccaccagcgcgaagacgactaccactaacccctaccgatcactcacttcccagcgcggattgatccacggctcctggttggagcgcggcagcggctgcttgccgaggatgtggtcggcggctttctcgccggtcatgatcgacgggccgttgaggttgccataggtcacatgcgggaagatcgaactgtcggcgacgcgcaggccatccacgccgatcacccgcgtttccggatcgaccaccgccatcggatcgtccttggcgcccatcttgcaggtgccgcaggggtgataggcgctttccaggtgctcgcgcaggaaggcgtcgatctggtcgtccgtctggatgttgtcacctggctggatctcggcgccgcgatactggtcgaaggcctgctggccgaagatctcgcgggttagccgcacgcagtggcggaacttctcccagtcctcgggatggctcatatagttgaagcggatcaaggggtcggccttcgggtcggcggaggcgagcgtcacgttcccgcgcgatttcgacaggttatagccgacatgcacctggaagccgtggctcttggccgccgccttgccgtcgtagctgatcgccaccggcaggaagtgatactggatatccggctgcttgacgccggggcccgagcgcaggaaggcgcaggcctcgaactggttggaggtgcccagccccgatttggtgaacatccactgcgcgccggcaacgccctgccagaaccacggaagccaggaatagagcgacaccggcttggtcgagacctgctggaaatagaactccatatggtcctgcaggttggcgccgacaccgggccggtccgccttcacctcgatccccatctccttcagatgcgccgccgggccgatgcccgagagcatcagcagcttcggcgagttgaaggacgaggccgagacgatcacctcgcgattggccttgacgatttccaccttgccgccgcgctcgatctccacgccaacagcccggccgttctcgatcaccaccttgcgggcaaggccatggacgagatcgacattcgcccgcttcagcgccggcttgagataggccgacgcggccgaccagcgccgcccctgaaagatcgtctgctccatcagcccgaagccttcctgcttcgagccgttatagtcgtccgtcgcctcgaagcccgcctgctttcccgcctcgatgaaggcgtggaacagcgggttgcggaagccgccgcgctgtacatgcagcggcccgtcggttccgcgccagccctcttcgccgccatggctgtgttccatccgcttgaagtaggggagcacgtcggcataggcccagccattggcgccgagcgcctcccagcggttgtaatcctccgcatgcccgcgcacatagaccatgccgttgatcgacgacgacccgccgatcaccttgccgcgcggcgcggtgatgcgccggttgttgaggttcggttctggctcggaaagatagccccaattgtagcgcttcatgctcatcggccaggcaagagccgccggcatctggataaacggcccgaaatccgacccgccggcctcgatgacgataacgctgttcttgccgtcttccgacagacgataggcaagcgccgagcccgccgagccggaaccgatgatgacgaaatctgcctgcatggtcattcccatatctctggaactttgctactagtgggtgtattgcggaatgctatttttatgctggtcgaatttatcgctgagagctatattgcgatgaagcagattgtcatcacccgcgaggcgcaaaagagcctgagcctcatgcaaccgaagcgccgggccgcgatctatgcgaagctcgacgcctatgcccttgggcaaccggtcgacataaagaagttgcagggcagggactactatcgcatccgcgttggtcgggaccgcgtgatcatcgacgatcagggcagggtcgtcatggtcatcgaggcaggcccgcgcggcagtatctacaaggaataggacgcgatgggcgatatccagaagctgacgatcgatgggaagaactacgtccttctgactgaagaagactatgaggacttggtcgatggcttgcaggccgacgccataatggcgcgcgtcgccgccggcgaggaaacttggccctatgagttcgtcaaggaaatcacggaaagcgacagccgcatccgcagctttcgcaactaccgtggcttgacgatttccgagcttgcctccgccgccggcatctcgcagccctacctctccgaaatcgagaccggcaagaagacggggtccgtcgatgtgctgaagcgcatcgcgtcggccctgaatgtcgatctcgacgatctcgttgtcggctgagttcatatcaataaggcgcctgaaccggccccatgccgacataaaccgtcttcagctcggaatagtgctccagtgcggcaatcgagttctcgcggccgaagccggattgcttggagccgccgaaggggatttcgaccgggcagaggttgtaggtgttgatccacaacgtgccggcctccagcagatcgaccacacggtgggcgcggctcatgtcggaggtgaagacgccggccgccaggccgaattccgtggcgttgccgcgcgcgatgacttccgcctcgtcctcgaaatcgagcacgcacatgacgggcccgaagatctcctcgcgggcgatggtcatctcgtcggtcacgtccgaaaacaccgtcggctgcacataatagccttcgcccgacacattgttcggaatgccgccgccgaccacgagcgtcgcgccctcggccttgcccttctcgatgtagtcgagcaccttctcgcgctgcgcccaggagaccatcgggccgatctgcgtcgcctcattcatgggatcgccgatcgccatcgtctcggtgcgcgccttcagccgcttcaggaattcgcttttgatcgccttctgcacgaagacgcgggtgccgttggagcagacctggccggtcgagtagaaattgccgagcatggcgccgcccaccgcgctgtcgatatcggcgtcgtcgaagacgatcagcggcgatttcccgccaagctccatcgtcacatgcttgagattgccggcggcggccgccgccaccctgcggcccgtcggcaccgaacccgtcagcgacaccttggcgacatcgggatggttgacgagcagcgggccggtatcgcggtcaccctggatgacgttgaagagccccttcggaagacccgcctcgatcaggatctcggcgatcttcagtgcgccgagcggcgtgttttcggagggcttgaacaccatggcgttgccggcggcgagcgccggtgccgccttccagcaggcgatctgctgcggatagttccaggcgccgatgccgacgcagacgccgagcggcacgcgcttggtataggcgaaatcgccgccgagcgggatgtaggagccgttgaggccggccgcgatcacgccaccgaagaactcgaagctgtcggcgccagacgtcgggtcggcgacgatcgtctcctggatcggcttgccggtgtcgagtgtttcgagctcggagagttcgcggttgcgctcgcgcatgatgtcggcggcccgcttcaggatgcggccgcgcgccgtcgggctcatcgccgcccattccggctgggcgcgcttggccgccgcgatcgccttttcgacgatggcgggcgtggcggcatggagccgcgcgatgacttcgccggtcgccggataaaggctttcgatcacggtgccggcatcgtcctcgacatactcgccatcgatgaagtgcgatgctgtgggctgggctctcatgggtctatcctcatatgttcgttgcgacggacgagtggcggcaaatgcagcactccctcatccctgtgcttgtcacagggatccagccaccgcgcgtctgcgcggtgaatgaatggcctgcggaaaaatgggtcttccgagcccaaggacttgggctcgctggattcctgtgacaagcacaggaatgagggagattgtgttatacgtcatactcccactctcccgagctgtatcgtcacataatcctccgtcagcgcgatcgaggcttcggcaccaacccgtgtcgagccgagactctggcggatgtagagcccatcgatcatcgcggccacgccttcggcgatgtgttccgcgacatcaacgggacagagcggcttcaggttggcgagaaggttggaacgcaggcgccttgcgtagatcacgaggaagcgacgcgtctcttccgagcgctgcgcctcggcatagaaggcgagccaggcggcgatcgtctgcggcgcgaactggtcggcatggaagctgacgctgatcaccgccgaaagccgcgcgcgcggcgtgggtgccgccttcagggccgtcaccgcgtcgtcgcgcaattgctttagaagcgagcggatcgtctcgatcagcagctgttccttgctgccgaaataatggtgcgccagagcggaagaaacccccgccttcctggcgatttcggacatggtgacgctgagcgagccgtgatccccgatcacgcgcagcgctgcatcgacgagcgccttgcggcgcatcggttccattccgactttcggcacggtctttctcctgcaatagggccagcataattttgattgactgatcaatcaataaaaatccgatcgtcttttccgcaagatgtctcttttcatccgccgtttctgcgccatactcaatgaacaaccgggaggtgcatgatgacagacatgtccgatgaaatgccttcgtcttcctcgctacggtcgaaatgggtctggttcgtcgtcctcggtgcgctgctgatcgtcttcggcgccatcgccgccgccaacgtcgtcctcgccaccgtcgtgtccgtctattacgtcggcctgctcatgctggtcggcggcatcgtctatctcgcccatgcctttcaggtgcgcgagtgggagcacttgttgttctgggcgctgagcggcgtgctttacgtgctggccggcgtcttcgccttcatgaatcccattctggcatcggcggcgctgacgctgtttctggccatggcattgctggtggcgggcatcttccgcgtcttcgtcggctggcgcatgcgcccgtcgaaaggctggggctgggtgcttgcaagcggcctgatcacggcgctcgcgggcttcgtcatcgtgctcggctggccggtcaacagcctgtggatcctcggcttgttcctggcctgcgacctgctgctccagggctggtcgatgctggccttcggcctcgcgatccgtcgctgattgtgcccgctattcacagcccgttcatcacgcactgtttcttttttgacaagaatgtgagcggagactaaaattcacatcgtggtggacgtcgcaaacatgcgaaagcgacgctggccacggccccgacacccgcgatcggaagggcggccgaaagcgagtgcgtatccgtccgccggtcgggcaagcatccgtccggcgtggcgacgggaggcctataaggcaatgggaggcccacgaggcaatgggagaaatgtcatgccgatggtaaccgtttccatctctccgctgcaggcggccgatatccgcgcggcgatcgacgatggcacgtatgtgtccagcagcgaggtggtgcgcgaggcgctccggctgtgggatgccgcccgcaaggttgatggtctgccgggccagcgcgattgcgcgcccgccgatgccaaatgcgtcgccgacatgttcgccgaccacgagcatcgccgctccgcctgaaggcgggcgtatatggccgccgtctggcgcggcggttgtgacatgggctggcgataaaacgccaagtttcacaaaagcttcacattggcgaaagtgttcgttgacgcttcggcactagtctccgcgcgaaaaaacgacaaaacaatgccgcacagtggagaatggcatgtctttggctgccaccttggaacccgcccttattcgtcgctataccagcgatcagatcatcaccctcgcaaaactcgtcatcgaaaacgccttccagccgatcgtcgaagccagcaccggcgttgccttcggctatgaatcgctgatgcgaggccaggaacgcctgggcttcaattccccggtggaaattctggacgaggcccatcgcggcgaccagctgctgcagctggagcagatggtggcgagccgggcgctcgcgaaattcgcgtcgctgccgaatttctccaccgcgacgcttttcctcaatctcgacgttcgcctgataccgcatggcgagcggctggtggaaaacctgctgcagcatctcaagctcgccaacatccccccgtcctcgatctgcttcgaattctccgagcgcttcgacaacacctcggttcccgaattcgcctcgctggtgtcgctgctgcgcaagcgtggcttcaagctggcgatcgacgacttcggcgtcggccatggcgagatgaaactgctctgcgatcatccggtggattacctgaagatcgatcgctacttcgtcgccgatatcgaccggcatccgcgcaagcgtcacctgttgaagaacatcgtccacatcgcccatgtgctcggcacccgcgtcatcgccgagggcatcgagaccgaggccgagttcatcacctgccgcgagtacggcgtcgatctcgtgcagggctggttcatctctcgcccgaccacgcatgtctccgaactggtgcagtcattcccgcatctgcaggaacttggcaaaagcaagcgcaacaaccagtctctcgacgagatcctcatccgcaagcagatcgaagtcctgccgacggtctatgaaaacgatacgatcgacagtgtcttcgaggtcttccgccgccatccccacaacgccttcttcccggtcttgaacgccaatggcgagccgcgcggcatcctgcacgagcgccatctcaaggaatacatctaccaccccttcggccgcgatctcctgaagaacaaggtctatgagcgcaccatctcgcacttcgtcgagatggccccgatcgtcggcctcgataccgatgccgagcagctgatgacgatcttcgccaacatggaaggcgcaaactgcctgctgctgaccgagaacatgcgctatgccggcgtcgtctccgccgccgcgctgatcaaggtgatgaacgagaagaagctgaagaccgcgcaggaccagaacccgctgaccggcattcccggcaaccacgccattcgcgatttcatgcgcgaggcgagccgcgacagcgacgagacgcgccatttctgctattgcgatttcgacaacttcaagcccttcaacgatgcctatggcttccacctcggcgaccacgcgatctcgctcttcgccgccctgatgcgccgctacttcttcgccgagcgccattttctcggccatgtcggcggcgacgatttcttcatcggcgtgcagggctggaccaaggacgagctggcggaaattctcgatcggctgatcggcgattttcacgacgatgcccaggatctctattcggagatcgaccgtgccgccggccgcattcgcggccacgaccgcgccggcgtcgaagccttcttcccgctgatgcgctgctcgatcggcgttctggagctccccaagggtctcgtcattgacgatatcaaccgtgtctccgccgccatcgcccatatcaaggccatggcgaaggagagcgaggaaggtctggtcttccatcggttgggcgaggcgaattgacgctctggcgtttcggctcttctcaatcaggaatggctggactatctcactgctaaccgaatgaggagagcggtaatgtccctgcctgcgctgatgcgttttgtcgatatgcagcacttcggtgcgcctgacgtgatgaccatatcgagcgggccgctgcccgtgacgggcgaggggcagatcctcgtgcgcacgcaggcgatcggcgtcaaccgcccggatgtcgcgcagcgccagggcacctatccgccaccgaaggacgcaagcccggttctcggcctcgagatatcgggcgaagtggtcgcgatcggccccggcgtcagcggttacgcggtgggtgacaaggtctgcggcctgaccaatggcggcgcttatgccgaatattgcgtgatcccctcaggccaggccttgccgttcccgaaaggctacgacgccatcaaggcggccgcccttccggaaaactacttcaccgtctgggccaacatgttccagatggcgggcctcaccgagggtgaaaaggtgctcgtccatggcggcacgagcggcatcggcaccacggcgatccagcttgcccgcgtcttcggcgccgaggtctacgccacggcgggctcgcaggagaaatgcgatgcctgcgtcaggctcggcgcgaagcgcgcgatcaactacaagaccgaggatttcgccgaggtgatcaaggccgagaccggccagggcgtcgacatgatcctcgatatgatcggcgccgcctacttcgagaagaaccttgcctcgctggcgaaggacggatgcctcgcgatcatcgccttcctcggcggcgcggtcgccgaaaaggtcaacctctcgccgatcatggtcaagcggctgacggtgactggctccacgctgcgcccgcgcacgccggaggaaaagcgcgccatccgcgatgatctcctgtcgcaggtctggccgctgctcgacgagggcaagcttgcccccgtgatccacaagaccttcgccttcgaggacgtgatcgaagcccacaggctgatggaaaccagcagccatatcggcaagatcatgctgcgcctctgaggcttggccctgtgttttaggcggccgcctgccgcgcctcggcctggtcgccggacgcccggatcgacagcgacacgacgaccgtcaggatacccggcagcgccatcagcgcgaacagccagtgggcggccgaaacgccgccctcgatcccgcccggcgtgacgagacccgtgctgttgacgatcactccggcaagcgctgctccgaatgcgctgccgagcgattgcaccgtggtgatcgccgccgacgccttgtcctgctccgccttctcgacgatgcgcaggatcctggtgatcagatgcgcccaggccatgccgacgccgaagcccatcaggaacatgccggcgacggccggcgagagaatggcaaggctgccgccctgattgtcccgcgccagaaacaccgccagcgatgccgccgctatggtttccagcacgcagccggcgacgatcgcccggcttgcccgccgcccggaaaacgttccgctcaggaatgccgcgagcgtccatccgagcgcgaccagcgccgtcagatatcctgattccagcggcgtgatgcggtgcagcgtctgcaggaaatagggaatgtagatgtcgctggtcagcaccagcatcagcgtgaagatgatcagatagacacgcgccagcgggttgccgagcgtcacggcgcctgtcggcagcagcctgttttcgctgcgcttttcgatcgccagcatgaggcccgcggcgatgatcgatgcgccgatcagaagtgccttggtccgcgtcgcctcgaccgtgccggcaaggctgaccagtatcacggcggcgatcagcagcgcgatctgcggcaccggtgtcttgccggcggcgcggtcgtcggtggcggcgggcagaagcagcgggccgagcagcgccatgatggcaccgacgggcacgatcagcatgaaggcatgccgccagtcgcttccatcggaaaacaggccgccgaggctcggaccgagcagcgtcgagacgccccagatcgccgcgtagagcgtcgaggccttgcgccagagcggttccggatagacgaagcggatgaaggcataggagagggccgcgagcgcgcccgcgccgaacccctgaacggcgcggccgacaagcacgaccggcatggatggcgccagcccgcagatcaggctgccggcggcgaacatcacggcgcccgccacatagaccgtgcgcaggcccgtgccgcgcggccgcatggccacgaagatcgagcccagaaccgccgccgccacataaagcgtcgttacccagaacaacagcggcaggccgccgatatccctgacgatcgacggcgcgatcgtcgccatgatgtaggtctccacggcatagagcgtcaccccgccacccagcatcaaagtcgccggcaggaccggtcgggcgaagagctggaaaacggacgcggtatcggcgggagaggcttcggtactggtcatgcgatgcgccttgggtcgatgcgattatttttacaagttattgcttgaaaaattgcatggccgggttattaaagcaagtgaagacttggaaaaataaaatgcgacaatcaccggccaaccgaatcctgatgctgctcaagaccgaggggccgcaacgtctatcggccatcggcgaggcgctgtccatctccggcgaagccgcgcgccagcaattggcgaggatggcggacgaggggctggtcgaggccgtttccgagcccgcgccgggcaggggccgcccgcgccagctctggcacctgaccgcgtcaggcaacgcccgcttccccgatcgccacgccgagctgacctcggcacttctcgcgaccatggtcacaagcctcggcccccaggcgctcgacaccgtcatcgccgcccgcgaagccgaaacgctggcccgctacagacgcgagatcaccgccggggatctgcccacccgcgtccgccagctcgccggcgtccgcaccgacgaaggctacatggccgatagctggcaggaagaggacggctcgctgctgctggtcgaaaaccactgcccgatctgcgccgcagccaccgcctgcgccggcttctgccgctccgaactcgaaaccttccgaaccatcctcggcgccgatgtcgagcgcgaggaacacatccttcacggtgcgcggcgttgtgcgtatcggattggtggggccgtccgctaaagcccgatccgcccgatcgccgggatcttcagcccgggattggcgacatcgatgccggcgaccagccccatgaaatgcacctcgaagccgctgcgctggccggcggcgatgccgatcaggccgtagagcgtcgcatgcatgtcgcgcccgtcggaatcgatcgcaaacatccgcccgccgctgaggtagtcgcgcccgaccgcgtcaggcggtaacaccgtgtcgagatcgggcaccgtgcgcagcacatgcgcgacgaagctgttggaattcgggcccggatagatccggtagtcgccgacgccggcataaggataggactggatcgccgcctctacggccggaatgagcctttgggcctcgccgcccgagatttccttcacgattcgaggtgtgttggaataccagtaggcgtcggcgacatagttgttgcggcggatcggcgaaccccagccgaccttgtcgtagcgattgtaggtcgcgtcgccctcggccttggtgacgatccacgagtggctggcaaccgcgcccttcagcccgccggtgctggccgacatgatgtagatcttggcgtccccgctggcgtcagccttcggcagcacgcccgatgtgccccattcggcctcacgccatgagctcggatggctttgcagcgaccaccacccggccgacgccagggccggcagcagatagacgactaggatgagaagaaggagccgtttgagatgacgcatgaaacgccggggacctttgctgacgtgcggttgcggccaaggatgtaacgagcatgatggcgcaattacgccgctctttttcaccatgaccccgattgctttatcgcgcccatcatttatgcgtgacagcctgttcagaacatcaggatcgatccatggccaatcccgtcaccgttgaagtcacccgcggcgcgcgcgtcgaaagccggcatcgcggcgccgtcatcgcggtcgatggcgatggcaaggtcgtcttttcgctgggcgatgtcgaggcggctacgtttccgcgttcggcctgcaaggcgatgcaggcgctgccgctggtcgaaagcggcgccgccgatgcttatggtttcggcgacagggagctggcgctcgcctgctcctcgcacaatggcgaggacgagcatgtcgcggtcgcagcctcgatgctggcgcgcgccggccgcgatgtcgagacgctcgaatgcggcggccactggtcgtcgagccagaaggtgctgatccaccaggcccgcacgatggaaagcccgacggcgctccataacaattgctccggcaagcattccggcttcgtctgcacctgcgtccaccagggcgtcgatcccaagggctatatcggctacgaccacccgctgcagcgcgagatccgcgccaccatggaaagcctgaccggcgccgtgctcggtcatgacaattgcggcaccgacggctgctcgatcccgacctatgccgtgccgctcaaggggctggcgcacggcttcgccaggatggcgaccggcaacggccttgaaccattgcgcgcgaaagcctcgcgccggctgttcgatgcctgcatggccgagcccttctatgtcgccggcaccggccgcttctgcacgaagctgatgcagctggcgtccggccgcatcttcgccaagacgggtgccgagggcgtcttctgcgccgccattcccgatcagggcatctcgatcgccgtcaaatgcgacgacggccacgcgcgcgccgccgaaagcatggttgcggcagcgcttgcccgcttcttcgacaaggacagcgccatcggcgtcggtctcaccgatctagcgacatcgagcatgcacaactggaatggtattcacgtcggcgacattcgcgcggcggcggtactctccgattaaagcgtgccggaacgatacattccaaacataaaagatagccaaatctaatatatgcgaaactgaaccggatgacggcgcgtgcgctttcatccggttaagctactcttggcgcagtacatcgattgccatgagggcaggatatgtttgcaggccgctatctctggtggatgctgatcgctctggcggtcttcctgttcttcgccatgagcttcgattacgtcacctgggcaactgtcgcgacatcgagctgcgcgcgcgtcgccggctcctgcgggccgctgatcctcatgatgaccggcacgatcaagccggtcggctattacatcgccggcagcatcatcctcgtcgtcaccttcgcccgcattcaccacatcggcctgagctggctctggtgcctcttcgtgctggtcctcttcgtcgcctcggcgccgttcccgctgctgctcgccaatgtctggaccggccagatgaactcggaaatggtcatgcagaacctgccggtggccttccccttcctggtggtgttctgcacctatatcggctggtccttcgaggatggcgcgggcaggccgctcggcccctggcgctggctgcgggtcgcgatccggctctcggccctgtatggcgcgatggcagcgctcgcgcagacaccctctttcgcctggatgcccggtcggctgctcggcatgccctggctctcggtcctgctggccacctggcagccgaagttcgagacggccctcacgctcggtgcatcggatgaccgcatggcctatctggcttttgttgtcttcgcgctcgccctggcggcaagcctgttcggcctccgcatcgaggatctgcgtgcccgcctgacgacacctttcatgctgaaagggtcgcgccattgaggctccgcgcattgcgtcgcggcctcgctttctctctcgcaatcccacgcgcgcgcgctatgctttcctgaaaacaggagtcgtcatgctgacattgtatttcgcgcccggcacatgttcccgcgccagcctcatcgcgctcgaggaatcgggcctttccttcgaggcgaagcggatcgataccgccagtggcgaacagcgctccgaggcttatctgaagatcaactccaagggccgcgttccggcgcttgcgacggaaaagggcgtgctcaccgaaacgccagcgatcctggcctatatcgcggcgatcgcgcccgcggccgcactggcgccactcgacgaccccttcgaattcgcccgcctgcaggcattcagcagctacatctgctcgaccgtgcatgtgaatcacgcccatggccggcgcggcgcccgctgggccgatgaccccgcggcgcatgaggcgatgaaggccaaggtgccggagaccatggccgagagcttcgcgctgatcgaagacggcatgtttgccggtccctgggtgatgggcgagcgttactccgtcgccgatccctatctgttcgtcatgaccggctggctgccgagcgacgatgtcgacccggcgcgcttcccgagggttgccgaccactatgcccgcatgctcgagcgccccgccgtgcagcgcgcgcttgcccgcgaaaaggcctgagccgcgccagcactggtcctgcaagctccttatctgatcagaccgcttccttggtccgtgccgcctgcatggcgatataggccgggcgggcctggcagcgcttgatccaggcatcgaccttgggatgcgcgtcgaacagcgagcgttccgactgggcatagcgcagcacttcggcgaggttgagatcggcggcggtgaagcggttgccgacgagatagtcggtcgcggcaaggtgcgtctcgagcatcgccagcgggcgcttcagcgagcggttggccaccgtgatggtcgcccggccttcctcggtgtcttccttgccgttgtcgtaggtcagcacgagcttgatcgtgtggatctcgacctcggtcgccgcccacatcgtccacatggtcagcagcccgtcttcctgcacgctctggccggcgagcgagccgccatgcttgcgggcgagatagagcgtgatcgctagcgattcgtgcatcacgagatcgccgtctttgatggcggggatcatggccatcggattgatggcggtaaagtcggacgacagcgtgttgaacggcgcatccgctgccagcgggttgtcgaggcgccgcgcctgcagcaccggcacggaggtgaattccagcccaagctcctccgccatccagtagacgcgcgaggcgcgcgagcggtaaacgccgtagattgtcagcatgatgatgtgcccttctgcaaatgcgccgcgagcctagaggttagggcggtgaagcggaagcttccatggctgatgggtcaatcaaagcttttgatggcgtggcctatgagacacgattgcgctcgacggtgagatgcgcgtatccgccagcaccttcagccagttctcccgacatcttcttgtcccacgcgaggccgacgaccgcgccctcggccgtatcctgaaacacgttgtcggtgatgacggcggtgcctgccccatcgacaaccgagaccgcgcagccgaccggcgtctttcgcaccacattgccggttactacgaggttgcgcatgtagggaccccagccgagctgcatgccccatctgggcgcgccctcgatgatgttgttcgaaaccagcgtatcggcctcggcggcgatgccgatgccgaagctgacatccggcttgtaggggccgtcgagcttgaggttgcgcacgacgttgccggtgacgctggcgagcctgccgcccttgtcgaaattggcgatcgagatgccgttggccgcaccgtcgatcatgttgttggcgacgacggccccttcgaactcgaattcgacatagatggccgtctcgcccgagcgccggcactggttgcccgcgatctgcacgtcggaggccgagttggcgcggatcgcggtgaaggcgcagtcggagatatggttgttggcgaccatgacattgtcggcgcgaaacaggttgatgccgttgccgttctgcccggtgccgccatccgtggcgccgatccggtagatccggttgccgctgacgatgctgtcgtcggccgccttcttccagcgatggatcaggatgccgccattgccgcagtcgaagacctcgtttccggtcaccgaaaggccggaggattccaccgcgtagagcccggattgcgcggcccccgatatgcggctgcgctcgatccgtccgccgcagcgctccagctgcagcgcgtgcttgcggctgcccgagatctcgcaattgtcgatcaccacctcgtcgatgccggtgaactgaaccagagcggaggtgtcgtcgccaagccagcggttctgcccgtcgatcacgatgttggagagctcgatgcgcttgacgtctacggcggaaaacaggcgtccgtcgccggtatagacgatccgcgacgcgcccgggacgccggtgatacgggtgttctcgggcaaggtcaggttcgacactctgtagacgcccggcggcaggaataccggcacgttctccgccgacgcgtcgtcgatcatcttctgcaggctgctgctcctgcgatcgccgggatcgggtgccgccttgtatttcaccgcgtcgatcgagccgcgcagatcgggctgccggcttgccgcgaagacgggcggcgccagcatcgcgacggtcgagcaggcggcaaggcgcaacaggttgcggcgggacgagagcggcgtttgtttgttcatgctcttcgccatgcaggaaccgtgccgcggcgatcgtatcgttttggcacatcgaggatcgcggccgtggtgatttgttaaagatcgacgatgcctgtcatccgtcttgccgccatctcgctgccgccgccgctggacctcgccgtcatcgccagtggcgcgcggaccgatgcgcgcgaccgatcccgccatcgcctctggttcttccgccatttgccgctatctctatggcgatgagatttgacgcgctgctttatcccgcgcccgaggggctctactgcccgctgggccgattttatgtcgatccggtcaggcccgttgagcgcgcgctgatcactcatggccattccgaccacgcccgctccggccacggccatgtactcgccacccgccagacgctcgatatcatgcgcatccgctatggcgaggatttctgcggatcggaacaggcggcagccttcggcgaggaaatcgtcgtcaacggcgtgacggtgagcttccatccggccggccatgtgctcggctccgcccagatcgccatcgagaaggacgcgacccgcatcgtcgtctcgggcgattacaagcgccgccccgacccgacctgcgcgccctatgagccggttgcctgcgacgtcttcatcaccgaggcgaccttcggcctgcctgtgttccatcatccggaccctgccggcgaaatggccaagctctacgcctcgctgcgccagtttcccgagcgcacccacatgatcggcgcctacgcgctcggcaaggcgcagcgcgtcatccgcctgttgcgcgacaccggctacgacgaacccatctatatccacggcgccatggagcggctctgcgactattacgtcagccaaggcatcgacctcggcgagttgcgcccggcaaccgtcgagggacgcgacaagtctctgttcaagggctccgtcgtcgtcggcccgtcatccgccttcgccgaccgctgggcccgccgcttcaacgacccgctccccgcctttgcttccggctggatgatggtgcgccagcgcgccaagcaggggggcgtcgaactaccgctcgtgatttccgaccattgcgactggccggaactcaccgacacgatctccgagcttcatccggcggaagtctgggtgacgcatgggcgcgaggaggcactggtgcgctggtgcgaattgcagggcatcaaggccaggccgctgcatctggtggggtatgaggatgaggcggagtgatgatggtgtgcgatcacgaaaacccctccccaacccctccccacaagggggaggg

SEQ ID NO: 25 - DNA, 62839 bp, Rhizobium matallidurans
  source 1..62839: mol_type = genomic DNA
tacccaaacaagtcaacagacctttttcaaaaaatcgcagtttccgacaagaagctgtttttaaatgcgaattttcaaacagggctgttgggggccgcaaaggcgcctctcaagcgcacgctttttgcaagtaccaatggcgatatagggcctcaaaggcgcgagacgaggccgttcgccctcacattttcacaatcgagtggtctcaagggcattgtgaacgtcatgacgggtgctctgaaggcccgctgatttgacttccatatctaaactatgcacttttccggccacccgaatgcccccgggcctggtcgacccgatcagttgagaggatgcggacgcctttgccatggtgactgagaagatgatgatccgctcgttcggcaacgagccagcgcttctcgccgacggcagacgtgcgcccgaccgccgcgaggtctcgctgcgctggctgtccggcaccttcctgacgggtatcacctccagcgttctgatgggcgtggcgctctttgccgccctcgacggccgccagcagctggcgatcccggccgaggcctatgccagcacgctcggcaccgacaatcccgatacggatgtgacccgcggcggccgcctgatcgcgcccgccatcgctgcaaagccgtccgaccgcaagatcatggaagtctcgacggtcgtgcacgaagccgacaaggaagtggtacggcgccagcccttcgcccgcgtgaagatgacgctcgccgccaatcacgtcgtcaccgaggattacccggccttcaatccgctctcgatcttctcggccgacgagccggaaccacagcccggcgtccgcaccggccagatctacggttccgacgtcgaatccgaagtcagcctgaagaccgcggcctatccgacatcgggctccggcctcaaggtcgccgccggcatgtcgctcgacgaggtcgaggaaaacgtccgctccaacggatccgtcctcaccgacggcgtctcgcaggtcgcggccctctactatgtcgatccgcagcgcttttcggccgacgacaacgacgtcgatctggcatccggcctcacggcgcgcgtgctcgagcagaacatgacggtctcggcgccggaatcgatcacgccgcagaccgaggaattcgccgacgacatcgtgccggttcgcgaggatatgccgatcgtcaaggcgatgatggattcgggctatcccgagccgcaggcaaagggcctttccacgtacctgtcgccgatgctcggttcggagaacctgtcgaaaggcgacgtgctgcgcatcggtatcctgcagaagggcgagcaggcgaagatcatccgcgccagcgtctatcgcggctccaggcatgtcgtcaccgtttcgctcgacgacaaggatcactatgtcgccggcagcgaaccgccgagactcgacgcggtcgcgaccgctttcgacgacagcgccatgaccgcgccgtcgaaccagaacctgccgcgcgtctatgacggcatttatcgcgccgcgctgtcctatggcatgaccaaggacatgacggggctgatcatcaagcttctcgccagcagcgtcgattttcaggcggagctgcgcccgaccgatacgctggaggccttcttctcggtggccgatgccagcggccaggcgaccgaccagtccgaactgctctatgtcaacgcccgcttcggcgacacccagacgcgcttctaccgcttccaggatcccgacgacggcacggtcgattatttcgaccaggacggcaagagcattcgccagttcctgctgcgcaatccggtcccgaatggcagcttccgctccggcttcggcatgcgccgccacccgatcctgggctttgcccgcatgcataccggcgtcgactgggcagccccgcgcggcacgccgatcatcgccgtcggcaacggcacggtggaaaaggccggctgggacagtggcggctacggcaaccagacgatcgtgcgccacgccaacggctacgaatcctcctacaaccaccagaacgccatcgccaagggcgtggtcgcgggttccaaggtgcgccagggccaggtgatcggctgggtcggcacgaccggcgaatcgaccggtccgcacctgcattacgagatgatcgtcaatggcaccaaggtcgacccgctgcgcgtgcgcctgcccggcggcaaatcgctcgccggcccgacgctcgtcaagttcgaggacgagcgcaagcggattgatacgctgttgggtaaccagccgtcgccgcaggtggcgagcaagtagttttcgcctcggcctccagagagctgtgtctaaaggcccctccccaacccctccccacaagggggaggggctaactcgtggcattcgacctgccccattctggcgcccgcggctgttgataggttgctgttcaagcaaagcatcgcgccctgcaagcccctcccccttgtggggaggggttggggaggggttttgacgcaaagcgatcaccctacccaacacaaaaacggcagccgaagccgccgttttcttgtctcacacgccagtccgcttacgccgcttcgctgacaccggcgttcttcgtccgaaacagcagccgatccgtcccgccggtgatcttcaccgtcgaaccgtcgggcacctgcccgccgaggatctgctcggccagcgggtcctggacgtacttctggatcacccgcttcagcggccgcgctccgtaaacaggatcgtagcccttgttggcgagccagtgcgtggcctcgtcgtcgagctcgatcgtgatcttgcgctcggccaaaagcttcaccagccgctgcagctggatgtcgacgatcgcgcccatctcgtcccgcttcaggcggtggaagaggatgatctcgtcgatgcggttcaggaactccggccggaagtggccgcgcaccatctccatcacctgctcgcgcaccagatcgctgtcgtcgccatccttcagctgcgtcagatattcggcgccgaggttcgacgtcatgatgatcatcgtgttgcggaagtcgacggtgcggccctgaccatcggtcaggcggccgtcgtcgagcacctgcagcagcacgttgaagacatcgggatgcgccttttcgatctcgtcgaacagcacgacctgatagggccggcgacgcaccgcttccgtcagcgaaccgccttcctcatagccgacatagccgggaggagcgccgatcatccgggccacggagtgcttctccatgtactcggacatgtccatgcgcaccatcgccgtctcgtcgtcgaagaggaagcgggccaatgccttggtaagctccgtcttgccgacgccggtcgggccgaggaagatgaacgagccgagcggccggttcggatcctgcaggccggcgcgcgcgcggcgcaccgcccgcgacacggcctgaaccgcgtcaccctggccgatcaccgacttcgccagctcgtcttccatccgcagcagcttctcgcggtcgccttccagcatcttctcgaccggaatgccggtccagcgggagacgacatgcgcgatgttgtcgggggtcacgacctcctgcaccatggcgctgcgatcattgtcctgcgcttcggcttccgaaagcttcttttcaagctccggaatgacgccgtaggtcagctcgccggcacgctggaattcgcccttgcgctgcgcgatcgccagatcgttgcgggcatcgtcgagctccttcttcaggtcggcggccaggccgagcttctgcttttccgcctgccagcgggccgtcagcgcgtccgcgctctcttccagatcggtgagctcggtctcgagccgcaccagacgatcagcggaagcaacgtccgtttccttcttcagcgcttcgcgctcgatcttcagctgcatgatacggcgatcgagttcgtcgagctcttcgggcttggaatcgacctgcatgcgcaggcgcgccgccgcctcgtccatcaggtcgatcgccttatcggggagaaagcggtcggtgatgtagcggttcgacaacgtggcggccgccacaagcgacgaatccgagatgcggaccttgtggtgctgctcgtacttctccttcaggccgcgcaggatagagatcgtgtcctcgaccgtcggctcttcgacgacgatcggctggaaacgacgggcgagcgccgggtccttctcgacatgcttgcgatattcgtcgagcgtggtcgcgccgacgcaatgcagctcgccgcgcgcaagcgccggcttcagaaggttggaggcatccatagcgccatcacccttgccggcaccgacgagcgtatgcatctcgtcgatgaacaggatgatctcgccgttttcggcctgcacctcgttgagcacgctcttcaggcgctcttcgaattcgccgcgatatttcgcgccggcaatcagcgcgcccatgtcgagcgccatcagcttcttgtccttgaggctttccggcacatcaccattgacgatgcgcagcgccaggccttcggcgatcgccgtcttgccgacgccgggttcaccgatgagaacggggttgttcttggtgcggcgcgagagcacctggatggtgcggcggatttcgtcgtcgcggccgatcacgggatcgagccggccatcgcgggcttccgccgtcaggtcgcgggcgaatttcttcagcgcgtcgaagccctgttcggcattggcgctatcggccgtgcggcccttgcggatgtcgttgatgacctggttgagcgtcaccgccgtcacgccggcattcttcagcgtgatcgcggtggacgattccatcgccagcgcctgcaacagacgctcgaccgtgacgaagctgtcgccggccttcttcgatgcctcctcggcggtcgagagaaccttggcgagcggtgcggcgagatagatctggccgttgccgccggagaccttcggcagcttggcaagggcggcatcattggcaaggcgggcggccttggcgtcgccgccggcgcgctcgatgagggacgcggccatgccctggtcgtcgtcgagcagcactttcagcacatgctcgggcgagaactgctggtgaccctgggccagcgcataagtctgcgccgactggatgaaaccgcgcacccgctcggagtatttttcgatattcatgaatggacctccttgaatcgccctgccctcataaggcacaggccgatgactgagattgagctccctcaagaggcgagctgatgtctccccgccggcggtcgaaaccgaggcgaagaacttgctcaggatatggtgggaagccgcgagagtttaaagaggtggcgcgcccaaaaaaccacgcttgcgagcaagccgcagccggccggcgggcaaccaccgaggggccgaaacgagatcgccccgccggaggactgctcgggcggggcgggatcggattgtatcaaatggcgcttacgcggcgaccagatcgtcggtctcgttttccttgaacatcttggcgaggttcaggaagcagatcatgccgttttcggaagcgatgatgccttcgcagaaggcgcggtcgaaggatgcggtgacctcgggaaccggctgcacctggctcgacgaaatcgtcaggatgtcggagacccggtcgaccagcatgccgatgaccatgttgtggacttcggcgacgacgatggcgctgcgctcgttggcgacggtgctcttcatgccgagcttgaaggcgaggtcgatgatcggaatgaccgagccgcgcaggttcatgacgccgatgacgtcggccggcgaatgcgggatcggcgtcgaaggcgcccagccgcggatttcgcggatggtcgtcgtcttcacgcagaattcctgatcgtggaggcggaaggcaatgatctcaagcgtatcgccactgaagctcggagaattgatcgtcgtcattaaaattgtcccaactgtcgaaagccagggcagaagcaacaacgccaccattggcgccgatgcactttgccttcaagccgccagttctctcgaaatcgagagtaacgtcacggttaatgcgggacattaatgaaagagtgtttcccaaatctaaaccggcgggcaggattttttgcccgcttgaaacaggcgcggatcgtccagcaggatcgcgtccggcccgattgccgcgatccgcgaaagcccgtcctgatccacctccccaacaggaaaaggcggatattccggaagcgcgaccgaccggggctggccgaccatcacggcaagccgcagattggcgcgacgaacagcggcaacgatctcctccgtcgcccagccctgccagagccggtaccatcttgcgccagcggccgcggcctgctcgacaagatcgggactgtcgagaaacgccaggatgtcgatctcaggcgtgcgcgatcgggccgcgcgtatcagcggcagacttctgaggccgagcagtacgcgccgcgccgcgcccgaacgcacgatgtcctccatcacccgtaccagggcggcttcatcggcaagcttgaaatccagcaagaggccgagcttgccggaagcggcaacgacgtcccgcagcgtcatgacctcgggcaagagctggcgcagcaccggcaggtcgagatcggccacgtgacgcggatcgccgcaaagccggctcagatccgcatcgtggacgcagacgagaacaccgtcgcgcgtctggcgtacatcggtttcgattgcatgcgcgccctcggcctcggcggcgctaagagccgcgagcgtgttttcagccgccagcgcggcgccaccgcgatgggcgacgacaagcggcctagcggacggcccgccgatggcctgtcgccatggatcgtgcatctgggctccgtgagtgaacagcatggtgtcggcacgttgcccgcgccgcgaggagaccgcaagcctcagacgatggtcttctcgatctgctccacagcccactccacctgatccttggtgatcacgagcggcggcgccaggcggatggtgttttcgtgggtgtccttggcgagaaggccgaggtccttgagcgcgtagcaatattgccgcgcgccgccggcttccggcaccagctcgatcgccatcatcaacccgcgcccgcgcacctccttcacgatgttcgagcggatcgaccgcagaccttcgaggaaatagtcgcccatgcgctcggcattgccgatcatgtcttcttccgtcagcaccttcagcgctgcgcgcgccacggcgcaggcaagcggattgccgccgaaggtagagccgtgctggccgggcttcagcacgcccagcacctcggaattcgaaagcaccgccgaaaccggatagaagccgcccgaaagcgccttgccgatcagcgtcacgtctgcctcgatgccttcatgctcctcggccagcagcttgccggtgcgcccgagcccggtctgaatctcgtcgaggatgagcgtcaccttgttgtcggtgcagagctggcgcacttttctgaaatagcccggctgagggatgatgacgcccgcctcgccctggatcggctcgatcagcgctgccaccgtgttctcgttgatcgccgccgcgaaagcttccgcgtccccgaagggaacggtgcggaagcccggcgtataggggccaaagcctgagcgcgcatccggatcggtggagaagctgatgatgctcagcgtccggccgtggaaattgtcggcgcagacgatgatctcggccttgccctccggcacgcccttcacctcatatccccatttgcgcacagccttgatcgccgtctcgacagcctccgcgccggagttcatcggcaggatcttgtgcgatccagtcagcgccgcgagctcctcgtagagatgcgccagctggtcgttgcggaaagcgcgcgaggtcagcgtcagcttgcccgcctgctcgaccatggcggcgaggatcttcgggtggcagtgcccctggttgacggccgaataggccgacaggcaatcgagatagcgcttgccatccgtatcccagacgtaaacgccctcgccgcgcgtcaggaccacgtccagcggcttgtagttatgggcgccaaggcgctgctcggtatcgatcaatctggctaaagtgctcatggtcgtcccctttgtttgttatgcggcgcgggtcgggcggtcgaagatgcggcggccgaacaggcttgccgtcagctcgacgagaacgcgggcgctcttgccgcgatcgtcgagaaacgggttcagttcgaccagatcgagagaggagacgagcccgctgtcgcagagcatctccatgatcagatgcgcctcgcggaaggtcgctccgccgggcaccgtcgtgccgacgccgggcgcgacgtcaggatcgaggaaatcgacgtcgaggctgacatgaaacagcgcgttcgccgcttcgaccttggcgagaatgtcgcgcatgatcgccgccaccccctgctcgtcgatcgagcgcatgtcgaagacgttgacgccgtgctccttgatcaactcgcgctcgggcgcatcgaccgagcgtatgccgacctggaagacattcttcggatcgaccagcggccggtcgcgcggcaggatgtcggagagatcggcctggccgcaataataggcgacgggcatgccgtgaatattgcccgacggcgatgtctccggcgtgttgaaatcggaatgcgcgtcgagccagagcacgaaaagcggccgcttctgcttggcggcatagcgcgccatgcccgataccgtgcccatggacaggctgtggtcgccgccgagaatgagcgggaaacggccggcatcggcgatctcgtaaacgccggcttcgagcgcccgcgtgaatgcgccgacggtgcgcagattatgcgccttcggattggtcggcaggtcgcgggccggcacgatctgcacgtctccggcatcagcgacatcatggccgagatcgatcaaggcccggtcgacaccggcgattctcagcgccgtcggccccatagcggcccccctgcggccggagccctcttccaaaggcgcaccgataagggtgaccgatcgcgactgtgcctgcatttgtctctcctgctcactgcttcgattgaatatccgacatcgccacggcgacaaaaagatgaaaaagtgccagtttcacagcatgaattgacagtttgccaagtccagccatacaaagtgatatatggatgatctcgatcaggaactgctgagcgccctgcgccacaatgcccgcgcgcccgtctcgtcgcttgccgccatgaccggcgcctcgcgggccaccgtcgccgcgcgcatcgacagactggtcgccaacggcaccatcgccgccttcaccatccgcaccggccacgaaacccgcgccgccggcgtgcgcgccatcgtcatgatcgaggtgctcggcaagctcgccgacaaggtcgccgaccaactgcgcggcctgccgcaggtgcgcgcgctccacagcaccaacggcaaatgggatttcatcgccgaactcgaagaccgtgacctcgtctccttcgacgaaacgctgcgccgcataagactgatcgacggcatcaacacgaccgaaacgaacatactgctgaagacgaggaagaccagcttttaaggcctcctagccggctgaaagcgatggattggttcctcaattctaagccgcgcgcgcactgtttgctttgagatacaaccaagccaggtattcttcgtacagcgatcataatccactggaggaaatgatgatgaacgacgagcaggaaagttcacctttcgatggccctcaaatgcagggaactcgttacgagcgtgctgacatgtcaggcgccagcttcgatggcgtagatctcacagacgcacgattttatgctgttttgacgaacgcgaagttcatcgacaccaatctgtgccaagcggcttttgacgatgtgaacctggcaggggcgcgctttgataacgtcaatctgtccggcgccgctgtcacgaatgcaaacctgtcgcggctgaccataagtggtgtcacattggcggattcgaacatcgacgatgccgatttgaccgggatgaggatcaatggagttctcgtaaccgatctattcaaggcatatgaacatatgaagggctgagggtcggctcgtacgtcggcaatgtgaatccgttcggcttgcggcgtgcgcggcgcgcacccgctgcggaaattctcgatcgttccgccggtgtcgcccccatcaatactccttctcgtacaccacgcccgcttcccccgcgccattggcgcctgccgccccgcgcagtttcacgccgcgcccgacatcgaggttgatgatcgccttggcgccgtccttggtgttctgctgcagctcgatataggtgcgctcgttgagatagcggccgacgccgacattggtctggccgttggcatcggtgctgatatcgaagtcgtcgaccccgagctggttgcgcaatccctggaaaagcgaggtcgagcggccgcccgcgagctggctgacggcgtcggcgagctgggcgatctgcagcgccgacagcttcgacatcgactgcccgaagatcagctgtgccagcacctcgtcctgcggcagcgcgggtgaagaggagaaggtgatggcgggatcggtcgccagccccgccacatcgacggtgagcgtcgtcgttcccgacgtcgaggtcgccgccatctgcagcgccggcgtcagatcgccggcaaaggtgatccggctcttgtcggagaagtcgagccggcggttgaggatggtgaggcgcccgcgccgcatggtgaagccgccggaaacgacaggcaccgacgccgtgccccggatggtcacactgccgccgagctcggcgtcgattccgcgtccgcgcacgaagatctgcgagggcgcatcgagctggatgtcgagattgagcgtgctcgatttaccccttgcgccttcctgcgtcgtgtcgcgcagctgggcgagaaccgccttcggcgcgttcttgtggcggatatcgatctcgcgcagcgaagtcggaagtttttcaggaacggtgatcgaggccttttcgagcctgagcttgccgttcagcgtcggattggcggtgagcggcccgcgcaggccgatcgtgccatcgaccgtggcgaccacgagcgtaccgtcgacatagacggccttgttgagcgtcacatcgatattggcggggaagttcgccgccggctgaatgccgacatcgccggtcaccgcgatgttgccgccgctcgcaagctgcccggtcagacgcgagatcaccgcgcgctgcccgtcgaagcggatatcggcggtcaggctgttgatctccagattgcgccggacgtcgatgaccttggcgccgctggtggcgaccgttccgttgatcacgggcgcactcgccgtgccgccgacctgcagattgaaattggcgttgccttcggcgacgaagccttgcgcggcgagctgcgcgccgagaacggcaaagggaaggttgccggaaaagcgcatgtcgagcacccggttgccggagatggcgaggttgccgccacccttcaacgacaggccggcatccccggtgacggtggtgtcgatggtgagccggccggaggcgagcttgccgttggcgccgatcgcaagcggcgagacgcccgcaccccgggtctggctggtcgccgcattgcgccagtcgagcttgaagtcgacatcgggcatcggcagcttgccggaggcgttgaccgtgccagaaatattgccctcggctgcaagtcccggaacgaaggcgttggccagtcccgccgggaggttcgatatgtcggccttcacggcgagcgattgcgcgttggcgcccgcgaccacgaaattgcccgccgccttcagcgccacgttgttgccggtgagattggtggtgaagtcgagcttgttgtcggcaagcttgccgctggcattggccgacagcgcgccgacgccggaggcccgcgtctgcgttgtcgccgcgttcctccagtcgaggttgaagtcgatgacaggattggcaggcgtccccgaggtcttcgcccggcccgaaatcgtgccctcggcgccgagaccgggtacgaagccgttggcaaggctcgccggcagatcggtgatatcggcatcgacggaaagcccctggatattggcgccggtgagtgccgccgtccccttggcctgcagcaatgtcttgctgttgctggccagattggcgtcgaaattgatcttgttgtcggcgaacttgcccgtcgcatcgaggctcagcgccgaaaggttggcgctcttggtctgccgcgtcgtcgcgttcgcccagttgagcttgaaatcgaccgatggcagcggcaacgcgccggaaaccttggccgtccccgagatcatgccgccggcatcgagattgggaacgaagctgctgacaagtgctgccggcagattgttgagcgtcgcatcggcctcgatcgtcgtcggccgcgtcccctcgatcccgaccttgccggtggccgcgagcgccgcgccggcctgcccgtccagcttcgtcgtgaaatcgagcgccttatcctggagcgtccctttcagcgtcagcgccatggcgggcagcttcgccgccttcgtctggctggtcgcgacatcggtccatgcgagatcgaaactggccttcggttgctgtagcgtgccggatgccgaagccgtgccggaaatcgtgccgctggcgccaaggccatcgacgaagccattggcgagaccggccggaaccgcgctcaccgtggcatcgaccttgagatcgccgatcgccgaattctgaagcttgagattacccgccgccttcaccgacatgccgccggtggccgaaacattgctgtcgaaggtcagcgtattgtccgcgaacgtcccgctaacggaggcgccgacaccggaaaggcccgccgccttgatctggctggtcgaggcgttcttccagtccagccggaactgagctgccggcatcggcagcttgccggacaccccgaagcttcccgatatcatgccctgggcggcgagatcgggcacgaaggcgttggcaaggaccgccggaatattggcgagcgtgccgtttaccttcagcgtctgcgcttcattgctggtaacgacgaagctgccatccgccttgatggcaaacccgccgctgccgccggcattcgcattgaaattgaggacgttgttttccagcttgccgcttgccgtcagcccgagcgaggagagcttggcgaccttggtctggctggtggccgcgttcttccagttcagccggaaatcgagcgccggcgcgggaagcttgcccgaagcggtgacgttgccggtgatggcgccttcggcatcgagaccggcaacgaaggcattggccagccccgccggaatgttgacgatatcggcctcgacctgcagcgcttgcgcgttctgccccgaggtcacgaaattgccggcggccttcatcgaaacgccgcccttgccgctcaactccgtcttgaaatcgagcttgttgtccgcgaacgtgccgttggcgccgatcgcaagcgcggaaagcccggcgcccttcgtctggctggtcgcggcgttcttccaatcgagcgtgaattcggccaccggcgccgcaggcgttccggacacagcgaccttgcccgatatcgcgcccgtggcatcgagatcgggcacgaagctgttggcaaggctcgccggcagttgcttgaccacgccgttgatggcgagtgcttgcccgaccgagccggtcacgttgatcgcgccctcgccggtcttgatctcgagcccatcgagcgtcaccgtgccatcagtgatcgccaattgcgacggcgcggcgagatcgacggcgatgccgcgcggcttggccgagaagcgatcgagctgaaccagcgtcgtgccggcattcgtctcgacaccgccgcccgccaccagcggctggtcgtcgtaatagccgtcgaggctgaaattcgtccggttcccgagctgcgtgaaattcacggccaggctgtcgatcttgttgacgccggatgcgacttcgtcggccttgatcgatccggtcgccgcgaaggccttgagatcggtgacggtgacgtcgacattggggctgacgatcgcgaaattgccctgcttcacgccgccgcccgtcgccgcgaccttcaggccgatcctgccggcatcgttgctgatgtctaccgcccccttgagatcgccttcagccttctgcccggccagcgccgcaatcaggctcagatcgggcaggtcgaatgtcagcgcgcctgatggtgcgaagctctcggatagagcaacgcgaccgctcaggctgttgttgccgacattggccttgatcgacggcagcgtcgtctgcccgtcttgcgacagcacgtcggtgctgatgtcgatcgcctggccatcgatcttgccggtcgccctcacctgcgccttgggcgctttcggatcggcggtcgcggtgagcgccacatcgagatccgtgagccctcgcccggccatgtcgatggccggtgccttgagatcggccgagagcgcgagcgcggagagatcgccgccggccttcagcgtgtagttcacctcgccggaggcggtgtcgagcagcggcttgatatcgggaacacggccggcaagcgtcgcattcagcgtcgtgccgtcgaggaccacattgcccgtggcgacggtaaggtccgacttgatgccgaggttcgacagattgatcttgtcgggaatgatccccgccacttggccctcgatcgtcacgggcgtcttgaaccgcgccgcgacggcgggcggcatcgccggtggctcgacggtcagcttggcgttaccggtcagcgaattgtcggtgagctgatacgcgccgttgaggctggcgttggcggacgcgctctcgatcgtcgcgccgttgaagccgatggtggccggcgagatctggagcggcaggacgatcgtcaccggcccctgaaccgcccggttgatatcgggattggcgaaggtcatctcgccggcgacgaggcggatctgcacggcgccggagcggccgctgagattgaagttgtcgctcttggccgtaagcttcacattgccgatcgtcgcctgtggcagcacggcggtgtcgagcgaggcgctgacgttcagccgcgacgccttggcgtcacccgtcagcgccagattgacgccggatatcatgaagcgcgcttcgccctgcgccagcggccagcggaaatcgaccggaccggatgtcccgagcacattcgcgttcaggctgttcttgcccttcggatccagcgtgccggaggccgcgatgacgacggcgccggtcgccacgttgccggtctggatatcgatcttgccggcattgtcgaagttcgcggccagatcgatgttcgtctggccggcgaaaagcggccggaacgccgccggcatgagagaactcaggtcgccgccgcccttgatctcgacattgtgcagcagttggtcctgcgtcagcgtatggcgcgcgtcgatcgcggcgcgctgctggccatcgagggaggcctgcagcttggcgcgccagtcggcgatcggcccgtcgccattgagactgatctcgacagccgggttgttcggcaaggccagcacgccggcgagcagtccgcccttgggttcgttgagcttggccttgaccgtcagctggctgttgtcaggcaggaaggcgacgtcggcggtaagctttgcatccggaacatcctggcggttgaccgtgatattggcatcgccgccgttcgaatcggcacgcacgctgccatcggccgacagcgtgaaggcgcgcccgatcagcggttgcgacaggctgatcttcggcagggaaacctgatcgatgacgatcttgagaggaagcgagaagcccccgccatcgccgccttccgtctccggccgcgacggcaatgtgcgaaccggcttacgcaggacgcggatggcgtcagcctcgacgcgcgtcgcctggaagcgcccggcgaagagcgccagcggattccagttgatcgacaggccgtctatgtcggcgaacgtgccgcgtgtatccgacagcacgatgcgcgtggcgccgaaaccgccggtcagcaggccctgcgggtcgagcacgcggacggtcatgtcgcggttggagatggtcgaggtcaccttgtccacgagaatgcgggcgccgaagccggtgaagccgaagatcgcgatggccacggcaagcaggaccagagccacgccggcgccatagccgagcagtcgcacaatccacctggagatattcgtcagcgtaagcatggacccggttactatcccgttttctgcacggctatcgcaacctcgctgcgagcctgaacctgtttagaacgactgaccgatgccagcatagatgccgtaatccgtcccaccctcgaacttgttgaggggaacggcgaaatcaagccggatcggaccgaaaggcgtggcgtagcgcaggccgatacccgcaccggccctgatatccgaaaaatcgggcgcgacatcggcggagaccaccccgacatcgatgaagggcacgatgccgatcgtgtcggtcaccttgacgcgcgtctcgaacgacgcggtcatgaaggaagccccgcccgtcgcctggttggcggcgttgtagggagagatttcctgatagccgtaaccgcgcaccgatccgccgccgccggcaaagaagcgccgggtcgccggaatgttcgccagatcgtcggcgccgagcaggaagccggcggacagcttgccggcgagcacgatccggtcttcggcgccaagaccgtaatagcccgatatcgaaccctcgaaggcggagaagatcgtgccgttataggcttcgtagctcggcgtcaccttggccatcgcccggtagcccgacgtcgggtcgagcttgttatcgcgcgcatcacggtcgaactgcaagggagccgcgaaggtcagataggtgttggtgccgaacgcatcgtcgtccttttcccagctgacctcgcccgcaccggtaaacgtgtcggtatcgttgagttcgtaggaatagccgagcgatgccgtcaccagcttggcgctataggcatcggggttttcgctcttggccagaatgctggcgatcagcgtccccgacggcacgaaggcgccgggcttggtgaaggtgatacccgccgaaaagtcgagatcgcccagagccgtcgcatccccaagccgaccgacggcgccttcgacgcgcagcccttccgcccctccgaacaggttgcgatggccccagtagccattgaggccgaagccgtcgaccgtcgaatactgcgcaccgacgccgaaatagcgctgcttgccctcggacacttcgatgatcatcggcaggctgccgtcgccggccagctggtcgccctcacgcagggtgacgctggagaacacaccgagcgcccgcagccgctcgccggccttcttcagcgcttccggtgagtagcgatcgcccttgttgatgcgcgaatagcgctcgatgaaatccggccgcaccgccttggcgcccgtgaccccgaccgttccgatcggcgcgaccggtccgccctcggcggcgagcacgacgtcgaccgtattcgtgcggtggtcggccaccaccttgcgcgtggtcagcttcgccagcggccgcccatcgctcttcagctgctcgacgatcttgtcgccggccttgatgatcgtcagcgacccggccgaagcgcccggcccgagatcgtaatcggcggggttgcggttggccgcgtcgccgccgaactgcacctctcgcacacgaaataccggcccggcggcaacgctgacattgacggggaccgggcgcgagcgatcgaaggtcgggttcggcggcaggtcgtcgatattgcggccgtcgacggtaatggtcacgacgccgccataacgtgccttctcgtaaagcgccgcgatcagccgatcgcgatcgtcgcgcgccttgaccacgacgccgaggtcgcccgaaaccggctgctccttgtcgctgaccaggcgcgagctgttttcgagcgcttccttgagatcaggatcggcggcgtccgatgtcagcgtcacctcgtagcgaacaggatcgggcacctggttggcgtccgtatcgtccttgccgaaaaagttgatcccgaaaagcttgaaggcgtaggcgtccgccacgagtgccggtgacaacgcggtcgtcaccgcgaccattgtcacgatgcctgctcgccgatacgcaatacccggtttcggtgacttccgtctgatctgcatccgccgctttttggttacattggaattaagctgtgcgccccccggcctgatgcgaccttagcggcaaaattcattttgttgtaccgttttaaagcgcatgattgctgatttagcgcaaaaaaacaaaaatcccgggccagagacccgggatttgaaaggctttggcgaacgatcagccgcggcaatcgtcgatatagcggcggccatactggtcgcggtagtagcactggccgggctgttcggcgacgcggccgatgagcgcgccggacacgccgccgacagcggcacccacggctgcgccgcgaacatcacccgtcaccgcgccaccgatgatggccccggatgcggcaccgatgccggcaccctgctgcgtcggcgtgcagccggcgatcgataggccgataaatgcgagcgcaataatctttttcatcaataactcctgtttgattgcccgatgggcagtgccgatgggccatgtccgatggacggtgcccgatgggcgatggttgtccctgattcctgtctttttcgtaacctagaccgcaaactatggcgcaataaggggcaatccacccctccgctcgatttcagtcgacgggacgcacgcaaagccgctcgtaaatcggtcaccaagaaccatcctgggcaccgtgcccaccgccgcgatgcgcgattgatctggccaagcgcgccaatttcaaattaaagtaattcgaaactatgggccaattgacgcacatggtgctaaatcggaccggaagggttgacgtgcagtcgtccttgggcggaaaacgcctgcacgatactggagcatgagatggatttcgaagcattcttcaagagcgagctggagggccttcaccaggaaggccgctaccgtgtgttcgccgatcttgaacgtcaccgcggcagttttccgcgcgccacgcgccacacccccgaggggccgaaggatgtgaccgtctggtgttccaacgactatctcggcatgggccagaaccccaaggtgatcgaggcgatgaagaacgccatcgatcactgtggcgcgggtgcgggaggcacccggaatatttctggcaccacccactaccacgttctgctcgagcgcgaactcgccgatctgcacggcaaggaatcagccctggtcttcacctcgggctacgtctccaactgggcggcgctgggcacgctcggcgccaagatccccggcatgatcatcttctcggatgcgctaaaccacgcctcgatgatcgagggcatccgctacgccaagtgcgatcgcgtcatctggaagcacaacgacctgcaggatctggaagccaagctcgccgccgccgatccgaaggcgccgaagatgatcgccttcgagagcgtctattcgatggacggcgatatcgcgccgatcaaggaaatctgcgacctcgccgacaagtacggcgccatgacctatctcgacgaagtccatgctgtcggcatgtatggcccgcgcggcggcggcatcgccgaacgcgaaggcctgatggaccgcctgacggttatcgaaggcacgctcggcaaggccttcggcgtcatgggcggctatatcgcggcgtccgcggcgctttgcgacttcatccgctccttcgcatcgggcttcatcttcaccacggcgcttcccccgacgctcgccgccggtgccgttgcctcgatccagcacctgaaggtcagcccgttcgaacgcgcccgccaccaggaccgtgtccgcctgctgcgcgccaagctcgacaaggccggcatcccgcatatgccgaacccgagccacatcgtccccgtgatggtcggcgacgccgccaagtgcaagtggatctcggacctgctgctcgacaactgcgacgtctacgtccagccgatcaactacccgacggttccggtcaagaccgaacgcctgcgcatcacccccacgccgctgcacaccgatgccgacatcgagcatctggtggaagcgctgcactcgctgtggtcacgctgcgccctggctcggcacgtcgcgtaaagtgacgcgcgacggcgctgcactctcggcttggagcctacggcagacagcgagagtcataagctattgaaagaacgcggaaaccccactcgccgcgtcatcctcgggctcgtcccgaggatctaagcacgttgcccggaatgcaacggtgctgggtgtatggaagagcgaagcaagctcttcactctaccgccaacccgcgtcttctgtcccgccaagcgtccatccacgtccagcaagttggccgctcagcagatgctcggcacaagaccgagcatgacggtcgtgggtttgggaacgccgtaacctattcgacgaaaacagtgccgcacactcgcgtacgtcgcggaccgcccgcaaccagcccctcaggccgctttttcgcggattgccaccagtgcggcggcccgctgccgggcttcctggtcgacggcgaacacgtcgtccatcgtcgcggcatcgggcagatgcaccagctgatccatgacggcttccgtcacgtcggccatggcgaggaatgacaggcggccggcgatgaaggcttccagcgccacttccttggcggcgttcagaaccgcgccctgcacaccgccgcgcgtcatcgcgagccttgcaaggcgcagcgccgggaagcgcgcctcgtccggcgcctcgaaatccagccgcgccagcttggcgaaatcgagccgctcgatcggcaggttcggccggcgcggatgcgccagcgcgtaaccgatcgcggtccgcatatccggcgcgccgagctgtgccagcaccgaaccgtcggtgtagcccaccatcgaatggatcaccgattgcggatgcacgatgacctcgatctgatccggcgccagcccgaacagatgcttggcctcgatcatttcgagcgccttgttgaacatcgaggcgctgtcgatcgagatcttcaagcccatcgaccagttcggatgcgcccgcgccgtctcgacgttcacacccgccatctcctcgagcgaggcgttgcggaatggtccgcccgacgccgtcaggatgatccgttccacggcatgacgctggttttcctccagcacctggaagatcgcattgtgctcgctgtcgacgggcaaaagcttgccgccgcaacggcgcacggactccacgaagaggtcaccggcggaaaccaggcattccttgttggcgagcgcgatatcggcgcccttgcgggccgcggcaagcgtcggcgcgaggccggccgtgccgacgatcgccgccatcacccagtcggcatcgaggtccgcggcttccatcaacccggattgaccggcggcgaccgcgattccgcttcccgacaacgcgcccttcagcgcctcgtaatggctttcactcgccgttaccgcgagcctggcgccggcagcgcgcgcctgctgcgccagcagatcgacgttttcgttgcccgtcagcacggaaatctcgaaactttcgcgaccgccgagatgtttcaccacgtcgagcgtattttgcccgatcgagccggtggaaccgaagatgctgaggcgccgaggcccgcttttgcctgatgtcatcaaggatttcgccaaaattcccgcatttgtcctcggctctacaggggattggaatgagcggcaagtgtgcagtgcagcagattttttgccgcgaggggtttacatcccagccggtcgatgtgatcctgataacaatcctcagggataggagcatcggcaatcgtatcggttgcaattttaaagctccggcggcgcagatttcgcgcctgcttccgtatccgcgccaaggccggacgcgacaaaaaccagagctgatgttgggtttgcaaggcgaattcccgcgcgctttcgtgcgttcatgcctgagaccgacatcgaccagaagaccctgaccgttacgaagggacaaatggccatgagaacgacaagcagtttattgcttctgcccgccgcgctcatctcattcgcaccgcgcgtctacgcggaaaacctcgtcatctggacaccggtaaaggtgtccgagcgctcctacaaggcgaccatgggctttcgcctgcccaccgaatgggaaaccagcgccggcgccgatatcggccttgcggcatcgaagggcggcgtcctgctcggcggctccgagcaggcctcgctctggggcaagatcaccaaggtcagcgtcacgcccgccgcccgcgccgagcggtcggcgagcctgcgcgtcgatacgctgcggggtagcggcgcgctgatgcttagccggtcccgcagctggattttctccgatacgctggacatggtctcgacccgcttcgtgcaggtccgctatgacgccgtcgatgcgcgccagacattcgtcgacacctcgcaggccctgaagctgatccagccatggaccggcacctcgatctcggccgcggccacggtgtcaagcttcactggcgatgtgaccagttcgctggcactgaaccagataatcctccccgaccttaatttgagcgcaaccatcagcaatcctggctcatccacccggtccggaagcgtaaatgtgaactaccgtgtcacatggtgatcacgcacgcggcaccggcgggtataatgttcggatggaggaaggaaggcatgacatggcacattttgcggcagatgacagcagatcaccgtcttcgggcggcatgaacgaacacgcggcgttgaaagcagatgtctccaccgcattggcggttgcgagcggcttcgacgcctcgcacatcgcggtcacggtcgagcgggacgaaatcgttctcagcggcctggttgccacgaaagccgatctcgccagcgcgatcattgtcgccgaaacgacggcaagcgatcacacggtccgcaatcgcattgtcgtcgcgcaatccgtgctcgacaacctcggcgaggtcggctgaccgcagcgaccgacactagccggcgaagcgttccatcaggaagctggagccggcgacgcggtctgtcttcggtgtcgtgacggggccgccgggctggtagctgacggcgatcagaaggccgccgatcaggagatacgcaaccgcgagcatcgagagtttcatggtcattggcctggtcctttggcttggctgctttgccagaacaacgcgacggccggccagatgttcccttctcgaaatggcacgccggcacggcgcgccggcaacgaaaaagccgcccctgacgggacggcttttcctttgaaatcaaatgataaaatcagccggccggcgtaagcgtgaccgatgtgccggtggccgcgacattgaggccgagctggccggtgacgctgatggtctgcagctggatcgagcccgccgtgccgccgaaaaggatgttggcgccgacgccgcctgcaagcgtcgcctcggcggtgatcccctgatagaggccaccgagcgaaccgcgatgatagcctgccgtcggggcgaacacggcccagacgagacggccgcgcgtggtgaagccgagatcgacgcccatcttgcggatggtgccgctgtagcgatcggacgcgccgcgcgtaccgctgaagacgcaatcgacggttttcgccgaacccaagacgtagccgacgccgccgccgacgtcgcaggtcagaacgccgatcttcacgccatcgcgctgatccggctcttcataggtcgtcacgagatccgctgccgccaccgaggtggcgaagacttgagccagcgaagctgccgcgacgatcgttgcgattgtcttgttcattgtggtctccttagtatcctgacggaaaaagatagtgccttgttataacttaccaaccccggccgtaggaacaaaattaacaaatgctcaaaagcaaatgtgtggggtctgattcgctacatgcatcctgatttctggctgatttcgggcgccattcggttagcgcctgaataaatcccgaccatggcctgttgttccaccgccgtcgcgcattcttgtcctcaagaacgccgttgacgagaagccggatcgccggcgcgcccacaaaaaaggaccccgggattggccgggatccttgatcgccaagcgacgattactgaatgtcggggcatgcctcgctctgcgaagcgccgctattgccaccctgcgcggccgtcgaacccggcatcggctgcggcgggcagcgcgtccgatcgacagtgcctgtcgtattggtattgggccccgcgttcattgttccgggggtggtgctgtaggtggccgtcggatcgaccaccgtcggcgatgtcccaggcgtattcggagcatccgggtttgcgccaccgccgctatcgaccgtgctgccgccgatcgtcgatcccgatgggctcggattggactgggccattgccccgcctgcgagaccgagtgccaggatcgatgccgcgatcagtttcgctttcatgatgcttctccttcgctgttgtctacccgtggtcaacgaaggagaatcgtcatcgttccataaaaagcgtcagctgccggcgcgacgctcaggccgccagatcgtcatcgacacgccggttgtcctgcgtgctcgggggagcactgattttgcggccactggtcagggcgccaagatgataggccgccagccgcgatgcccgaaacgcgaaacgcgcgatctccagtcccgcgcgataggcatagacgggatagcgttgagcgagcggcagcctgaagcgccgcccctgctggatgtcggaaggaaagcccgcttcctgcgagatcggaaccggcgaaatgaacatcccgcgcagcccgtcgaagaattcgagatcgaacgcgatatcgtagggcaaccgcatcggcacgaggtcgttgcacatccattccgccgcctttcggttgatcagataggcgccggaccctttttcgcgtgtcagcgagatcgccagcgaacgcgtctgcgaaagcggaacagccgtgaacttgcgtcccttgttgacgctcgacaggcgcagcacgtcccaatgccgatgctcttccagggcctcggcgatgacggtggcgagattgtcaggcagcacgagatcatcttccaggatcagcgcgtggtcatgcgtcgattccagaagccgcttcgcgcaggccacatggctgagatagcagccgacctctcccggattggtcaagcgcccgtggcggcgccggaagccggcctcgtcgtaggcagcgatcggaaagtcgagcgcgcggccgtcgacggcggcgatgcgctcgaagggcaggccgagcgtgttgagctgcctcgccatcgagtgaagccgcgcttccgcgcggtccagattgatcagcatcgtgagaaaagatcgttcccgcttgaaatccgcgcgactgaacgtcggagcgctggagagcacgccacccatgcattatcctcaagaccgtatcaggccagttcaatgtcactcacggcttgagacaacatcgacttatacgtctcagctgcacggccagtttgcgccgtgcttggcgcaatttccggtcatattcaagtgtaaattcagattatcgatcaggaatactcactgaatactgcgaaaccctcgaccaacattagctcctgaaaatacaacacaattttgtgacaagatgtgaaatttccgggacgccacccggaaatttctattgtcttggtaagcttgccctcgcgggctcagctctgccagtcgtccgtcggcgtctgcgcggcggcgacgaccggactgtcgtccagcgaataggcgcgaatgtagtcgatcttcatttcggagccattgggcagaccgttggccggcgtcccggcgatgccaccgatggcgaggttgacgatcatgtacatcgggtcgttcatgtcctcgggcgtatcggctttcgcaaccgcgacgtcgtcgaaataccagacgatctgctccttgtcccaaagtacgccataggtatgaaaaccctcggtgctcgcgacattgaccgccgtctggtccatcgtgtacttgccgttcgcaatcgaatgcgccgtcacattgacgatgttgggctcctgcccgcgcatttccaccacgtcgagttccggcggccaggagccgtccgcggggagcagccagaacgccggccaggcgccctgctccgtcggcatgtcggcgcggatttcgaagtatccgtaggtctgcgcgaaggtggaataggtgttgagcatgccggacgtatagtcgaagccttccagctgcccggcgagcgacgccggcgtctcggccgccgtgatcgtcagcacgccgttctgcacggagaacggattgaccgcggtcgtgccggcataggaaggattgatgtaccactggtcctccgcgttgttgggcagcgtgctccccttctcgctcgcccaccagaacttggcgtcccacgttccctggtcgccgttgcgcagggacaggctgttgaactcgtccgcgaaggtgagcgacagcgccgaacgatcgagcgtcagctggaactggtcggcattgagggccgaagccgtcgtgttggcgagcacgaggctctctccacccccgaggtcgatcctgagattggcgccctcctgtgtcgagcggctgagaacctgatcgaagctggtcagcgaatagttgttgaaccggatcgtgtcgtcgctgctgaaatcgacgatcaggtcgctgccgttgccgcgcgtgaacaggaaagtgtcggcgccgccgccacccgtcagcacgtcgttgcccgccctgccatcgatcgtctggctgcccgcggcgcccgagatgatgttgtcggcgctattgccgaaggcatagcgcccggcccccgtcaccgtcaggttctcgaagttctcgggcagcgtatagctcatccaggtgttgatcgtgtcggtcccgccgcccggcgcttcggccgcgcgattgatgccggagtagaggtaatagatatcgtcacccgtaccgccctgcatggtcacgttcaccgaactgtcaccccatatgctgtcattgccggcggtgccgttgagcaccgggccggatcctgttgccgagaaccaggcggttgatgttccgctgtagaacaggcttgcgccgaccgcgttctgaatcgactgtggcatggtcatctcctagggttttcgtcattgaaatatcgccaagggcatcctcgcgatgccctgatggccaaacgctcctcccttccccgatgcgcctcctcccggacgccatcgggcattacgcacgtcacgtcgaggccggccttcattcctccctgaaggccctcgccgcttggtcggtgaagggcttggcgagataggcgagcgccgtccgctcccccgtctcgatgaacgcctccaccggcatgccggccacgggtgtcagtgccccgagcctgcgccattcgtccttcccgatatcgacacggacgctgtaatagctctcgcccgttcgctggtcggtcgtgagattggcgccgatgcgttccacccgtccattgagctccatggtggtgcgctggctgaaggccgaaagccgcagcaccaccgtctgccccagagccacctggtcgatatcgcgcggcgcgagcctgagatcgggcgtcagcgcatcgccatcgggaacgatttccatgatcgaggcccccgcctgcaccaccgcacccggcgcatgcaccgaaagctggtggacgatgcccgcctgcggtgcgcggatctcgatatgctcgagatcgtccttggccgcgacgagccgttccgaatattcgccggtatcgctttcggcctgccgcagctgctcggagacttcgctgcgcctgtcgtcgccgagctggatgatctgcagttccgtctccgcgaccttgcccttcacctcggcggccgacgccaccagattgccgagctcgccggtgaggtttgccgcgtcgcgctccagcgcgtagacccgcgttgccggtatgatgccctgtttcaacagcggctgaaggctcgccagctccttgccgatgatccgcatcgcctgccgcttgccatcctgttgcgacaccagcccgtccgcctgctggccgagctggcgaatgcgctcgcgcagctgcgcgacctgtccgttgagcgaggcccgccggtcgtcgaacagccgccgctcgccctgcatcagcgtctcccgctcctcgggggcggcctgcgtgaccagatcggaaaacgcaaacgtctcccgcccgtcccgctctgcagaaaggcgcgccgtgcgcgccgccagctgccgcaatcggcgagacacgatcgcgaccgtcgcgcgcacctgtgtgtcgtccaaccgcagcagcacctgcccggcttcgaccttgtcgccattgcgaacgaagatctcgccgacggtcccgcccttcggatgctggatcggcttcacgtagctgtcgacgacgagcgtgcccgaggcgatcaccgcgccgttgaggcggatggtcgccgccagactgccgagaacgccgacgagaacgagaaccgccgccagcgccagaagcgccagccgccggatggcgcgctcggcgatcggtgcgcccacactgtttgcaccacgcttcatcgtgccgccctcccctcgctcacccgtccgaaacgcaccggcgagaatgtcgccgagacggcggccacgggctgtccgagcacctcctccttcggcccgaagccgcgcatctggccatcggcgagcaccatcaccttgtcgacgccggcaagcgcgctcggccggtgggcgatgacgatcgccacgccgccgcgctcacgcacgcccgcgatggcgcgtgtcagcgccgcgtctccctccgcgtcgagattggcgttcggttcatcgagcacgacgaggaagggatcgccgtagagcgcgcgcgccaatgccaggcgctgccgctggccggcggaaagcgtcgcgccctcctcgccgatcacggtatcgaaaccggcgggcatccgcacgatcatctcatagatgccggcggccttcgcggccgatatgacggcctccgacgacgcagaaggatcgaaccgggcgatgttctcggcgatcgttccctcgaacaggccgatctcctgcggcaggtagccgatgtgcgctccgagcgcttccggttcccattgcgacagcgacgcgtcgtcgagccgcacggcgcccgcgcgcgccgcccatatcccgaccagcccacgcgccagggacgacttgccggacgcgctcggcccgacgatcccgatcgcctcgccggccttggcttcgaacgatacgccgcgcaagagcggcacggtcgcgccgggagccgagagatgcaggttctcgaccttcaggcctttcgtcggcgccggcagccttacatcgggatcgccgacacgatccgcctcgctcagccggacaagacgcgtccagctctggcgcgccgcggcaaagccccgccactgcccgatcgccagttcgacaggcgcgagcgcccggctgatcaggatggagctggcgatcatgatcccgcccgtcgcctcctggcgaatgacgagaacggcgcccaccgcgagcacgcccgattgcaggaccagccgcacgacgcgcgacaatgtcgatagcgacacggtgatgctggtcgttcgaaattgcgtctggcgatagcggaggttgatcgccgaccagcgttcctccagccgccgcgaaaagcccatcgaggccaccgtctcggcgttgcgacgcgtggcttcggcaagcgccgtccgctcaagggcgatcccggccgcggcccgtgtcggcgcccgcgtgcgaatttcggcgatgatggtgaggccgaccagaacgagcgcgcccgccagcgcgaccaccccgatccagacatgaaacaggaagcagaggccgagatagaagggcatccacggaagatcgaacagcgccgtcggccccggcccggaaaggaacccgcgcaccgtgtcgatatcgcgcatcggctgcagcccgttctcctccacggaccgccgcgatggcgcggtggcgaaggaccggaagacgatcggcccgaaccgctcgtcgaccgactgtcccagccgcgccagcaccagcgaccgcaggagttcgagcagccccaggaaggcgaagagcgtcagcgttatgatgccgaggccgacaagcgtcggaaggctgcggcccggaatgacgcggtcgtagacctgcagcatgaagaaggagccggtgagcgccagaatattgacgaagcagctcgtcatgccgatcccgatcagcgtaccccgcacggacgaaagggcggaaatcaggaacggcgcggatgtttttgccttgaattgggacaaattgcctctcgatcgcgtgaaactggggcagtgatgtcccgaacatggatcacaacagtgacgagaacttgctctttctatggttgtgcaaaactaaaatttctcactgttaacgcgagttttgcactgcaacatgggcatgtcccgtcatgacgcaagatcgtcctcctatgagacagctgcccaaaatttcagtttcccgatggcctctcgcctcgcggcggcgaacgggcgagcggggaattggaaagatgggggcggctcaacgggccctgtcgtcaaaagcctgttgatcgacacgatcagtcaagctatgcaggggacgttgtccacgtagctcagcaggatagagcacaggattcctaatcctggggtcggaggttcgaatcctctcgtggacaccattttcctgaaagttcaatctcttgccatggctctggccggctccgccgcgtcatgcgcgatgcggggaagacccggggcacccgggtcttcgatatcagccgatcactcgcccaggcgctgttcggccagccgcacccaatatgagatgccgtggctgatgacctcgtcgttgaagtcgtaggccggattgtgcaggccggccgtatcgccgttgccgatgaagatgaaggcgccggggcgggcgttgagcatgtaggaaaagtcctcgccgcccatcatcggatcgatatcgggattgacgttggcggcgcccgcgatgtcggtcgccacggctgtcgcgtagacggtctcgtccgcatggttggatgtgacgggataattgcgctggaactggatttccgccgtggcgtcatgcgcttcggccacgccggcgacgatctgcctgaaacgtgtctccgcgaggtcgcgcaccgcctcgtcgagcgtgcgcaccgttccggcgaacacggcctcgttggggatgacgttatgcgcgaagccggcattgaacttggtgaccgacaccacgaccgagcgcagcggatcgacgttgcgcgatgcgatcatctgcaggttggtgatgatctgcgtgccgatcgcgatcggatcgatcgtgcggttcggctgtgccgcatggccgccgcgccccttgaccgtgacggtgaactcgtcggtggcggccatgatcggccccttgcggatggcgaaatgcccgacgggcaggccgggcatgttgtgcatgccgtagacctcctcgatgccgaagcgctccatcatgccgtccttgaccatcaggtcgccgccggcgccaccttcttccgccggctggaagatgaccgcgacgttgccgttgaaattgcgggtctcggcgagatacttcgcggcgccgagcagcatcgccgtgtgcccgtcatggccgcaggcgtgcatcttgcccgatatcttcgatgcccatggctttcccgatatctcggtgagcggcagggcgtccatgtcggcgcgaagcccgattgcgcgcgatcccgcgccattgcccctgatcaggccgacgacgccggtgcggccgatgccggtcacgatctcgtcgacgccgaattccttgagcttctcggccacgaaggcggccgtctcttcgaccgcgtagagcaggcccggccgttcatgaatgtgccggcgccattcggtcacttcgtcctgaagttcggcggctctgttcaaaatcggcatgcttgcttccctgctgaaaatcgaaaacggcggcaatagcgggcttgtatgtcacggctcgcaaataagttagacaatggcctttgccatgtcatggccatatacgttaaataggggaaactttcgagacatcaggacatctttaaggacaaaccgtgtcgacgcgccagaatcgcctgcttgccgccctgcggccgatctccatcgccgcctcggcggccgtcatcgccttctccgcgacgtccgccgcctatgccaacccttatatactggtcgatgtccagagcggccgcgtgctcgagcacgaggaagccttccgcaagtggtatcccgcctcgctcaccaagctgatgacgatctataccaccttcgccgcgatccgctccggccagatcagcatcgatacgccgatcgccatgagcaagaccgccgccgcccagccgccggccaagatgtatttcaagcccggccagaagctgacgctcgacagcgcgctgaagatcctgatcgtcaaatccgccaatgacgttgccgtggccgtcgccgaagccgtgggcggtacgcaggacgccttcgttctgaggatgaacgccgaagccgagcggctcggcatgaccgacagccacttcgtcaatccgaacggcctgcccggaaagggccagtacacgacggcccgcgacctcgcgatcctgtcggtcgccctgcgccgcgatttcccgcaatatgccagctacttctcgctggaggggatcaccacgggcaagcagaacattcccgccatcaacatgctgatcggccgcttcgccggcgccgacggcatgaagaccggcttcatctgcgcctcgggcttcaaccagatcagttcggccacccgcaacggccgcacgctcgtttcggtcgtgctcggcacagacagccttgccgcccgcgccgatgcctccgccgacatgctgcaaaagggtttcacatcgcaattccccggcaccgacacgctgggctcgatgaagccctacggccagacccaggaggtcgccgacatcacggccgagatctgcagcgccaagggtgccaagatccgcagcgaaacgcgcgacgaagtcggccgcatgaagatcagctctccctatatccaggaaatgaatcgcgagccgaacttcgtctatgccggcctgatccccggccaggccgagccgcagcccgacaaggtggcgacggccggcaccggcgatatcgccaacgtgccgatccccaagccgcgccccacatccttctaaggcattcagacctccagggcattttgatatgagcgcagttgccgatcgcatcccggtcaccattctcaccggctttctcggcgcgggcaaatcgaccctcctgaaccgcatcctcaaggatccggccatgaaggacgccgccgtgatcatcaacgaattcggcgatgtcggcatcgatcatctgctggtcgaaagctccggcgacgccatcatcgaactgtcggacggctgcctgtgctgcaccgtgcgcggcgaactggtggatacgctcgccaacctgatggatgccatccagaccggccgcgtcaagccggtgaagcgcgtcgtcgtcgagacgacgggccttgccgacccggcgccggtcatgcaggcgatcatgggcaaccctgtcatcgccgagagcttttcgctcgatggcgtcgtcaccgtcgtcgatgtcgtcaacgggttgcggacgctcgacaaccacgcggaagccgtcaggcaggtagccgtcgccgatcgcctgatcctgtccaagaagacgctctcctcccccgccctgctgcggacactggaggcccgcctgcgcgcgctcaacccgcgcgccgcccttgccgatgccgacgatgcagcgaccggcaccgccgccaccctcgtcaacggcctctacgaccccgccaccaagagcgccgacgtcggccgctggctgcgcgacgaggatgcccacgatcacgagcatcatcatcacggacatgacggccacggtcaccatgatcatgggcatcaccagcacgatgatcatgaccatcatcaccacgaccatcagcacgcgcacgacgtgaaccgtcacgacgcctcgatccgctccttctcgatcgtcgaggacaagccgatcgacccgatggcgctcgacatgttcatcgatctcctgcgctcggcgcatggcgaaaagctgttgcggatgaaggcgatcgtcgcgatgtcggatcgtcccgaccggccgctggtgctgcatggcgtgcagagcatattccacccgccgatccgccttcccgactggcccgatcccgcggaccggcgcacccgcatggtgctgatcaccagggacctgccggaagccttcgtcaaggacctcttcgatgccttcctgggcaagccgcgcatcgacaccgccgaccgcgcggccctgaacgacaacccgttggcaatccctggaatgcgtttctagcactccgggaatgggcttcgtgagagcaggcagtggattgctatcgtttgcggatcaggaagcggtgaccggtctcggtccgttcggtctcgatcagctcgtgaccatcctcgttgcagaaatgcggaatatcgatcccggcgagaggatcggtggtttcgacacggatcgtcgcgcccgatggcagcgacgacatcttctttcgtgtcttgatgacgggcagcgggcatttcagcccgcgcagatcgtaggacatggcgctcacgccgtcagttcctgtcccagaacttccagaacggcttcttggcggcgagctcgaccgattgaggctgctcgacgggcgccagggccgtcgcggcagggcttatcgggctcggcgtcggcaccggcacggacgccggattgacgatcgcggcatcggccgtcttcacggtggcggatgcatccgcgggcgccgagccggcggccgtgttggcggcgacggtcgtcgccgtcttcgcggccgtcatgccttcgagatcggcgaccttcatcatccggccggcttcgagcgaggtccccgtcggcgcgtaggcgagctcgcggcccttgcggctcttggcgacgacggccttgcgctcggcttccgacggatcgtaccacgccatgccgtcgaattgcttcgacgccttggcgtaggcgatgtcataggtcttgtcgtaggaggcaagcgctgccgtcagcgccggcggcgccgacatctcggggcacttgccgccgggattgaacgcacccgccgactgctggttgaagacgtatttcttctcgcagacattgacctcgggcggccgcttggtgacttcgaaattgtcgtagccgaccttcggcatcttccagaagtcgatgttctcgctcgtccggtgcttgaacatgttctcggccgtcatccggaacgggaaggcctgcagctgcacgccggtctggccgccctggaaggcgtcgcgcgcgaaggcgtagatctcgagcacctgctcgtccgtcatcgaatagcagccggaggaggagcacgcgccgtggatcatcagatcggtcccggtacgaccgttgacggcatcgtacttgttcgggaagccggtgttgatcgcgagataatacttggagttcgggttcaggttggccttggtcaggttgtagaaaccttccggcgcctgcctgtcgccctgtttcaccttgggaccgagacggccagaccaggcgcagatcttgtagccggcgatcttgtcgtaacggttgtccgtcttcgctttccagatctcgagctggccctcttccttgaagatgcggatcaggatcggcgaattgcgatccatgctcttggcggccatttcggtgaggatacgtggcggaagcggctgttcgaccttgttcttgacttgcgagaggtcgatctgcgtggtttccaacgcgtcgttgcagccggccagggccagcgccatcagcgaaacataggcaaaatgacgaaagcgcatttcagctagcccaattacgagatgcagcccgatccggtgaaccgtccagggtcacgcgaagcattggcccgatctggtttacaaaaccttaatgaccaggccgcgcgcccacggccctcgcaagcacgaaagctattgataacaccaatgtggccaaggtttggccgcaatccgcggccgccctgcctgccccgcagcctctgttagaggttgcggcccatgttcaggaacttctggcggcgatcgttgcggatctgctcgccggagcggttggccagctcgccgagcgcattggcgatgacgtctccggtggaggcgatcacgctgtcggggtcgcgatgcgcgccgccgagcggctcgccgatgatgccgtcgatgatgccaagcgccttcaggtcatccgaggtgatcttcatgttggtcgccgcttccttggcgcgcgccgaatcgcgccacaggatcgaggccgcgccctcgggcgagatcacgctgtagatcgcgtgctcgagcatgtagacccggttgccggtggcgatcgcgatcgcgccgcccgagccgccttcgccgatgacgacggagatgatcggaaccttgaggccgaggcacatttccgtcgagcgggcgatggcttccgcctggccgcgctcttcggcgccgacgccgggataggcgccggccgtgtcgaccagcgtgatcacgggcaggccgaagcgatcggccatctcgagcacgcggatcgccttgcggtaaccctcggggcgcgcgctgccgaaattgtgcttcaggcggctcttcgtgtcgttgcccttttcctggccgatgacggcaaccggctggccgcggaagcgtgccagaccggcctggatcgccgcatcctcggaaaacttgcggtcgccggccagcggcgtgaattcctggaacagcgtcttggcgtagtcgacgaagtgcggccgctgcggatgacgcgcgacctgggtcttctgccaggcgttgagcttcgaatagatttcgaccgtcgcttcgcgaacacgaacttcgagcctgccgatttcatcggatgtgtcgatgctctcgtcttccgaggcaatcttcttcagttcgatgatcttgccttcgagatcggagatcggcttttcgaagtcgagataattgtgcatgaggtgcgtttccgttccttgtgcccggggcatttgtcttctggctgcccttgtcgccggtcctaatcctgctttttcgcctgtttggcaagggggtgatgcgtttggaccagttgctggagcctttcttccagtacatgcgtgtagatttgcgtggtggaaatgtccgaatggccgagcagttcctgcaccacgcgcagatcggcgccgttggccagcagatggctggcaaaggcgtgccgcatcacgtgcggagagatcatcgatggggtgagccccgcccggatcgccaggttcttgaggtcgcgcgcgaagacctgccgggcgagatacccctccttcgaggccaccggaaacagccaggggctttcctgtggattttcggcttttgccgcctcggccgccagcatccgcccgtagagcttcagcgcggcgatcgccgattgcgacagcggcaccagccgctccttgttgcccttgccgcgaatgatcaggaagcggccttcctggtcgagcacgcgggccggaagcgacaccagctcgctgacccgcatgccggtggcatagaggagctccaagagcgccagcatgcgcagccgctgcaattgcccgggcgcctcgtcctgcgcttcctcctcggccttttccaggagcctgccgacctcgtcgacacccatggtcttcggcagcgcccgcccctttttcggcgcgtcgaggatgccggtcggatcgtcggtgcgcatcccctcggcatagagaaacttgtagaactgccgcatcgccgccagccgcctggcctgcgacgacggcttgaatccctgcgcggcaagcgacgccagataggccgacagatcagcggacgccgcctccgtcagccgcacgcccttgccgttcaggaaggaatgcagatcgtcgagatcgcgttcgtaggaggaaagcgtgttggccgcggcaccgcgctcggcgctcatcatctcgagaaaggactcgacgtgaacgcggctgagatccctcatcgcatcacttcttcgccgggctgatcgcgccggtggcgggcgggttgatccgctcggaaggaatgcggatcgtcacgtcgcgctccttcggctggacgaaagtcacaagcgcccacatcgttccgtatatcgctccggcgatgaccgccaatatggcgagaaatcggaacagactcggcattcaacaactccataactttgcttctttatgaagaagcgcgtttgcaagtgcaagaaggagcatttgaaccatgattcccttacctccgacttgacgctacacctgcatttgttgataccgttcgcaaacaaagtgtgaatggaccaatgaacgacccagttctgatcgttgccgatagcctgagggacagagctcgtgctgcgctcggttcgcgcaatctgatcctcgtcggtctgatgggagccggcaagtcgtcggtgggccgcatcgtcgccacgcagctgggcatcccctttatcgacagcgatgcggaaatcgagcgcgtatcgcgcatgtcgatcagcgagcttttcgccgcctatggcgaggacgagttccgcgcgctcgagggacgggtgatgaagcggctgctgaagggcgggccgcgcctcgtctcgacaggcggcggcgccttcatcaacgaccgcacccgcaagcatatcaagaggggcggcgtctcggtctggctgaaggccgatctcgacgtgctctgggagcgtgtcaacaagcgcgacacccgcccgctgctgaagaccgaaaatcccaggcagacgctcgaaaacctgatgaacgcaagatacccgatctacgagcaggcagacctcaccgtcatctcgcgcgatgtgcgcaaggaagtgatggccgaggaagtgctgagagccgtgatcgacagcagaaccgaaagtgcagcctgatgaacgcgattgccgcctccaccgaccgcaaggttcatgtgccgcttggcgaccgcgcctatgacatcctgatcggccccggcctgatcgcgcgcgccggcaccgagatcgccgcccgtctcaagggccgcaaggccgccatcatcaccgacgagaacgtcggcccgctctatctcaacgcgctcgtcgagagcctgacggcctccggcatcgcgtcgtcggcgctggtcttgccggccggcgagaagaccaagagcttcgagcatctgatgaccgcctgcgacaaggtcctggaagcccgcatcgagcgcaacgactgcgtgatcgcgctcggcggcggcgtcatcggcgacctctccggctttgtcgccggcattgtccgtcgtggggtgcgcttcgtgcagatcccgacatcgctgctgtcgcaggtcgacagctccgtcggcggcaagaccggcatcaacagccgccacggcaagaacctcatcggcgtcttccaccaggcggacctcgtgcttgccgataccgatgtcctgaacacgctctccgagcgcgaattccgcgccggctatgccgaagtcgccaaatacggactgatcgacaagcccgatttcttcgcctggctggaagccaactggcaatccgtcttttcaggcggcgcggcccgcatcgaggcgattgccgcaagctgccaggcgaaatcggatgtcgtcgtcgccgatgagcacgaaaacggccagcgcgccttgctcaatctcggccacaccttcggccacgcgctggaagccgcgaccgcctacgacagcagccgcctcgtccatggcgagggtgttgcgatcggcatggtgctcgcccacgaattctcggcccgcatgaaccttgcaagcccggatgacgcaaagcgcgtcgagcgtcatctgagagaggtcggccttccgacccgcatgtcggagatcccgggcacgctgccacccgccgaagtgctgatggacgcgattgcccaggacaagaaggtcaagggcggccagctcaccttcatcctcacccgcggcatcggccagtccttcgtcgccaacgacgtgccggcatccgaagtattgagcttcctcaaggaaaaacacccgcaatgaccctcgaaggcacgctggcatttctttccgcatattggccggaaattctttccatcgtggccctcgtcctcgtgtccgccttcttctccggctccgagacggcgctgacggccgtctcgcgcagccgcattcacacgctggaggcaaacggcgaagagcgcgccggcatcgtgcgcaaactgatcgagcgccgcgaccggctgatcagcgcgctgctgatcggcaacaacctcgccaacatcctggcatcggcgatcgccaccagcctgtttctcggcctgttcggcagctcgggcgtggcgctggcgacactggcgatgaccgtcatcctggtcatcttcgccgaggtgctgccgaagagctgggcgatctcggcgccggaacgcttcgcgctcaacacggccggcggcgtcaagctgttcgtcgccttggtcggccccgtctcgtccttcgtgaacaggatcgtgcgccgcattctcgcgcttttcggcatcaatctctcgcgggaagtgtcgatgctgacggcgcacgaggaactgcgcggcgccgtcgatctcctgcatcgcgagggctcggtggtgaaggccgatcgcgaccgtctcggcggcgtgctcgatctcggcgagctcgaactgtccgacatcatgatccaccgcctggccatgcgctgcatcaatgccgacgacccgcccgaggtggtcgtgcgcgccattctcgacagccccttcacccgcatgccgctctggcgcggctcgaccgacaacatcatcggcgtcgtgcactccaaggacctcctgagggcgctggccgagcgcgatgccgagccggagcatctcgatatcgtcaagatcgcccagaagccctggttcgtgcccgacagcaccaatctcgaagcacagctcaacgccttcctgcgccgcaagcagcatttcgccgtcgtggtcgacgaatatggcgaggtgcagggcatcgtcacgctcgaggatattctcgaggagatcgtcggcgacatctcggacgagcacgacatcgagatacagggcgtgcgccaggaggccgacggctcggtggtggtcgatggcaacgtgccgatccgcgacctcaaccgcgcgctcgactggcagctgcccgacgaggaggcgacgacgatcgccggcctcgtcatccacgaatcgatgaccattcccgaggagcgccaggccttcaccttctacggcaagcgcttcatcgtcatgaaacgtgacaagaaccgcatcaccagactgcgcatccgcccggcggaggagaaccagaacaatcccgcctgatcgaccgccccctcaaccattgcacgctgcgggaggagcccggcgggcagcattctaatggatttgatatgtttgacattctctggcgctcgatcgccatcggcatcggcgccaccattctcatggacatctgggccgtcatcctcggcaagctgaccggcaccggtctgcccaactggggaccgcccggccgctggctctggcatctcttcgccaagggcacggtctttcacgacgatatcggcaaggccgcgccctatgagcacgaagtcgcgctcggctgggtcttccactacgccgtcggcatcatctacggcatcatgctggtgatcctgaccggcccttactggctgatcgcgccgaccttcctgcccgcctggatctggggcatcgtcaccatcgccgccggctggttcctgctgcagccgggcctcggtatcggctgggcggcatcgaagacgccgaaccccaccaaggtccgcttcctcggtctcgtcgcccacaccgtattcggcttcggcctctatgcgacggcgcttctgattcgttagaggctgcccgccatccttgcgaaatcgccgcgccgcgcccatatgacgcggtgtcggcttaccagcgcaccggctctccgggcgccgccggctccaccgccagcgcatgcaaccccgcgtccagttcaggcttcagaagctccgtgatcgcccggtgacgcgccagccgtgtcatgccggcgaacgacgccgagacgatcctgacccgcatatgggtctcgccagcccccgtgatgtcggggtgatgaccggcatgcaggtggctttcgttgatgacatcaagccgctccggagcgaatgccgcgttgagcttttcttcgatggaggattgaactgtcatgagccgatcttgctgccttgcgaaaaaggttcccaccaagccagcaacattcccgtttgtcaattcttgtcctcacctattctgagccccataattagcgccgtcatgagacttgattccaaatatttcgaccgcatccgcacccgccgcaaacgcgagcaggaacccgaacaggcccctccgacctgtcagtgggacggctgcgacaagaaaggcgcgcatcgcgcgcctgtcggccgcaatgccgaggggcagttctttcttttctgcttcgagcacgtcaaggaatacaacaagggctacaactatttctccggcctctcggacggcgagatcgcgcgctaccagaaggaagcgataacgggccaccgcccgacctggaccgtcggcgtcaacaagtcggctaaggatagcccgatccagtcggatatccgctccggcgcctatacccgcgttcgcgaccccttcggcttcgtcaaggaaaacaagagcagcggcccgcgctttcccgaacagcgcaagctgaagagcctggaggccaaggctttcgacaccatgaatctggcggccaacgccacatcggccgagatcaagagccgctacaaggaactggtgaagaagcaccatcccgacgcgaacggcggcgatcgtggttccgaagagcgcttccgcgccgtgatccaggcctatcaattattgaagcagaacggtttttgttaattcccgtccttgctcttggtcttcaatcgggtatggtccaaatcggctgaggccgcaggcaaccgcggcacccgttttcgcgtttgtctcacaggcgcctcggccacttccggacgcggcgtttcttgtccgggactatcgtcaagaatgctcgcaggcggcgatcaagtcgtccccgaggtttcgtttcagtcccggagaagcatcgccgacgttcagacatgagcgcgtgggatacccgcgacgccatgatcgcgaaacgagctgagacagtatggcagggtgtcggccacccgccttggagacatgatgagcaagattgaccttgatatctcggaacttccggacaccaccgtttccgtcagggaggtcttcggcatcgattctgacatccgcgtgccggcctacagccagggcagcgcctatgttccggatctcgatcccgactatctcttcgatcgcgaaaccacgctcgccatcatcgccggctttgctcataaccgccgcgtgatgatctccggctatcacggcaccggcaagtcctcgcatatcgagcaggtcgccgcccgcctcaactggccctgtgtgcgcatcaacctcgacagccatgtcagccgtatcgatctcgtcggcaaggacgccatcgtcgtcaaggacggcctgcaggtcaccgaattcaaggacggcatcctgccctgggcctaccagcacaatgtcgcgctcgtcttcgacgaatacgacgccggccgccctgacgtcatgttcgtcatccagcgcgttctggaatcgtccggccgcctgacgctgctcgaccagagccgcgtcatccgcccgcacccggccttccgcctgtttgcgaccgccaacacgatcggcctcggcgacaccaccggcctctatcacggcacgcagcagatcaaccaggcgcagatggaccgctggtcgatcatctcgacgctgaactatctgccgcacgagcacgaagtgaacatcgtcgccgccaaggtgaagagcttcggcaaggacaagaacggccgcgacaccgtctccaagatggtccgcgtcgccgatctcacccgcgcttcgttcatgaacggcgacctctcgaccgtcatgagcccgcgtaccgtcatcacctgggccgagaatgccgagatcttcggtgacctcgccttcgccttccgtgtcaccttcctcaacaagtgcgacgaactggagcgtccgctggttgccgagcactatcagcgcgccttcggcgtcgagctgaaggaaagcgccgccaacatcgtcctggaggcctgaggctaacggatcatggcagcgcgtggtgacaattcgaaagcaaagcccggtgcacccgtcgacgtggagccgctgcgccgggcgataaccggcagcgtgcgcgccatcgccggcgacggcgaggtcgaggtgaccttcgccaacgagcggccgggcatgaccgccgagcgcatccgcctgccggaactgtccaagcgtccgacgatgcacgagcttgcggtcacccgcggtctcggcgattcgatggcgctgcgtctcgcctgccacgacgagaaggtgcacacgaccatggcgccgcagggctccgacgcccgcgccatcttcgacgccgtcgagcaggcgcgcgtggaatcgatcggcgcgctgcgcatggaaggcgtcgccagcaatctgcgctcgatgacctcggaaaaatacgccaaggccaacttctccggcatcgaacgcaaggaagacgcacccgtcggcgaagccgtcgccatgatggtgcgcgagaagctcacgggcgagaagccgccggaatccgccggcaaggtgctcgatctctggcgctccttcatcgaggacaaggccggcaaggatctcgagaacctgaccggcgtcatcaatgaccagcaggccttctccaaggtcatccgcaacatgctcacggccatggaaatggccgaggagtatggcgacgacgacagcgatcccgacgccgacgaccagcaggacgaggaagacaagccgagcggcgaagaccagaacgacgacgatgtcgaggacgatgccggttcggatgcagcccccgtcgaggacagccaggtcgccgacgagcagatggaggacggcgagaccgaaggcgccgagatctccgacgacgacatgcaggaagagggcgaggacgactcggagacgccgggcgagacccgccgtcccaacacgcccttcgacgatttcaacgagaaggtcgactaccacgtcttcaccgaggagttcgacgagacgatcaccgccgaggaactgtgcgacgccgccgagctggagcgcctgcgcgccttcctcgacaagcagctcgcccacctccagggcgccgtcggccgcctcgccaaccgcctgcagcgccgcctgatggcgcagcagaaccgctcctgggatttcgacctggaagagggctatctcgatccggcccgcctgacgcgcctgatcatcgaccccacccaggcgctctccttcaagaaggagcgcgacacgcagttccgcgatacggtcgtgacgcttttgatcgacaattccggctccatgcgcggccgcccgatcacggtcgccgccacctgcgccgacattctcgcccgcacgctggagcgctgcggcgtcaaggtcgagattctcggcttcaccaccaaggcctggaagggcggacaggcccgcgaacagtggctcgccaatggcaagccgcagacgccgggccgcctcaacgacctgcgccatatcatctacaagtccgccgacgccccatggcgccgctcgcgcaccaatctcggcctgatgatgcgcgaaggcctgctcaaggaaaacatcgacggcgaagcgctgatgtgggcgcataaccgcctgatcgcgcggcgcgagcagcgcaagatcctgatgatgatctccgacggcgcgccggtcgacgattcgacgctctcggtcaatccgggcaactatctggagcgccacctgcgcgcggtgatcgagcgcatcgagacccgctctccggtcgagctcctcgccatcggcatcggccacgacgtcacgcgctattatcgccgcgccgtcaccatcgtcgatgccgacgaactcgcgggcgcgatgacagaacagctggcctcgctcttcgaggatcaggcggcgcaaccgcgcggcggacgcgcccgccgcgccggctgatcgcgcatgatcgtttcgcggctcgttcgtcggcagatcgctcgagcggcaatgatcctcgccgtcctggcggcgggcatgccgccggcgcttgccgcggacggcgcgaaggtcgacagccgcatcatttccgacttcaagatcggctcgaacgaaaccaggttcgggccttttgaatttcttggcggactggagatggtctcgtccaatcgcctgttcggctcgatgtcgtcgatccgcttcaaggaggacccggcacggttcgtcgccgtgctggacaccggccactggatgaccggccgcgtcgagcgcgatgccgcaggcaagctctcgggcctcgccgatgtcgagatcacgccgatgcgcgaccgcgccggcaagaccttcgagggcaagggcttcatggacgccgaggggctcgcgctggcgaaggatcgcgtgctggtctccttcgaacagctgcatcgcgtcgatagctatcccgatcccggtttcgaaacctcccgcgccatcgagggaaagacgatccccttcccccgtagcgtgctgcgcgccaatcgcggcttcgagacgatcgccgtcgcgcccgcgtcgagcccgctgaagggcgggacgctgatcgtcgccgaacgcagcctggacgacgacggcaatgcctatgccgccattctcgacggcccgctgaagggcacgctggcgctcgcgcactacggcgacttcgacgccaccgacggcaccttcctgcccaatggcgaccttttattgctggagcgccgcttcaacatggccgcgggcgtggggatgcgcatccgccgcatcaagtcggccgatatcaagcccggcgccgtgatcgacggcgagatcctgctgcaggcggatttcggctaccagatcgacaatatggaaggcatcgacgccttcaccgccgccgatggaagcacccgtgtcgtcctggtctccgacgacaatcactcgatcctgcagcgcagtctgatgctggaattccggctggtcgagtagacggcctctatctcgcccgatcagccgtcttgctgtagattgcgggccggggagacggggatgaagaaccgggcggcaacgcgacgacgaaccaggacgcgcaaggcgacgagcggcctcctgctgctgatcgccgcctatctgctgcttgcctatgtcgtcctgcctgagatgtggatcctgcgcgacgagggccgcattgctcagttcggcccgatggtgacgaccacggagcaggatatccccggcgatcccatcaatgtcgggctggtggggacgaaggaagaggtcatccgcgccttcgccgccgccggctgggacccggccgacaagatcacgctcaagacctcggccgagatcggcctcagcgtcgtcctcgaccggcccgatctcgatgcgccggtcagtccgctcaaattcgagggacgcaagcaggatctcgccttcgagcaggcggtcggcaccagcgccgacgagcgcaatcacgtccgtttctggatgacgaaggaggtggcgaaggacggccggccgatctggctgggctcggcgagcttcgaccgcggtgtcggcttcagccacgacaccgggcagatcacccaccatatcggcccggatgtcgacgcggaacgggatctgacgatcggcgacctgatgaaagcgggccagttgtcgtcgacatacgaaatccccggcatcggcgccaccaggactggccgcaacggcggcggagacccctatttcaccgacggcaaggcgctggtcggcgtcatcagcgaagggaacggcacccgcaagtaagcggatgccgttcgcatcgattgtctgctggctcagccggttgcgcgggcgccctgcatcggcctgagaacgctcatcagcgcaccgtagggcagaagcatcacgaggccgaccagcagcttcacccagaaatcgccgatcgcccaggaaatccagcgcggtgcctcggcggcgaagacgccgagaacaggcgaggcctcgagcgcgaacggctcgttcgggccgaggaagacgaagacggcagcgaacgacagcgagaagaagatcaccgtatcgagcatcgagcccaacagggagccgatcagcggcgcgcgccaccaggcctgccgacgcagccggttgaacagcgcgatatcgagcaactggccggcgagataggctgtgccggaagcgatcgcgatacgcggcaccgatgtgaagaaggacagagcaacgccgacgaggaagccggcgaacaccaccttgcgcgccgcttgcggtccgaactggcgattggtgagatcggtgatcaggaaggcgaccggataggtgaatgcaccccaggtcaggaggtcggcgagattgacgccggcgaccgtgacgttcagcgggaactgcacgaggaagttcgacgagacgacgaccagcgtcatcagggcgacgtagataatgatatagcgcgtctgaagcatttttttatcctggggtatgccaccagctggagggacgatccggcaaagcaaaaggcttgaacgggatgatccgtgcaagccttttgaagccgtatagctagacgacggttattgcttaggcagcaacagccgtttcagcggtcttcttgacgatctggcggcgcagcagacgagcgcgcatcgacagttcgttttcgcttgccttgatcaggaaagcatcgagaccaccgcgatgctcgacggtacgcagagcagcagccgaaacgcgaagacggtaacgctggccgagcgcgtcggagatcagcgtaacctggcacaggttcgggaggaaccggcgcttggtcttgttgttggcatggctgacattgttgccaacgaggactgccttgccggtcaattcgcacatgcgggacatgggacacctattcttgtttttctcggccataactgcccgcccgcgcaaaacggacttgcaatccaacaggccatgattggaaagttgcggttctataatcagacagaccgtgcgcgtcaagccaaaccttggtctttccggcgattccctcgaaaagcctcgcaattccgtcaaaaagcttgtgttctctcaaggccgcgacaggcgtatagacggtatctcgtgatctgaccagcgcaccgaacaaggttgaattcatggctcactggagcaaacgcattctcatctccgccctggcgggcctgatggccgtgccggcgggcgccgccgaggtcgtgcatcgcacggagtacaaggtcgcgctcggcatcatcaccatcgcgcgggccgccttcatgacccgtatcgaggataacaagacctatagcgtttccggcgacatcagctcggccggcctcgccgacctcgtcacgaccatctcggccacgaccagcgtcgacggccagctgcgcggcaaccgcatgcaggcgacccgctatctcctctattacaagagcggcaagcgcgcccgcacctatgatgtccgctacaccaacggcaacatcacctcctcgacgataaagccgccgcgccagccgccgaagaactgggtcgacgtgcccgcatccgacatgcgcgccgtgctcgatcccatttccggcctgatcttcccggccgacaccaatgtctgcgcgcagaaactgccgatctatgacggcgagatgcgcatggatctggtactctcgccgagcggatcgaaggatttttccacgcaaggcttttccggcaaggcgacggtatgcaacgtccgcttcgtgccgcgctcgggctacaagaagggccgcagcgacatcgaatatctgagcaagagcagccgcatggagatctggttcgccaaggccgactccgccaacgtcttggcgcctgtcttcgtgcgcatcccgacccagtacggcccggtgaccatcaccgcggtgaaatacagcgcaagctgacgcagcagcccttcataaatgaagggtgcggcaagccatgccgcacgcttgttctcgatattgatcctgacgatctatggcgacagcgccaattagcgcatcgcgatgaccatcttgcagagcttgacaaggctgccgtcgaagccgccgccggccaggatgtccttgcaccggaccttcatcttcgcccggtcgccggccgaaaggtcgttgaaagcctgaagctgcctgttgttcaggccgttgcgcccgttgctgccgttggtaccattgttgccgttggtcgggttggtcgggttgttcgggttctgcggatcatcggtacccggcaggccgagattgaggttcagcagcgtgttggtgccgagagccaccttcgctttcgcccccagaagccccgaaccgccgacattggcgttgacgcccgtgttgagcccacgcgatccgccgacgctggcggtgttgctaacgccgaggccgccgccggaaccaccaccgacggatgtgttggtgctgacaccaccggaaccgccgaccgacgccgaaacgcccagaccaccgcttgaattgctaccgacgtttgcattgacgccgctggcgccgccgaccgatgcgcttgcaacagagccgctgccgccgacggtcgcattcacgccgctggcgccgccgagcgagacgctgagcccgttgctggtcccgatgctgagaccacggctgccgccgacatcaaaggcactcgccggcaatggagccaggaaagcggcgcaactgagggccaggacagcgtatttcgatgcattagagttcattccaacctccacgagatgctgccggagcactatgcccaggcagtcgaaaccaatgaagggaagcgcgcattcccgaagcggcgggctgtaaccaagggtggaacacaccccgcctctacatgaaaataagaatatgcgtaaactctaacatttcaatgtctttcgcgcataggttttgcaagcctcggaaaacggataatatattatgaatgactaatgcaaaatgcagacacaaccggagacatatgcagacacaaatgggacggattgcaacaggatgatacggcccggtggaatgaggcgaaacaggggcggccgatctgtacccgttgtggaatataagctgcgatttacgcaaccgatgatacgtatttcatcatttacatcgcgcatcaaaatgaaacggccggcaccgcatggaagcgatgccggccgtctcgttcattccggtatgacgatcagaattcttcccagctgtcagcagcaggcgccgccattccgtgcgccctggcgacccgcgagacgagatgcagcgccggcgagctctgcgccgccctggactgcggccggaccgcataggcctcgctcagcttgaactgcgccaacaacccgcgaagcgcctcggcttccgccgccagcttgtggcttgccgccgtgctctcctcgaccatcgccgcgttctgctgcgtggactggtcgagctggttgaccgcctgattgatctccttcagccccgtcgcctgctccctcgagccttcgacgatcgccgcgacattgacgttgatgtcgttgacctggctgacgatggtctccagcgccttgcccgtctgcccgaccaggtcgacgccgttgcgaacctgctcgctggacttggtgatcagcgacttgatctcctttgcggcacttgccgagcgctgcgccagctcgcgcacctcctgcgccacgacggcgaagcccttgcccgcctcgcccgcgcgcgccgcctcgacaccggcgttgagggcgagaagattggtctggaacgcgatgtcgtcgatgacgccgatgatgttggtgatctcccgggacgactgctcgatctggcccatcgccgccacggcgttgcgcaccacctggccggattgctccgctccctgcttggtctgggacaccagcttgccggcctcgtcggcgcggtagctggaatcgttgaccgtcgtggtgatctcctccagcgccgccgccgtctcctcgacggacgccgcctgctgctccgtgcgcttggagaaggaatcggccgtcgcaccgatctcgcgggagccggccgcgatcgcatgcgcgttctcgccgacggtcttcatggtctccgagagccgggcgatcgtcgcgttgaaatcgtgtcgcagctgctccatcgacggcacgaaggcggcatcgaccgtcttcgtcagatcgccttccgagagaccgcgcagcgcctgcccgagcaggctgatggcgctcatgcgctgtgtcacgtcggtggcgaacttcaccaccttgtagacccggccattggcgtcggtgatcgggttgtaggccgcctgaatccagatttccttgccacccttgccgtaacggacgaactcgttggcgatgaactcgccggccgccagacggcgccagaagctggcatagtcctcggtgcgcgcataggacggctcgcagaacatgctgtgatgtttgcccacgatctcattcagcgagtagccgagaccgttgcagaagttttcgttggccgtgatgatctcgcctgtcggcgtgaattcgatgaccgcctgcgaacgcgagatcgcgtccagcttgccggcgtcctcgaccgccttgttcttcgcatccgtgatgtcggaagcgagcttcacgaccttgaatggcttgccgtgcttgaagaccggattgtaggaggcctggatccatatctcccggccacccttggccagccgcttgtaggcccccgcatcgtattcgccacggccgagccgggcccagaagtcgcgatactcctgcgatgcggccagcgccggttcgcagaacatcgcgtggtgcttgccgacgatctcggaaagatcatagccgagagcattgcagaaattctcgttcgccttcagcacgttgcccttcagatcgaactcgatgattgcttgcgattttgaaatcgcgccgaggatatatcccgcatcagatgccagaccgaacattcccgtcccctttgcctgcgacgccatccactggcgttgcgtcttgttgaaagagacatcggggaacgcgcgtttccgacgaagtatgggcaaatcctgagggaaaataacaactatctcagatcgcaatcaccgaagctctcacaaccgatgatcattccgcgagagttaatgttcagtatacaacgaatatctaatttaaggttgcatccctgtgaaaactcatagtgtatttcttatatttcaaggactgcccgacccgccgacgacccgccaatgaaaaagggcgccaccagggcgccctcttcaaacatatccaactttcatgccgtaacggcttactccgaagcagcgtctgccaaggctggcgcttcgccggcatcgccttcaccagccgcttcgccttcgccacgacgcggacgacggggacgcggggtggcggcgcgacggcgcggctgtcgggtcgttgccgcaccgctttcctcgtccatcgacacctcggccggaatgccttcgatatcaggctgcgggccggtaccgtcgatcacttcgggctgggcggcggcaaccggtgccgggcgctcttcgcggcggcggggctggcgagccgggcgctcttcgctgcgaggctgctcctcggcgcgcggctgcggctggggctgctcttcgctgcgcggctgctcgtcgttctgactctgacggcgcggctgctcttcgtcacggcgctggcgctgctcgttgttgaagcggcgctcgtccgaacggcggccctgctgctcgtcgttctgacggcgcggctgctcatcgttgttgcggcgctgctggtgctcctgctgctggcgcggaggctgaacgaccacgacgtcgtcattgtcgccgccatccatttcgtcgccatcgcgctctgcgccatcgcggtcgaattcgccgcggtcgtcgcgctggaagcgctcctgcatctgcgcctgtgcggcggcaatgatgcggtagtagtgttcggcgtgctgcaggtagttttcagccatgacacggtcgccggagctctgcgcgtcgcgaccgagctgcgaatacttttcggcgatgtgctgcgcggtgccgcggatcttcacgtctgggccggagctgtcgtaggtccgcgtcagcggattgccgcccttgcggttgaaattgttgttattgttgttgttatttccgccgccgccgccgttgttgttggtacgcccgcgaccgcgtttgttctgctgtcctggcctcatcgatcgttcacctgaattctctgtttgtgtggagtgatggcaccgtcaaccgtggtcgttcgtccgactcagggtattcgtgccgcaagcataatgcgcctttgcgccaacctgccgcttgttctcaagtcagtttgactgattcacgcattgggtcgtcttcaacctttgaaactctcgtttaagagagtggacccccgaggccgagctagcttcgaacgaacaatcgttctgacctatctctccaatacgtgggggcaacctatattgcttcccgtttaaatccaagccttttcttcgcaatgacaccaatggactagtctattcagccgcttgttgccaacaagtgacgggcgaacacgagcacacggtcgttgtggccgtaatccttcaccgattccaggcatttgaagccttccgcctcaaaaacctcggtcacttcagttcgctgatcgaagccgatctcaagccctataacaccgtcgggatgcatgaaccttgcggcatccttggcaatcgcgcggtaggcgtcaagcccatccatgccgccatccagtgcggcggccggatcaaattttgtcacttcgggagcaagagtgtcaacgacactggacgctatatagggcggatttgagacaataacgtgaaacgtcccgtctatgtcctgaaaccagctggaccgcaccgccttgaagcgctgctgcagcccgtttctttccgcgttggattgcgccgtcttcagcgcgtcgaccgagatgtcgctccctgtgcccgatgcctcgggacattccttgagcagcgcgaggcatatagccccggttcccgttcccatatccagtatatggagatgaccatgcttacccgcaaggtctctcatataaggaagcattgtatcgacgagaatttccgtatccggccttggctccagcgtcgccgccgaaagcgccaaaggcaggccgtagaactcgcgttcgcccaggatccgatgcaccggctcatgcgccagcctgcgcacgatcgcgtcctcgatccgcgaggcggccgcatcctcgaccagatcgcttccccgggtcagcatcccggtcgtcgtcagatcgagcaaccccgcgatcagcacacgcgcatcggcggccggatcggccacgccggcctcggtgaagcgtcgccgcgcctcggccagaagctgggaaaccgtcgcggcgacctgtttccccttctcgctcatggctgctgctcgccgagctgcgacagctggctcgcctggtagtcggccatcagcgcatcgacgatctcgtcgatttcgccgaccatcatccggtcgagcttgtagagcgtcaggttgatgcggtggtcggtgacgcgcccctgcgggaaattataggtgcggatgcgctcggagcggtcgccggagccgacctggctcttgcgatcggcggagcgctcgctgtcggcgcgctggcgctcggcgtcgtagagacgcgaccgcaggacctgcatcgccttggcgcggttctggtgctgcgatttctcggagctggtgacgacgatgccggtcggcaggtgggtaatgcgcacggccgagtcggtcgtgttgacgtgctggccgccggcgcccgacgagcgcatcgtgtcgatgcggatatcctcggcgcggatctcgatgtcgatctcctcggcctcgggcagcacggcaaccgtcgccgccgacgtatggatacgcccgcccgcttccgtctccggcacgcgctgcacacggtgcacgccggactcgaacttcagcttggcgaacacgcccttgccggtgatcgtcgcgatgatttccttgaagccgccggcttcaccctcgctggacgagagaacctcgaccttccagccgtgtgccgccgcatagcgctcgtacatgcgaaacaggtcgcccgcgaacagcgccgcctccgagccgccggtgccggcgcggatttcgaggatggcgctcttctcgtcggccgcgtccttgggcagcagcaggatctggatttcctgttccagcgcttcgatccgctccttgacctcgggaagctccatctcggccatatcccgcatttcgcggtcgacggtcttgtcgtccagcagcgtctcgagatcggcaagctcagacagcgccttctcataggcgcggatcttggtcacgaccggctgcagctcggaatattcggaggcaagcttgacgtagacgtcggccgaggggccggccgacatgcgcgcttcgatctcgccgaagcggcgttccagctcgcgcatcttttcaacgggaagcttcgccaccctcactccaattctgtttgcctctggctacagagggatgttgtgtgtttcggcgaaatgggcaagcagttcgcgcatcgatgtcggcgtcgtcgtgtcgtcgagcgcctcgtgcatcgccttggacagcgcgccgacgtcgaggccgagcagcatggccttgaccggaccgatcgcggccggcgacatcgacaccgaacggaaaccgatcccaagcagcgccatggccgaaatcggcttgcccgccagctcgccgcagagcgtcacctgcgtattgttgcgttcgcctgcccgcacgatatcgcgcaggatgcgcaggaatggcttgtccagcgtgtcgaaacgatcggagacccgcgcattgccacggtcgaccgccatcgagaactggaacagatcgttggacccgaccgacacgaagtcgaccgccgccatcagctcgtccagctgccacagaagcgccggcacctcgagcatggcgccgaactgcagcttgcgcggcagcccgtggccgaagcgcgacaggcgctgcacttccttctgaagcaattcgcgcaccgcggtgatttccgagacctcggtcaccatcggcaccatcagcttcaattccatgccggcggctgccttcagcatggcgcgcagctgcgtgcgcagaagaccagggcggtcgagcgacaggcggatcgcccgccagccgagcgccgggttctcttcctcgtggccgcggaaatagggcacgaccttgtcgccgccgatatcgagcgtgcggaaggtcacggaccggccggcggcctgtttcaggacgttgcggtaaaactgctcctgctcttccgccttgggaagcgtggaggcgatcatgaactgcagctcggtgcggaacagcccgatgccctcggcgcccgattccgacagttgcggcaggtcgaccagcaggccggcattcatctgcagcgacacgcgctgcccatccttggtcagcggctcgaccgcgcgcagcgcccggaactgctcctgtcggcgggcgcggaaccgcaccttctcctcgtaggagcgctgatgctccggcagcggccgcagatgcacatggccgccgtcgctgtcgatgatcacggcgtcgccgttatcggccagcgccacgatcccggccgcctggccgatgacgggaatgcccatggcgcgcgccacgatcaccacatggctggtcacggcgccctcttcgagcaccaggccacgcacattggcgcgtggataatcgagcagttcggcggcccccatggcgcgcgccaggatgatcgcgtcacccgggaaaccatcgcccgcggtgcggccggtatagccggtcagctgtcgcagcaggcggttcgccagatcctcgaaatcgtgcatccgctcgcgcagataggggtccgtcaggcgcatcatccgcgccttggtgtcgctctgcaccttttcgaccgcggcttccgccgtcaggccgttgcggatcgcctcctcgagcttgcgcacccatccctggtcgtgcgcgaacatgcggtaggtctcgagcacctcgcgatgctcgccctccatggagacgtcgcgctgcgagagcagatcgtcgatcgagatacgcagcgaacccagcgcttcggcaagccggcggatttccttgtcggcgtcgtcgttgagcaggttggtgacgacgatgcgcggctcgtgcagtacgacatagccgagcccgataccttcgttgtaggtgtcaccgtcgatggtgaccgagcgggtgagatcgagctcgagccccggcttggtgagcttcttcagctcgccggtggcgatcatctcggccagcaccatcgccgtcgtctcgagcgcttccagctcctcgtcgcgatagttgcggctggccttgttctgcacgacgagaacgccgagcgagcggccggcgcgcaggatcggcacaccgaggaaggagtgatagatctcttcgcccgtctccggcaggtagcggaaggccgggtgcgattgcgcgtcggagagattgagaggggcggccgatgcggcgatcgtgccgacgaggccctgccccatcttcagctgcgccaggtggacggcttcgcggttcagaccttcggttgcatagagttcgagcacgccgtcggaacgcagcacgtagacggagcaaacctccgccaccatgttgctggcgatctggcgaacgatccggtcaagacgctcctgtggctccagcggctccgccatcaactcgcgcagccgcttgagcagcacgcgcggaccgccggaaaggtctctcattgcgtctcaagctccaaaaacagaaagcaaggtggcccggcagacagccgcgccaccaatcaacttgtacgcgcggcgagcctgctgggaatcagttcttatccagaccgtagcaggaatgcaaagtcctgacagcgagttccgcataaggaccgtcgatcaggatggaaatcttgatctcggaggtcgtgatcgccttgatgttgatgcctttatcggcaagtgccttgaaagcggtcgccgccacgccggcatggctgcgcatgccgatgccgatgaccgacaccttgaccaggcccgattcgttctgcacgacgtcgtaaccgatcttgtccttgtgctcgccgagcaccttgatggccttgtctacgtcgcccgacggcacggtgaaggtcatgtcggtcttcgagccatcttcggagatgttctggacgatcatgtcgacattgatgtggttctcggccagcggtccgaagatcgcggcggagacgcccggacggtcggcgagacggcgaagcgagatctgcgcttcatccttggcataggcgatgccggtgactacttcctgttccacgatttcttcctcgtcacaaatcagcgttccgggcggattcaagaaatcacccatgcccggagcatcgggatcttcaaaagacgaacgcacgaaggtgcgcaccttgtgcaccatggcaagctcgaccgagcgaacctgcaggaccttggcgccgagcgacgccatttcgagcatttcctcgaaggcgatcttcttcaggcggcgcgcctgcggcacgatgcgcggatcggtcgtgtagacgccgtcgacgtcggtatagatatcgcagcggtcggccttgacggcggcagcgatcgcgaccgccgacgtatccgagccgccacggccaagcgtcgcgatgcggttgtcggggccgagaccctggaagccggcgatgacggccacctggccctcgcccatgcgcttgatcatttccgagccgtcgatctcgaggatgcgggccgcgccatgcgcattgtccgtgcggatcgggatctgccagccctgccaggaacgggcgttgacgtccatggcctgcagcgcgatggcgagcagacccgacgtcacctgctcgccggaggcgacgatggcgtcatattcgcgtgcatcatagaaaggcgagcttgcgccgacgaccttcggcgtattctgcacccagccgaccagttcgtttgtcttgcccgacatggcggaaacgacgacggccacttcatgaccggcatcgacctcgcgtttgacgtggcgggcaacgttcttgatacggtccaggtcagcgacggatgttccgccgaacttcattacgatgcgtgccataagcctctaccacagcaaaccgccgggagagacgaacgccagacccggcacgacgaagccttggaagcagcaagccgaagagccggaattgggagtttctggaacccttctaaagccctgcgcccaagggcccaagttgcggcgtctcataacgagtttgtgagggggtggcaaggtggagaaaggagaatgacggcctcaattgcgcgcgcaatttgcagcccgcgcaggcaaagccgaacgcattgtgacatgggcatgacaatcccggcccccgcctcgccttcgcacattttccggcgtaaagattagattcagcattttttggtaatttcccgttagcaataccctttgatgttcctggcgcccgtgtgttcggcgttggtcctttgatgagtaacgggttcccaatgcgtttttcggctgtgccagcaatcgtccttgtgtgtctgaccctcgcgggttgcacgtcgacatcgggccccgacgtcctggcttcggctgcgccctcgcgcgaaacgacgaattcgatcgcgccgcccgccgccgttccatcctcggccattccctccgccgatatcggagcgtccgggcagcaggttgctccatcgcaggaagtgctggcatgggccggcccgatccccgagccgaaggccttcgagccgacgacccgcaccgtcggcgcgccgcttcccgccgagcgcccgatgacggcgatgatggtgccgccggcgcgtccgccgctcgcggaacccgccgtgcagcgccccgatcttcccgatatggatgaaacgggccagccgcgcacccgcagcaagctctacggccgccagttccgcgatgccaagccgatcaacttcggctccgcctcgccgcagaagctccccgttcacggcgtcgacgtctcgcgctggcagggcgatatcgactggcccaagctgcgcacgcagggcgccaacttcgcctatatcaaggcgaccgacggcggcgaccacctcgatcccatgttcaagaccaactggcgcaaggccaaggacgccggcctgaggcgcggcgcctatcacttcttctactggtgccgcacggcgggcgaacaggcggactggttcatccgcaacgttccgcgcgatcccgacgccctgccgccggtcatcgacgtcgagtggaacggcgaatccgcctgcaagcgtcgccccacgcgtgaaaccgtgctggaaaagatgcaggtcttcatggacaagctcgaaaactactacggcaagcgcccggtcatctataccgcgccggatttctatgccgacaacctgcagggcgccttccagaactatcctttctggctgcgttccgtcgccgctcatccgtccaagcgctatcccggtcgcaagtgggtcttctggcagtattccggctcgggcctgtcgcacggcgtcgaggggaagatcgatctcaacgtgttcaacggcagtccggatcaatggatgcgctggtccgccgggcgccccagcaacgggatgatggcggccaacgactgacgcccccgcaagttccacctaaagagaaaacggcagcaattaaacgcaactctggcgctaaaccggggccgccggcagctacaaatatgccacactactaaaaatcgggtaatgcggatatttccaaccaaatgtaagtgtgattcttctttgattgtaagtatgcggcgtaagttgattcgcgaaaatctttgaagctgaatgatttggcggagattccgaatgagaaatcctgatattgagacctgggcacttgcacgcgcccatcacattgttttgaacgaggggctaagtcttgccaaggcggcccaggatctggatcgcaagcggtctcgatccctcgtatacgagttgcgcaaggtcatagccgcggcaattctcgaagcccacgcagcttcggccaagcaggacacggcaccg

SEQ ID NO: 26 - DNA, 61556 bp, Rhizobium matallidurans
  source 1..61556: mol_type = genomic DNA
tcaggtgcagcttgctgcaccggggatgagggggccactcgctctgagagaacttacaccttgacccaagccccattgcgcttcgacgacgccacgcaggcatccacgaaggcgacgcccttcacgccgtcgtcgaccgtcgggtagaccacggccttgtcgaccgccttgcccttcttgtgcgcgttgatggcgtgcgcggcttccgtgtagatggtcgcaaacgcttcgagatagccttccgggtgaccagacgggatgcgcgagacgcgggcggcggccgggccggagccggcgccgttgcgggtgatcaggcgcttcggttcgccgaacggcgtgaaccagagatagttcggatcggcctgcacccattccaggccacccttggtgccgtagacgcggaccttcagcccgttctcgtgacccggcgccacctggctgcaccagagcatgcccttggccggcttttccgagcccttggccttgaagcgcagcatcacatgcgcgttgtcgtcgagacggcggccttcgacgaagctgtcgagatcggccgcaaggctatcgagctcgaggccggagacgaaggtggcgaggttataggcatgcgtgccgatatcgccggtggaaccgccagcacccgactgcgccgggtcggtgcgccacacggcctgcttggcgccctgctgctcgacggcctcggtcagccagtcctgcggatattcggcctgcaccaggcggatatcgccgagttcgccattggcgatcatctcgcgcgcctggcgcaccatcggatagccggtgtaattgtgcgtgaggatgaacaacgcgccgctctcgtcggcgattttcttcagcttcttggcatcggccaggttcgaggtcagcggcttgtcgcagatgacgtggatgccgcggcgcaggaactccttggcggcgtcgtagtgcacgtggttcggcgtcacgattgacaccgcctcgatgccgttcttcagcttcgcctcgcggatcgccatctcgcgatagctggaataggtgcgggtcgggtcgagcccgagatcggcgcccgatgccatcgccttttccggcgtcgacgacagcgcgcccgcgatcagctcatactgatcgtcgatgcgggcagcgatgcggtgcaccgccccaatgaaagccccggcgccaccgccgaccatgccgagacggatgcgcggctcgcgcgtgtgttccgttgatgcttcgattgccatgtgttcctccaaatttgtgctttgcggaaaagtccccctctgcctgccggcatctcccccacaaggggggagaggactcgcggcggcgcctcacctgagcccctcccccttgtggggaggggttggggaggggtcttcgctgattaaagccccagcatccgccggttggccgcctggtccgtgccgctgccggcgaagtcgtcgaaggccttctccgtcacgcggatgatatgcgccttgacgaactcggcaccctcgcgcgcgccgtcttccggatgcttcagcgcgcattcccattcgaccacggcccagccatcgaaattgttggccgtcatcttcgagaacaccgccccgaaatcgacctggccgtcgccgagcgagcggaagcggccggcgcgttcgacccagccctggtaaccgccatagacaccctggcggcccgtcgggttgaactcggcatccttgacgtggaacatcttgatccggtctttgtagatgtcgatgttgtcgaggtaatccaggcactgcagcacgtagtgcgagggatcgtagagcatgttggcgcgcggatggttcttcacgcgctcaaggaacatctcgaaggtgacgccgtcatgcaggtcctcgccgggatggatctcataggcgatgtcgacgccgttttcgtcggcatgatcgaggatcggcgtccagcgcttggcgagttcgtcgaaggcggtctcgacgaggccggccgggcgctgcggccaggggtagatgaacggccaggcgagcgcgccggagaaggtcgcatgcgccttgatgccgaggtgcttcgacgccgtcagcgccatcttcacctgctcgaccgcccattcctggcgcgccttcggattgccgcgcacctcgggtgccgcaaagccgtcgaaggcctcgtcataggcgggatgcacggcgaccagctggccctgcaggtgagtggaaagctcggtgatctcgacgccgttctggcgcgccacgccggcaagctcgtcgcaatagtccttggaagacgcggccttcttcaggtcgatcagctggcccgcccaggtcggaacctgcacgcccttgtagccggtgtcggcggcccacttggtgattgcatcccacgagttgaaaggcgcggcgtcgcccgcgaactgcccgaggaacaagcctgggcccttgatcgttttcatgtcaattcctccctgaataatgaccgtaaacgtttctggttcagttctagcacttgattcgcactctgcaagccgattttggcgagaatgcaaatctgccccgacggacatcaattcgaggtgccgactaaaccatgtcgggcacccacccgcaagacgtacgtaccgcatttcttggcgcccgcgccccgcgcggccccttcccggcgcatctttgtggacttcccgccaccgcgtgctactctgggtcgaccaggagggtggtcgatgacgcggcggctggcggcaatcttggatgcggatgttgtcggcttctcccggctgatgggccacgatgaagcgggaacctttgccgcgctgaaacaccacaacaccgagatcattgttcccgccataaacaggtatcgcggacatgtcgtgaaattcgtcggagacggcacgctggcggaattttccagcgtggtggatgcgttgcgttgcgcgatggagatccaggaggccattctggcgctcaaccgggaggtgaagcccgaccgccggatgatctggcgcattggcatccatgtcggcgacgtcctgaccgaggatggcgacatcttcggcgagagcgtcaacatcgccgcgcggctgcaggcattggcgccggccggcggcatctgcctgtcgcaacaggtgcgcgaccagatcggcgcggcgctcgacttcgaggccaccgacttcggcaaccgcaaactgaagaacatcgagcatccggtgcgggtgtggcgctggtttccgcccggaagggaaacggacggccccgacgacgagggccaggacccggcgacgccaatccggccgccgcagcgcaggcgcccttccatcgcggtgcttccttttgccaacatgtcgaatatcgaggggcaggagcatttttccgacggcttcaccgacgagctgatcgcgaccctggcgcgctgtcgctggctgctggtcgccgcccgcaattcctctttcagcttcaagggccgcgccgtcgatgcccgccgcgtcgccgaggatctcggcgtcaaatatgtgctcgaaggcagcgtccggcgctccgacacccgcatccgcatcaccgcgcaactgctggatggaaacgaaggcacgctgctctgggccgaacgctacgaccggatgctcgccgatatcttcgacctccaggacgagatcgcctccgagatcacggggacgatcgagcccgaattgagcgtcatcgaattcgcggcgcttcgcggccgctcgatcgtcgacatgacggcctgggaaatctatctgaaaggcctctggcatctctatcgcttcacggtcgacgacttgaatatggccaagcatctgttcgagcaggcgatctccatcgatccgagcttcgcgcaggcgcaggcgcggctcgcttacgtccacatccagctcggctggtacggctcccttgaggagcgctcggggcgcatatgcgaggcgatcgagcttgccgaacgggcgatcacgctcgacgagaaggagccggccgcgcatctggcgctcggtcgcgccctggccctcgatggcgcgacacaggccggcatcgcgcatctgcgccacgccgcgaaactcgatcacagctttgcccaggcgcatttcgcgcttggccaggcgctttgttacgccgaccgccccgaagaagggatggtcgagatccgggaagcctttcgtctcagtccgcgcgatccgcatctctggacctttcacagcatgatggccttcgccaactaccagatggacaggctcgacgaggcggccgaggccgcgcgcgcatcgatgcgctcgccgaacgtcaccttctggccggcgatggcgctggtggccattcagggacggcagggcaagatcgaggaggcgcgccggacgatcgatgagctctacaattttcggccgggcatgacgcttgatgatgccaggcgtgaattctacttcggcctcaagcccgcgatgagcgaaaccttcatcgagcgtttcgtcgcggacctcggcaaggcgggtctgccggcacgatcaagatgaggacgcccgctctcgcgaacgggcgccccttggcgatatcggatcagaacggcgaatccgggaagtagaagtccttggcgttatccttcgtcaccagcgtggcgtcgaggatgtagttgccgcgaaccgggacctggtcgtagagcgccgcggccgtcagttccatcgcggtaccgaccatcgccggcggatagagaacgtcgaccgggatcatcttgtcgccgtccatgaccttcttgaccatgtccttggagccggcgccggccacgacatacttgatgtcggtgcgcttggcctgctcgatcgcctgcagcacgccgacggccatgtcgtcgtcctggcaccagaccacatcgatcttcgggtacttggtcagataatcctgcatcaccttgaaggcgtcgtcgcggttccagttgccgaactggcggtcgagaaccttgacgttggagccggcgatacccttgtcgaagccgtcctgacgctgctggtcgatcgggatcggcaggccgcggatgacgacgacctgtgcgtcgggcgtggtttccttgatgtacttgccggcgacttcgccaagcgccggattgttgccggcgacgtagagatcgcgcacggaatcgtcgttggtgcttggcgcgcggtcgaccagcgtcacgaaggtgcccttggccttgacttccttgatcgcgttgaccagcggatcggggtccgacggcaggatgaccagcgcgtcgatgccctgcgttgccagatcctgcaccgcgttcgcctggctcgcggcatccggcgaggtctttacgatcacgttgatatccggatattcggccttcaagagcttggcgacgcgctcggcatggaacaccacgccggcggtccagccgtggtcggcggccggaatggaaacgccgatggttttcttgtccgccgcctgcgcgacgctggcgagcagcgccgccgcgacgaccgccaaactgaacattgtcttacgcatgtctatcttcctcccattgaaccccagggcttgcgaaccttgagaccgggcgccccgccgacccggccgatcccttgctacctgcgcgccagcgaccgctgcacgagcatggcgatgatgatgatcgagccctggatggcgccgatcagatattccgagatgaaattcgagagcagcatgatgttgccgacgagttcgagaatgaaggcgccgcagatcgtgccccagacgcgccccgccccacccttcagcgccgtgccgccgacgacgaccgcggtgatcgcctgcagttcccacaggatgcccgtcgtcgccgacgtcgagccgagacgcggaacgtagagcagcacggcgatcgccacgcaaagcccctggatgacgaaggcgatggtgcgcaccttgttgacggcgataccggaatagcgcgccacgtcgcggttcgagccgacggccacgacatggcggccatagcgcgtgcgatagagaatgaaggcggcgaccgcggtgaccgcgaggatgacgatgatcggcaccggcacgcccgcgatcgaaccgaaatagacagggcggtaaagcgactgctgctcggccgagcgcagcgtgatcgcgccgccctgtgagagccatgtcgtcaggccgcgatagatgcccatcgtgccgagcgtggcgatgaacggctcgatttttccgaccgtggtgatcagcccgttcgcgagcccgcagagcgcaccggcgacgatggtgaagacgacggcgacggcgagcatcagcgcgggatcggcgatgatggccgagttcatcaaaaggatcatcaggctggcgacgaaggcgaccatcgaccccacggagaggtcgagatcccccgacgagatgacgaaggtggcgccgacggcgatgatggcgatgaaggcgctgcgggtcgcgacattggcgaggttggtgatgccgatgaagttcggattgaccagcgcgccgacgacaagcagcagcgcaagcgccgcgaacggcgcgaccgccctgagatcgatatcccgccaggaacgccgcctgatctgactggtctcgtcgttcacactcatgtccaaagccatcctcccgtcatgcctgccggcattctgtccgttgttccgcctgacggcggttgtctctcgcggccgccttacgcggccttcttcttcaggcccgcggcatagcgcatgatctcctgctcggagatctcgtcgccctcgagcacgccgacgatccgcccctcgcgcatcaccgccacccgcgtgcagagcccgatcacctcgggcatctccgaggagacgacgatgatcgagcgcccgtcgcgcgccagcgccgagatgaaatgatagatctgctgcttggtgccgacatcgatgccgcgcgtcggctcgtcgatgatgatgatctccgggtcggtctccatcaccttggcgagcagcagcttctgctggttgccgccggacatgcgcccggccacgatattggtgtcgcgcacgcgtatgtcgaagcgccgccgcgctttcgccagggccctggcctcgctgctagggctgagatagccgtgccgcgaatgctggcccagcgattgcagcgtcaggttcgccagcatgttggagccgagcagcaggcccttgtgcttgcgatccttggtcatgtaggcaaggccggcacgattggccgcatgcacgtcgcccgacgggatgctctcgccgcggatgacgacttcgccggaagcgcggccgcgcaggccggcgatcgcctccataagttccgtgcggccggagccaatcatgccggaaaagccgataatctcgcccttgcgcacctcgaagctggcatcgtgcacatagccggtcgagataccctcgaccttcagcacgatctcctcgtcgacgtcaggctcgttcttggtcggatagaggctggaaagctcgcgtccgaccatcagctgcgcgatcgattcgccgtcgagcatcgccgtcggcgccgtcttcacccactgcccgtcgcgcagcaccgtgacccggtcggtcagctccatgacctcgtcgagcttgtgcgagacgaagacgaagctggtgcccttgtcgcgcagcttgcgcacctgcttgaacaggaaattggtctcctcgcgcgacagcaccgccgtcggctcgtccatgaacaccacgcgcgcgtcgcggctgatcgccttggcgatctccaccatctgcttgtcggcgatcgaaagcgtgctgatcagcgcgttctcatcgacatgcgagccgagcagatcgagcgccttgcgggtttccgaacgcatgaacttgcgatcgagcacgccgaagcgcgtaacctcgcggccgagaaacaggctctcggcgacggtcagatggtcggcgagattgaattcctggtgaatgatgacgatgcccagcgcttcggccgccccgttcggaggcagcacgatcggctggccgtcgagaatgatttcgcccgacgtcggctgctcgaagccggacatcaccttgacgagcgtcgactttcccgcgccgttttcgcccatcagcgcatggatttcgccggcgcgcagctcgaaattgacgctgaagaggacctgcaccccgctgaaggatttgcatatgcgccgggcggacaacaccaccggcgccgcctcgacagtctccaaactcatgatgtcctcccctgcggactcccacccgcttgacccttgtgtaaacctttacatgtgcgatgtaaaggtttacatcattgtatcacgaagttctcctggcttcgccctttgacgtatgccgcagtctgtgtagtgtcgccgccaattgagccccaaggcaggacgcagtgtcgaattccacgcccgcaaccatcgaggatgtcgcccggatcgccgaggtttcgatcgcgacagtgtcgcgggcgatccatacgccggagaaggtcgcgaactcgacgcggctgaaggtgaaccaggcgatcgcgataacaggatacacgacgaacgccatggcccgcagcctgcgtctcggccgttccaacatgatcctggtcgtggctcccgacataggcgaccccaatttttccaacattctgatcggcctggagaacgaggcccgcgcccatggctacggcattctcatcggccatacgcagaacgacgcccagcgcggcctcgaatatctcaaattcctgaattcaaaccaagcggcaggattgattctcttcaccggtatcctgcccttcggccaccagacgatgacggccaggctcccgcccagcgtcggcgtcttcgagccggtcttcaacggcggcattccctatgtcggcgtcgacgatatcgagggcgcgcgcaaggcggtcgacctgctcttggcggaaggccaccgaaagatcgccttcatcggcgacagcaagacacgccttgcctattccaggcgccgccggggctatgacgaggggctggacgcggccggcgtggcgacgggtcagcgcatcattctggaaggcgacggcacgctcgaaagcggccgccacgccgtcgagcagctcttcatgcgcgacacgctgccgacagccttcatgtgcgtcaacgaccagacggcgatcggcgtgatgatcgggctcaacgcccgcggctacgacatcccccgcgacttctccgtcaccggcttcgacgacgtcccccaggccgtcttcatgtcgccgccgctgacgaccgtgcgccagccgcgcaccgccatcggcaagcaggccatggccctactgctggagtttctcggcgacggccatccggcggaaaccgagatcctgctgcagccggacctggtggtgcgcaactcggtgtcggcgccgtcgaagcagtggtcgaagcgctagcggaaggcacccggcgtcgtcacgcgcgccaagaagctggcgcacaccgatcaacaggcaaaggccgccgctaaaccgtaaacgcctcgcgaaacgccacaagcgccgcctcgggatcgccagaggcaaaagcctccatgccgacaggcccggcatagcccatcgctttcaaggcccgcgcgatgcccttccagttgacctcgccggtcccgggctccatgcggccgggaacgtcggcgacctggatctcgccgatccatggcaggctcctgcggcagagttcgatcaggttcccctcgccgatctgcgcgtggtagaggtcgagattgagccgcaggcgcgggtgatcgatgctcgagaccagcgccagcgtgtcctccgcgcgaccgaaggggacgcccgggtgatcgacctgaaggttgaggttctccagcgtgaagaccacgtcttcttcctccgccatgtcgacgatgcgggccagtgtgtcgcgcgccttcagccacatattaccggtcacgacctcgatcggctgcactggcaggccgccttcgccaagcccggttccgtgcagattgaggcgctgcacgccgagccgcttgccgactttcgctgtctcgcgcgccgtcttcaagagctccgccgccccctcgtcatccgtcagccggccagtgagatagccgttcatgatggtgaaagtggcacccgtcgcctcgagcttgccgagatcatgctccggccagttccacagcccgacaccgaagcccaactcgttcagcctggaggcgcgccattcgatcggtctgtcgcgccagatcatttcggcgcaggcggcgagttggaaaggtgagctcatggtgatcctcccgatcatcagtgcggattcgatgccgacaatagagccgagatcgccgatgacggcaatgcgacccgacgccatatcggcgcaattgaaaaagccgggaagcgagcgctccccggcctttttgtctcggcaatccgctaccgatcagacgtagcggttgacgacgttttcgagaagttcctgctggccggacttcggctgcgggttgatgtcctggctctcgacgcgggccgtgatctgctccagcgagtattcgccgcgcagcatcttctggctttcggccgaatcccaaccggcatagcggttggcgagcggctgcgacagcgccttgtcctcgatcattttggcggcagccttcaggccacgggcgcagcaatccatgccgccgatgtggccgatcagcaggtctgccggatcgagcgactggcggcgcagcttggcgtcgaagttggtgccgccagaggtgaagccgccgccagccagaacctggtaataggcgagcgccatctcgggaacgttgttcgggaactggtcggtatcccagccggactggtagtcgttgcggttcatgtcgatcgagccgaagatgccgagcgcgttggcgagcgccagctcgtgctcgaaggagtggccggcgaggatcgcgtggccctgctcgatgttgagcttcacttcgttttcgaggccgttcttcttcaggaagccgtagaccgtcgcgacgtcgtagtcgtactggtgcttggtcggttcctgcggcttcggctcgatcaggatctggcccttgaagccgatcttgtgcttgtactcgaccacgaggttgaggaagcggcccatctggtcgagctcgcgcttgaggtcggtgttgagcagcgtctcatagccttcgcggccgccccacagaacgtagttctcgccgccgagcttcatcgtcgcgtccatgcaggtcttcacggtcgcggccgagaaggcgaagacatcgggatcgggattggtcgcggcacccgacatgaagcggcggttggagaagaggttcgccgtgccccagagcagcttggtgccggtggcggcctgcttctcggcgaagtagtctacgatctcgttgaggttcctggtgttctcggcgaagttcttgccctcggggcgcacgtcggcgtcgtggaagcaatagtagggcgcgccgagcagcgagaagaactcgaaggccacgtcggccttgagtttcgcggccttcatcgtgtcctcgaaccaagggcgcaggaacgtctgcccaccgaagggatcgccgcccggccatgtgaaggtgtgccagtaggcgaccgcgaaacgcagatggtcttccatccgcttgccgagaacgatctcgtccggctggtaatggcggaaggccagcggattggtgctgtccgggccttcatacttgatcttctggatatcgccgaaaaatccggtgctcatggggtactcctccttgggtgtggtttaaaaagtgtccgttattccgcttggccccctcatccgcctgccggcaccttctccccgttggggagaagagactcgaggcggccccttgcgctaacctcccttctccccagcggggagaaggtggcccgaagggtcggatgagggggctccgacctcagtgcaaacttagactagcctcaatgcgccaacgccttgatcgccggataaagcgcacgataccgaccataagcctcctcatacgccccgctcagcgccgcatcaggctcgatcgtcccatccgtctcgggcggcgtgcacaccgcgaccgggtcggcgcccgtggccgcgatcaggccgaggcgggccgcaccgaaggcggcgccgaagtcgccgtcggcgggcaggtcgacgggaacgccgagcgcggtggcgatcgaggctagccagtagcgcgagcgcgagccgccgccgatggcggtgacgcgggaaatatcggtgccggccgagcgcagcgcctcgagattgtcgcggatcgcgaaggacacgccttcgagcaccgcctgggtcagcaccacgcggctgctctcatgctcgagcccgatgaaggcgccacggatgacggcgtcgttgtgcggcgtgcgctcgccggagaggtagggaaggaaggtcacgcccgacggcgccttcagcgtttcgccgagttcggcggtcagttccgccgccgacttgcccgttacatgcgaatgccagttcagcgcgtcggtggcggacaggatgacgcccatctggtgccaggtgttgggcagcgcgtggcagaaggcatgaacggcgctttccggcttgggcagataggaaccgttggcggcgaagagcacgcccgaggtgccgagcgagacgaaggctgcgccatggctgaccgtgcccatgccgcaggccgacgccgcattgtcgcccgccccgccggcaacgacgacggaaccggtgatgccccactgcgaggcgagttcgccgcgcagcttgccgccctcttccgtgccttcgaccagggttggcatgtgcttttcatcgagaccggtggcggcgagcaactcaggcgaccacttgcgcttgccggtatcgagccaggacgtaccggccgaatccgacatttcggaaatgtgctcgccggtcagccacaggcgcagatagtccttggggagcagcaccttggcgaccttggcgaaaatctccggctcgtgcttggcgacccaggcgagcttcggcgcggtgaagccgggaaacacgatgttgcctgtgatcttgcggaacttcggatcggcatcgagcgccgccgcctcgatgtagctgcgcgtgtcgttccagagaatgcaggggcgcagcaccttgtcgtcggcatcgagcagcgtcgcgccgtgcatctggccggaaaggccgatgcccttgacggcggcaagttccttcggatgcttcgccttcagcccggcgacggcttcctcggtggcgcgcacccagtgcgacggctcctgctccgaccatccatggtgcggacgtgacacgtcgagcgaaccattggccgagccgacaatcttctgatcaccatcgatcagcatggctttgacgccggaggttccgagatcgagacccagatacatgtgtttctccctttgcccttacggcagattgtctttcagaaagatatcgagacggatgcgctcctgcgcgtcgatgaccgagagcccgtcggccttcgccttcaacacgcggatggcgctgcgcacctcgtggcccgcatcctggttcaagattgcgtcgatcgtaccgtcgagaagggccgcgcgcgtatgatcagtcagctcatgggcgacgacggtcagagcgcggtcgacggatttctccttcagcgcccggataaggccgcgattgccggcgccgaggctgtagacgccggtgatgccgtcgcgcttcgacaacgcgtccgaaaccagcatatgcgccatatcggggtcgtcgcgaccttcgatgaccggcaggatggaaagatcgggaaactcgtcggccatcaccgcggaaaagccttccagccgctcgcgatggtcgcgcaccagcatggagccggcgagaaccgcgacatcccctttggctccgccgagaaatcggccgagaagtcgcgccgccgtgcggccggccgcgatattgtcgacgccggcatagtgatgacgcagcgagccggtgagatcggacacgacggtgacgacgggaatgccgtcctgcaccagcctgtcgaccgcatcgcgcacctcgggcgcatcggtcgcgaccagcgccacgccggctggccgctcggcgcgtagcgtatcgagtgccgcggcaagggccgccggatcgaaggcgggaacttcgacggtgcggatatcggtgcgctccaccggcgagcgcgcgacggcggccatcacctcggcgttcagcccgtgcatgaaggaattgtcgctggcgggaacgatgaacacgaacgaataggtccgccccttcgcgagattggcggcggcgacatcgcgcacataaccgatctcgcgaatggcggcttcgaccttctcccgcgttacgtgccggacgcccgggcgctggttcagcacccgatcgacagtcgcaaggctgacgcccgcggccgcggcaatatcgtgaaccgtaggtctcatcgctcctcctgacgagacctttagcgtcatttctgatgtacgtaaatcagatttttcagcgacgcattccgtatattgaaatcacggatacttttcgtgatcgttggcgatctcggcttcgagcctggctgccgcgcgcttcaggtcgcgcggcctgccggcgacgctttcgatcgccgccacggccacatcccgcgccacgtaatccgacttgtgacccatattacggatcatcagcagccgggcgcccctgatggcgcgagcaagatggcgtgcgtggatgtcaggcgagacgacgctgtcggtatcgcccgaaatgatcaccgtcggcgcgcggatgcggccatagcgcggcgaattgcgtttcgtccattccagcagattggcgacatcgatggcgttatcgcggaaagccttcggcccgagagcctgcagcgcccgcgcctccctgatatagccgggcggccgaggattgggcgcgaaaaccgagcgcgtcgcgctgtcgatcatcgcgagccccaccggcggcacgacgatggcgctgaacagcgcgcctgtcaccggcaccttcgcggcatcgtaataccaggcgataccacccggccacgggtagacggcgggcgacaggaaaacgaggccgagcacccgatcaggatgcctgagcgcgaagctcgccgccaccgcgcccccgaaggaatgactgacgatgatcgccttcctgataccgcgtttcgtcatgaccgcggcgatggcatcggcctgcccgtcgggaaatgcgttctcctgatcgccgcgatccgaacgcccgtggcccggacgatcgacgaacagaagatcggcacgcccctccaacaggtcgcgaaacgaaaatacagaatcgtgcagattggcgctggcgccgtggatgaacacgatcggcggcagatcaggccgccgcgccttgagatagaggctgttcatcctgtagccgccgacatcgatgcgcgtctcgtcagcggacggaccggcggcgaacacatggttcacgccgacggacaggatgagggcgaggagtgcaagggctctgctggaggctttgaacatgaagcgcggtcgatcccggtgatatcatcgcctatacgcgaaaacgccggccttggtttcccaagccggcgccagaatttgtcaagccagaattcgtcagggctgtcgtgagtcgtcagtggccgccgccacctccgccaccgccttgcggcggcaccggcttgtcgatcagcacgatgccgagcagcatcgccacgaaaaggccggtgaggatgacgaaaatatcgctgaacgacatcaccatcgcctgcttcgtcaccagcccgaccatctgcttgatcgcgatggtggcgccgtccatgccgtaggcatcgtagttcgaggtcatcgacttcatctggtcgagcgccatcgggttgccccagtccaggccctcgcggatgcgctggtagtgcacgtcctgacgattggtcagcacggtattgatgacggcgagaccgacggcgccgccgaggttacgcgtcaggttgaacaggccggacgcgccgcggatacgcgccggcgacatggtgccgagcgcgatgttgttgatcggcaccatgcacatcatcaggccgaagccgcgcaggatctgggggatcaggagctcgtagaaatcccagtcggtggttacgccggtcatgatccaggtgccggccgcgaagctcgcgaagccgagcaccatcatcagccgcaggtccatcttcgccgacagcttgccggcgatcggcgctgtcaaaaacatcgcgagacccgaaacgaacatcgtttcgccgatcatcagcgaatcgtagccgcggatgcgtccgagatagagagggtagatgtaggtcaggccgtaaagcccgatacccatgacgaaggaaaacagcgagccgaccgcgaagtttcggttgctgaaggccctgagatcgacgacggggaagtccaccttgaaggcgcggtagaagaagaccacgcagccgatggccgatgctatcgcgccgagaacgatgttgcggtcgttgaaccagtcgttcgaattgccctcttcgagcacgtattccagcgcgccgaggaagacgcccatcgacaccagaccccaccagtcgaacttcttgaacagcgagaattccggcttgtcgaagtcgatgaagttccaggccacgatcgtcacgatgatgccgggaatgatgttgacgaggaacagccagtgccaggagaaggcatcgctgagatagccgccgaccgtcgggccgatggtcggcgccagcgttgcgatcaggccgatgatcggcgatacgatgctgcgcttggatggcgggaagatcgtgaaggcggcggcgaacaccgacgggatcatgccgccgccgataaagccctggatcgcgcgatagacgatcatctggtcgatattcgtcgcggtggcgcacaatgcgctggccgcggtgaagcccgccgccgagaaggcgaagaggtagcgcgtcgagatgatgcgcgccaaggtaccggagagcggaatcatgatgacttccgcgatcagataggacgtctgcacccagccgatttcatccgtgccggcgctgaggccggcctggatttcggccagcgacgccgacacgatctgaatatccaggatggacatgaacatccccacgaccatcgcgaaaaacgcgatgagcttgcgggggtccatggtatcggcagccggcgtggccggcatcgatcctgctgttgtgctcgcggccatcggcctacctcgtcagacgatattatgggccaggtccagcgcgaagcgcgttacttggcggcatccggcgccgtgcgcgtatcgacgtcgacaaccacgctcaggcccgcgcgcagacggcccgtgtcgagcgcttcctgcggcagggcgatacgcaccggcacgcgctggatgatcttggtgaagttgcccgtcgcgttctccggcggcagcagcgagaacaccgagcccgatgccggcgagatcgactcgacggtgccgacgatcggatcatcgccataggcatcgacgcggacatcgaccttcgaacccggaaccagctgctggatctgcgtttccttgaagttcgcgtcgatatagagttcgcggatcggcacgagcgccatcaggcgctggccgggcgagaccaggtcgccttcctgaaccgagcggttgccgacgacaccgtcataaggcgccttcagcaccgtgaacgacaggtcgcgggcggccttgtcccgggcaagctcgagctggcggatcgtgccttcggcttcgcggcgctgcgcatggagcagcgttacgttggcttcggccgacgcgatggcggcattgccgccgaccagattggcgcgcgcctgatcgagcgcgatattggcggtatcgagcgaggcggtggtgccgaccgacttcgcctgcagttcgctggcgcgagtctgggtgatctgcgcaccgcgcagcgtggcatccagagcgaccttctgcgccttggcctggtcgaggctcgcctcgccgccggcgatctgcgcgtcgatgcgctgcagcgacagcttctcggtgtcgagcgaggcctgcgcctgctcgagcgccagcttgtagtcgccatcgtcgagtgtcgccaggatatcacccgccttgacctgctggttggcgacgacattcaccttggcgacgtagcccgtgaccttcggcgaaatcgttgcgatgtcgccctcgatataggcgtcgtcggtcgaaaccatgaagcggccgaccgtgaaccactgatagccgtaataggcggcgccagcgagaagcacgagcccgaggatcggaagcacggggctgcgcttctttttcttctgctcgggcgccgtctccacaggggccgccgtctgcggcgtacgcggcgcttcggccgtggtcacggctgcttcctgagcctcgccatcagcgggcttgctgacaatgcgggcgacattggcgttctggctagacgacatgagagaataccggtaaatcgagtaaaacagatcgaactgaacggttcggtttagttgacatagaaccttttaacgttcatatcaagatgtatcgaaccacccggttcgattttgttaacgaaacattcgcacatgcgaatatggttaaggagctatgacagacttttccgacgtatccatggaggaatcgacatccgcgggaggcagatgggcggcgggtgaagatcccgccaagcgcaagcaaattctcgacggcgcccggcgcgcgttcatgaaatacggcttcgatgccgccagcatgaacgacatcacgcgcgaggccggcgtttcgaagggaacgctctacgtatacttcgccaacaaggaagagctgttcgccgcgatgatcgaaagcgaacgcgccgccttcgttgccgcgatgcgcaccacccttgccgaacgcgaggacgtggaagccggcctgcatgatttcggcatggatttcatcgcccacctgaccgacgagaaggtcatcaacgccatgcgcacggtgcttggcgtgcgtgatcgcatgccggcgctctgtcagcgcttcttcaatggcccggagaacctgcgcaccatcctgcgcgactatctcgtgcgctatgtcgaggccggcaagctcgatatttcggacatcgatctggcagccgcccagtttctcgatctctcgagcggcagtttcttcaagttccgcctgttcggcagcatggaaaagccgccatcgaaacaggaggccgaacgcgtcatcaatggcgccgtgcgcatgttcatggcgacctacggggtcgccaacgatcgctgacatgcatatggcgggatcttgactgcggaataaatgtccgccgactttcgtatactcccttgcgcgcttgccaagccacgaagcgcgattaaattcgagcgaccgctaatggggcgcaaagggatatatagatgcaagaaatcatgatgctcgtgcaggacccggccgcctgggtggcccttgtcaccctggtggtgatggaagtggttctcgggatcgacaatctcatcttcatttccattctcaccaacaagctgccacccgaatcgcgcgagaaggctcgcaagatcggcatcggcctcgcgctgatcatgcgcctggcgctgcttggcaccgttgcctggatcgtcaagctgacggcgcccgtcttcgaagtcttcggccagagcttctcgtggaaggacatgatcctgattgccggcggtctcttcctcctgtggaaggcgaccaaggaaatccaccacacggtcgatcccgccgaacaggcaaacgatgccgccgccaacgcggggacgacgacctttgccgccgcgatcggccagatcctggtgctcgacctcgtcttctccgtcgacagcatcatcaccgccgtcggcatgaccccttatctgtcgatcatggtgatcgccgtcgtcgccgccgtgaccgtcatgctggtggccgcgaccccgcttgccaacttcatcgagaagaacccgaccatcgtcatgctggcgctcggcttcctgatgatgatcggcacgacgctgatcgcccagggcatgggtttcgaggttcccaagggctacgtctacgccgccatggccttctcggcgctggtcgaggtgctcaacatgctggcgcgcaacgccaagaagcgaaagcgcgaagccacgaaagagaccttgcactgacaagcaaaagggcgcgacctgctggccgcgcccttttcatatccgctgcctgccaatcagccggccgccagttccttgtcgatcgccagcaccagccgctggtcgtcggcggtcacgtcgggtgcgaaacgcgcgacgaccttgccgtcgcggccgatcaggaacttctcgaagttccacagcacgcccttgtcgtccgctgcggcaagaccgcgatcgaccagcttctcgcgcatcgggccctcgcccgtcgtcggcaggccggtgcccgtcagcatcttgtagagcggatgctggtcctcgcccttgaccgagatcttcgagaagatcgggaacttcacgtcataggtcagcgtgcagaactcgacgatctcggcgtcggtgcccggctcctggcccttgaagttgttggccggaaaggcggcgatcaccaagccgcgctcgcgcttgtcctcgtagagcttctccagcccctcgtactgcgccgtcagcccgcatttcgaggcgacgttgacgacaagcacgaccttgcccttgtattcgttcagcgtggtctcgcgtccatcggcgagctttaccggcacgctcaagatatcggtcatcatcgatctccaacatgaaataccgacgcggaagctatacccgcgcgaccgtttgtccagcgcggaaaatcgcccgctggcaaaatcgcccaaaccatctagtctaagtctacagcgcggacgccatctgggggatcgggcgggaggatcgggcatgtctcgggaagtgtttgtggcggccgtcatctgcgcctgcctgatcgccgcctcgatcggcaccatgctcagctatcacaggctgccgagccatcaccggcaggaagagaccaatgccgtcgtgcggctggtggccaacatcttcgtcgtcatgacctcgctggtcttcagcctgatgatcaactcggcgaagaacaccttcgagggcatcgacagcaacgtccacgccttctccacccagatcatcctcttcgaccagacgcttcgaacctacgggctggaggccaacgagaccaagcagcgcctttccacctatgtcgaaatagcactgggcaacgttccgccatccagcgacccgctggtcaagggcgacccggccgccgaattcgccctgaacgaggtgggaaacagcctggcgcttctcgcccccgacgatcccggccacatcgcgttgctcgacaatgcgcgccagcaatatcagcggctcgtcgagcaacgctgggtcctcgtcgagcagtcggaaggcgtcatcccccggccgctgatctccatgctggtgacatggctgatcctgattttcgcgagcttcggctaccgcgcgccgaaaaacatcatcgtcgtctcgatgttcatcatcgccgccttcctgatctcggcctcgatatatctggtgctcgacatggacattcccttcaacggcctcatccagatttccgacctgccgctgcgccgggccctggcggaaatccagcgctgacgaaaaccgaatgcggaaccatatcggcgctcgatcggtttggtcggtatgaagagcacaggaaacaaagcccgccgcggcatgacgcggttcgtcgccatcatattcatcacggccgtcgtcatcgccacggcgtactatttcgttttcacacccggctccgcctgacgacgccaatcacttagccggcttgaaggtccatttcacgacgtagtcgccgttgcgcttggtcttgatcctggtcttgaccctcacgggaccgccgatggccgcctccgccgcctcgaatgcctggcgggcctgcgccatggcgtcgtgatacgcggagttgtcgcgtcgcgggctgtcggcgatctgtttcaggagcgtcagcgtgtcgggtgcccgttcatccggacgtttgctgccagctgcgctcttgcgcgtctcattgcccattcccgctccgcccatgctcacgccattcgtccgtcagcgtccatataccggccgggaacgaaatctcaatgcgggcgagcgccgtgcgccgatgccgcgcgaattttgcccggggcgagccattgaagtgcatcgcgcgcggcacagttatccgcagacgcgggaaatctcccggcatccgctctctgttcccggaaacgcatgacaacacagcagattctcgccttcggcgtcattggcctgatgatggcggtcttcatctgggaccgttttcgctacgatctcgtcgcctgctgcgcgctggtgctggcgatcgccgtcggtctcgtgcccttcgacaaggccttctccggcttcagcgacgacatcgtcatcatcgtcggcagcgcgctcgtcgtcagcgccggcgtcgcccgctccggcatcgtcgataccgcgatcaagcgtttctttcccaatctcgacacgctgcacacgcagctcgcgctgctgctcgtcgtcgtcgccgtcctctccgccttcatcaagaatatcggcgcgctggcgatcatgatcccggtcgccttccagttcgcccgcaagagcggcaagtcgccctcgctctatctgatgccgatgagcttcgcagcccttctcggcggcctgatgacgcagatcggcacctcgcccaacatcgtcgtctcgcgcctgcgcggcgagataacaggcacgcccttcaccatgttcgacttcacccccgtcggcgccacgctggcgctggtgggcgtcgtcttcctgatcttcttccactggctggtgcctgaaagaaagaacgaaaacccgtcgctggaagaggcgctcgacgccaaggcctatttctccgaagccacggtggccgaggaatcgaccgtcgagggcaagccgctcagcgacctcctgaaactcggcgacggcgacgccgtggcgaccgcgatcctgcgcggccacacccgcctctcgccctttcccgacgtgcagctcagaagcggcgacacgctgctgctcgagggcagccccgacgcgctcgaccgcgtcgtctccaacgccaagttgaaactctcgggcaagccgatcgccgaccccgccgagcgcaacgacctgatctcgatcgaggcgatcgtcgcgtcggaatcgcagctggtcggctggtcggcgcggcagctgtcgctgtccaaccgccgcagcgtcaatcttctcgccgtctcccgcaagggccatcggctgaacgagcgcctgagcgaagtcaggcttcgcgccggcgacgtgctggtgctgcagggcaaccgccgcaacctccccgccttcctgcaggaattcgcctgcctgccgcttgcccagcgcgacatcatgctcggcacctcgcgccgcgcctatctgccgctgctgatcctgctcgccgccatggccgccaccgcgaccggcgcggtgccagtcgccgtctccttcttctgtgcggcgctcgccatggtcgtcttccgcgtcatcccgctggtcgatgtctacaaggcgctcgatgctccgatcctgatcatgctcgcgacgctgatcccggtttccgacacgctgaggacgacgggaggcagtgagctgatcgccggctggctcggcacgctcgccgcccagatgccgcattacggcgcgctggcgctgatcctgatcacagccatggccgtgacgcccttcctcaacaacgccgccaccgtgctcgtcatggccccgatcgccgcgagcttcgccgaaacgctcggctacagacccgacgccttcctgatggcggtggcgatcggcgccggctgcgacttcctgaccccgatcggccaccagtgcaacacgctggtcttcggccccggcggttatcgcttcagcgactacccccgcctcggcctgccgctttccttcctgatcatcctcgtcagcgtgccgctgctgctctgggtgtggccagtcacctgagacgtgacccgatgggcgtgtcgaaccggcgcaaccgacggcgcgggcggcattttccttgacgtgtgcagccgaatatggccttaaagccagccaaacggacaattggccgggcaagcgggcgaaacgcccttttccggttggtttcctgatccagttatctgcattctcaaggccgagcgtcgctttccctcagaaagccgtccggcatttatttgacgggcacataaaatgacagcttccggcgtccgcgtccgcattgctccctcgccgacgggcgagccgcatgtcggcaccgcatacatcgcactcttcaactatctcttcgccaagaagcacggcggcgagttcatcctgcgtatcgaagacaccgatgccacccgctcgacgcccgaattcgagaccaaggtgctcgacgcgctgaaatggtgcggcctggaatggtccgaaggccccgatgtcggcggtccctacggcccctaccgccagtccgaccgcaaggacatgtaccagccctacgcccaggaactgctggacaagggccatgccttccgctgcttctgcacgccagagcgcctgaccgagatgcgcgaggcgcagcgcgcctccggcaagccgccgaagtacgacggtctttgcctcaaatattccgccgaggaagtctcagccaagctcgcatcgggcgaaagctccgtcgtccgcatgaagatccccaccgagggctcctgcgacttcaccgacggcgtctatggcgacgtctcgatcccgtgggattcggtcgacatgcaggtgctcatcaagggcgacggcatgccgacctatcacatggccaacgtcatcgacgaccatctgatgaagatcacccacgtcgcgcgcggcgaggagtggctggcatcggtgccgaagcacatcctgctctatcgctatttcgagtgggaacagcctgtcttcatgcatctctcgctgatgagaaatgccgacaagtcgaagctgtcgaagcgcaagaacccgacctcgatctcctattactccgcgctcggctatatcccggaagcgctgatgaacttcctcggtctgttcttcgtgcagatcgccgaaggcgaggaactgctcgacatcgaggaactggccggcaagttcgacccggaaaacctctccaaggccggcgccatcttcgacatccagaagctcgactggctgaacggccggtggatccgcgagaagatgtcggaagaagagttccagagccgcgtgttgacctgggcgatggaaaacgatcgcttgaaggccggcatggcgctgtcgcagtcgcgcatctccaagctcggcgaactgccggagctgatgggcttcctcctgaagtcggatctcaacctcgatccgtccgccttcgccaagatcaagtcgccgccggaagagatcctcgagatcctgaacaccgtgcagccggatctggaaaagatcctcgaatggaacgtcgaatccatcgaagccgagctgcgcgccatcggcgaccgcatgggcaagaagctcaaggtcatcgtcgccccgctcttcgtcgccgtctccggctcgtcgcgctcgctgccgctgtttgactcaatggccatcctcggccgctcggtcgtgcgccagcgcctgaaactggcggcgcaggccgtcgcctcgctggtgggaccgaagtagtaagccaagcgcgcggagccccctcaccctaccctctccccgaggggagagggggagcgagccgccagctccgagtctcttctccccagcggggagaaggtggcggcagccggatgagggggccacaggctccgagttaagaattatatctgcggcagtgccgccaaagaggtcgaacatatgtccgagaacaagaccgaaaccgccaccctctcctccgacgcgactgaggtccgcgcccagaagctgaagctgctgcgcgaaaagatcggcgacgtctatccggcgcatttccaccgcaccatcaccaatgccgagctggccgagaagtacaaggatctggaatccgacatcgagacgacggatgtcgtcaccgtcgccggccgtgtctattcctcgcgcaattccggcatgttcatggatatccatgacgccggcggcaagatccagatcttcagccacaaggacgtgacgcccgaggccgcccgcgagatgctcgccatgatcgacatcggcgacatcatcggcgtgaccggcaccgtgcgccgcaccaagcgcggcgagctgtcgatcaacgcgcaagagatcaccatgctcaccaagtcgcttctccccatgccggagaagtggaacggcatcgccgatatcgagatccgctatcgcaagcgccacctcgacatcatgagcaacgacgaatccaagctccgcttccagcagcgctcgaagatcctctccggcatccgccgcttcatggaagacgacggcttcatggaagtcgagacgccgatgctgcactccgtctacggcggtgcgacggccgatccgttcaagacgcaccacaacacgctgaagcaggacatgtacctgcgcatcgcgcccgaactgtttttgaagcgcacgctggtctcgggcctgaccgacaaggtcttcgagatcaaccgcaacttccgcaacgaaggcgtttcgaccaggcacaatcccgagttcaccatgatggagtgctactgggcctatgccgattacgaggacatcatggacctcgtcgagcgcctgttcgagaagctggcgctgcaggttcacggcacgacggaattccccttcggcgacaaggagatttccttcaagggcccgttcaagcgcgtgcccatgcccgacgccgtcaaggaagcgaccggcatcgatttccttagcatgaagaccgacgaggaggcccgcgccgccgccaaggccgccggcttcgaggtcgagaaggactggacctggggcgaatgcctggccttcatcttcgaggagaaggtcgagggcacgctgatccagccgagccacgtcacccacttcccgaaggacatctcgccgttcgccaaggaagtgccgggcgagccgcgcctcgtcgagcgtttcgagacctattgcaacgcctgggaactgggcaacgccttctccgaactcaacgatccggaagagcagcgccgccgcatggtcgagcagctagagcaggcgcatgcccgtggcgagaaggacaagcagctggacgacgaattcctcgacgccatcgaccagggcatgccgcccgccggcggtctcggcatcggcgtcgaccgcctcaccatgctgctgaccaacgccccgtcgatccgcgatgtcatcctcttcccggcccgcaaggccaaggccgactgagccggctcaccgacatgcgaaaggcggcggcccgaaagggcacgccgcctttttttgttcctgctgaagcgatgatttactgtccgcgctcgaacaacgatcactcgcctttcgaagcagccggggccgcggcactctcgaccggcgcttcaccggcttcgccggctggcttggcggcctcgcccttcgccccagcctcgcccttggcagcgggcttgccctctccacccgtggtcgccgcgaccgcgatgggatcgacgcagtccgaaaaatccttgaaggcggcgttgagcgtgctgatctcgtcctcgggcaggtcgacgcgttcgccgaagaacaggccgttggccgccgccgttccatcgtaatagcgcgccgtataggtcttggcgccgacgatgctttcgacgaccggatcgggacgcgggatatagacgacgtcggcgccgatggcacggccgcgaatatcggagcgcagcgtcgggccgttattgtcgagaaccacgacctgcaccaggtccggcttctgtgcctcgtagatggctttggctacccggagcgccgtcttgacgcgggtcatgccgtcggtcggctcggtcttgatgtacttgcggacccagacccgcttctgcttcttgatggtgacaagattgacgtcggtgcacgcggcgccgttcacggtctccgcgggaggaccgagcagggtgtccttgccgatatacagcgctgcgccgccggaagtgcccccgagaaaggcaattccgccgatgatcagcaccaatttccgggaaggccggaagatgcgcagtaaggccttcacgccaactgctccgccatcaagtcactccaacgcaataaactggtctcgacgctagagaaatgacgtttcggaatacttaaatgcgggcaagaagtttgtgccagtcagggacttaacccaaaaaaggtcctgcatggtgcacgcttgcaatggcgccggacggcatgctctaaagtgccatggccttcacgcttcgccagatccagtatttcatcgcagtggccgagcagggctcgatcacgcgggccgcgcagaacctgtcgatctcgcaatcctcggttaccgaagcactgaaggaactggagaccgacctcggcgtcgagctcttcgatcgccacccgcgcgggctgacgatcacccataacggccaccagttcctgcgccatgccaccaagatcctggcgagcgtctccgacgcccgcgccagcttttccgaaaacagcagcacgccctcgggcacgctcaacatcggcgtcacctcgctggtcgccggctacgtgctctccgacctgctcgcccgctaccgccgcgcctgccccggcgtcgaggtctccgccatcgaggacaatggcggctatctcgagcatctgcttgtcggcggcgagctcgatgttgccgtgatggtcatctccaacctgcgcgaccgcatggcgctgcaggccgagatcctggaaacctcgccctaccgcctgtggctgcccatgggccacccgctggtctcggccgatatcatctcggtcgccgatatcgcccgcgaaccgctgatcatgctgaccgtcgacgaaatcgaggagaacaccggcaaactgctgtcggcgctcggtgcccgcccgcacgtcgccttccgtacccgctccgtcgaggccgtgcgcagcctggtcgcgaccggtgccggcgtggcgctgctgcccgatctcgtctaccgcccctggtcgctggaaggcgaccgcatcgaaagccgcgacgtctccggctcgctcccggtcgtgcaggtcggcatggtctggcgcaagggctccagcctgccgcaggccgcgcgcgacttcgtcggcatcgccgaggccatgcgctccggacgggtgcgctagcctgcccgaagaccagctatcggaaattccgatatcgcctttctgataaatgaatttgcgaaagcggctttttcgcgtcaccttttccggtgggaacaaaacgccacgaagtggcaccaaaaccgggagacatcagatgaaatatcttctgaaatcgtgcacggctgcgcttgcgaccctgagcttcgtgacccaggtcgtggcggccgagccgctgaaggaattgggcaagggcgaaggcgccgtcagcatcgtcgcctgggccggctatatcgagcgcggcgagagcgacaagaattacgactgggtcaccggcttcgaaaaggaaaccggctgcaaggtctccgtcaagaccgccgccacctccgacgaaatggtgtcgctgatgaacgagggcggcttcgacctcgtcaccgcctccggcgacgcctcgctgcgcctgatcgccggcaagcgcgtccagccgatcaacaccgatctcatcccgagcttcaagaacgtcgacccgcgcctgcagaacgcgccctggtacacggtcgatggcgtccgttacggcgttccctatctctggggaccgaacgtcctgatgtacaataccgatgccttcaagggcgaggcgccgaagagctggaaggtggtgttcgaggaagagacgcttcccgacggcaagtccaacaagggccgcgtccaggcctatgacggcccgatctacatcgccgacgccgcgctctatctcatgagccagaagccggagctcaacatcaagagcccctacgagctcaacgaggaacagtacaaggcggccctcgacctgctgcgcggccagcgcaagctggtctcgcgctactggcacgacgcgatgatccagatcgacgatttcaagaacgaaggcgtcgtcgcctccggctcctggcccttccaggtcaacctgatgcaggcggacaagcagaagatcgcctccaccttccccaaggagggcgtgaccggctgggccgatacgaccatgctgcacaccgaaagcaagaacccgaattgcgcctacatgtggatggagcattcgctgaaggccaagacccagggcgacgccgccgcctggttcggcgccgtcccctcggttccggccgcctgcaagggcaacgccctgatgaccgacaccggttgcgccaccaacggctacgataatttcgacaagataaagttctggcgcaccccgacggccaagtgcgaacagggcgaatgcgtgccctatcaccgctgggtgtcggattatatcggcgtgattggcgggcggtaggcgttagcctcggcgtaagcggcaagtcccctccccaacccctccccacaagggggaggggctaggcagcgtcccactgtttctcgacctcgaagacgtctgagagggtgcaacacgttaagcccctcccccttgtggggaggggtttggggcggggtcttcattcccgcaccacccaaagcatattagatcggagcctccaaaatgacacccgccgtccgtttccagaaggtctcccgccatttcggagccgttcgcgccgtcgatggcgtcgatctcgagatcgcgcccggcgagtttttcgccatgctggggccgtcgggatcgggcaagaccacctgcctgcgcctgatcgccggtttcgaacaacccacggcggggcatatcgagatcttcggcgagaccgccgagggcgtgccgccctatcggcgcaacgtcaacaccgtgttccaggactacgcgctcttcccgcacctgaacattctcgacaacgtcgcctacgggctgatggtcaagggcgtcggcaagacggagcgcgccagagccgcggaacaggcgctggaactggtgaaactccccggctacggcgcccgcaagcccgggcaactctctggcggccagaggcaacgcgtggcgcttgcccgcgcgctggtcaacaagccccgcgtgctgctgctcgacgaaccgctgggcgcactggacctgaagttgcgcgagcagatgcaggaggagctgaagggcctgcagcgcgcgctgggcataaccttcgtcttcgtcacccacgaccagggcgaggcgctctccatggccgaccgcgtcgccgtcttcaacgatggcggcatcgtccaggagggcacgccgcaggatatctataaccgcccgaaaacccgcttcgtcgccgatttcgtcggctcctccaatgtgatcgcccccgacctgatgaccgcgctcggcggcgagaagcgctgggcgagcctgcgcccggaagcgatccgcctcaccggcgacggcgtcgaatcccgggtcgagaacgccagcttcctcggcgccgccacccgcctcacggtcgccgccagaggcgctcgcctgcatgtcatgctgccatccggcgcagccgtgcccgaggtcggcgccgatgtgcgcctgtcgtggcagcccgtcgacgtgcactacatggacgatgccgcatgaccgccatcgcgctcacccacgaggagacagccacctcgatcctgcccggtcgcggcggcttcttcggccggatgtcggatacgttctggcgccggccgaagctgctgctcttcctgatgctgacgccgccgctgctctggctcggcatcatctatatcggctcgctgatcgcgcttctgctgcagagcttcttttcgatcgatgatttctcaggcctggtgaactacgaattcacgctggcgacctatgcgcagctgctgtcccccaccaatttcgacatcatcgccaggaccgtggtgatggcggcgctggtgacgctggcttccgccgtcgtcgccttcccgatcgcctattacgccgcccgttacgccaggggtaaatggaaggcgctgttctatctcggcgtcatgctgccgctctggtcgagctatctcgtcaagatctatgcctggaagctgatcctcgccaaggagggtattctcacctggatcttcgccaagctgcatctggcctggctgctcgacggcgtgctggctctgcccgttgtcggcggcaactcgttgtcggtaagttatatcggcaccttcctcgtcttcgtctatgtctggctgccctacatgatcctgccgacacaggcagcactcgagcgcgtccagggcaacctgatcgaggcctcgtcggatctcggcgccacgccgggccagaccttccgcaccgtgctcttgccgctggcgctgcccggcatcgtcgccggctcgatcttcaccttctcgctgacgctcggcgattacatcatcccgcagatcatcggttcctcgcgcctcttcatcggccaggcggtctatgcgcagcagagaacggccggcaacgtgccgctcgccgccgccttctccgtcgtccccatcgtcatcatggccgtctatctgtggctggccaagaaacagggagccttcgatgcgctctgaccgtggccaacgcgcgccgatggcgctcaagatcgccgccgccggcggcctgctcttcctgcacctgccgatcctgttgatcttcgtctacgccttcacgacggaggagaagagctaccagtggccgccgccagggctgacgctgcagtggttcggcatcgcctggaaccggccggatgtctgggctgcccttggactttccttgcaagtcgcctttatcgccaccgcaatcgcgctggtgctcggcacgctctgcgccgccgccgtcagccagacgaagttcttcggccgcgaggcgatctcgctcctcgtcatcctgccgatcgcgctcccagggatcatcaccggaatagcgctgcgctcggccttcagcctgttcgacatccccttctcggtctggacgatcgtgctcggccacgccaccttctgcgtcgtggtggtctacaacaacgccgtcgctcgcttccgccgcacccagggctcgctgatcgaggcgtcgatggatctcggcgccgatggcttccagaccttccgtcacgtcatcctgccgaacatcggcacggcgctcctggccggcggcatgctcgccttcgcgctctccttcgacgaggtgatcgtcaccaccttcaccggcggccagcaatcgacgctgccgatctggatgctgcaagagctgatccgcccgcgccagcgcccggtcaccaacgtggtcgccatggtcgtcgtgctcgtcaccttcctgccgatcctggcggcctactacctcacgcgcgacggcgatcaggtcgccggagccggaaaataaccggagcgcgggatacccccatcccgtcccaccaacgacaagggagaacatcatggacaccgcgatgctgattggatcccgcttcgaagcgggcaccgagatcgaagaaaacatcctgaacccgaagaccggcgaaaccgtgctgagccttgccgaagcctcggtcagccagatcgacgccgccgtcgacgccgccgaaaaagccttcacgagttggtcgcagacgacacccggcgagcgcgccggctatctcctgaaaatcgccgacgcgatcgagaaggacgcccagggcttcgcgacgctggaggcgctgaactgcggcaagccgatcaacgcggtgctcaacgacgagatccccgccatcgtcgattgctaccgcttcttcgcaggcgcggtgcgcaacctgcacggcccggtcgccggtgaatatctgcccggccacacctcgatgatccgccgcgaccccatcggcatcgtcggctcgatcgcgccttggaactacccgctgatgatgatggcctggaagctggcacccgcgatcgcgggcggcaacacggtcgtcttcaagccctccgagcagacgccgctgacggcgctgaagatggcgaagctcctctccgacatcctgcctgaaggcgtcgtcaacgtcatcctcggccgtggcgagagcgtcggcaacgcgctgatcaaccacccgaagatcgcgatgctgtcgatcacgggcgatgtcgccaccggcaagaaggtgctgcaggcggccgccaagaccgtcaagcgcacgcatctggagcttggcggaaaggcccccgtcatcgtcttcgacgacgccgatatcgatgccgtcgtctcgggcatccgcaccttcggctactacaatgccggccaggactgcaccgccgcctgccgcatctacgccgacgctagggtctacgacaggttcgtcgccgacctctcctcggcggtgtcctcgatcaagttcaaccttgccgacgacgcagaaaacgagatcggcccgctgatctccaggcgccagcgcgaccgggtcgaaagcttcgtcgcccgcgccggcgagcacaagcacatggagatcaccaccggcggcaagacatcgggcgacaagggcttcttctacacgccgacggtcattgccggcgccacgcaggaagacgagatcgtccgccgcgaggtcttcggccccgtcgtttccgtcacccgcttcaccgatgtcgaggatgccgtcacctgggccaacgacagcgactatggcctggcctcctccgtctggaccagggacatcagccgcggcatgaagaccgccgcccgccttcaatatggctgcacctggatcaacacccacttcatgctgaccaacgagatgccgcacggcggcctgaagcaatcgggctatgggaaggacatgtcggtctacgcactggaagactacaccgccgtgcgccacgtgatgatcaaccacggataagcgcgacaggattgaagatcacaacgtcggcgtgggctaccgcgccgacgttcgtgtttccccagcagataaatcgaaccgctatctcgttggatatggaacatttttcgcgctggcgcgtcttctaacggaccaaccagaaggaacgcctccatgctgaaatgggctcttatctttttcgtgatttcgctgatcgcgggcttcttcggcttttccggaatttccgcggcgacggcgaccatcgcgcgcgttctcttcggtatcgcgctcgtcatcttcctgatcttcctggtgctcgcgctgctcgccggccaggcaatcttgtaggaaaccggttctataacccggccttgaccgagaacagcgacacggggtcggcgacgcccttcagcgacaccggctccagcgcctcgaaatccatttccgacatctcgtccgtggcggcatcatgcgtgccgccgcagacgagcacctgcgacggcgcggcgaccgatgcgatccgcgccgccagattgaccgtatggccgaaaatgtcgccgtcgcgcggcactacctgaccggtcgcaacccccaccctcacctccggcaattgatgcgccgcgctcgccgcgacgagcgccaatgacgccttcagcgccgcctcggcgtcgggaaacagcatcatcaccccatcgcccagcggcttgacgatccgcccgccggcaagattggcgagacgctgcgccagcgcttcgaagctcgccgccttctcggccgccctgacatcgccgatatcgcgcgtcaacgccgtgaagccggtgagatcggcgaaggccacggccggcagcgcctgatcgcctgccggctccacgcccaacccgcgcagggcgtcctgcaatcgcccgaccacattgtcgaacactgcctcctcgagcatccgccgctgcagcaggaagagcatgcggatgccgatgcgctgcagcgaaagccgcgtggccgcgcccgccgcgagcacctcgcgatggctgaacccggccgcaagcatcggctcctcgacctcggcgcggaacagatcgcgcatcgtatccacgcagcgccgcatcgactggccgaagaccctcagtaccctctgcatgccctcgtcggaagcgccgagcccggtacattcggcgatcagccggatgaactcctcgtcgtcctcccgcagcgcccgcctgtgcgacatgggcgaaagcccggcgctcgaatgcagcgcgttgacgcgcccgagatcgagcgacgtgtcggcaagcgcttccgcgagagatacatccgacatggtgaccggctcgaacatcagctggctggcgaaatcgagcgagacgacctgttgccggagaccggtggcgagcgtttccagcgcgatgccggcggcgttcagtgccagcaccaaccgcagccggctgacatcgctcgccgcatagccctccggcccggcctcgatgatctgaaggcgtgccacggcgtccagctgctccgcagcgcaaccggcaagcgccgccaatctctcgcgcgacaacgaccccatgaagcccccaaaacaaccccaggtgaagaaaacccctcttacaccagattgccaagcggctctatcgcgcgcgcctacctctaaaggaggcttgcgccgacattgatggcaagcgccaggattgtcgtgttgaagagaaacgacagtaccgaatggagcagcgtcagcttgcgcatcaccgtcgagctcgtcgcgacatccgccgtctgcgaggcgacgccgatcgtgaaggagtaatagagaaagtcccagtagacgggctcgtccagcccctcgggaaacttcagcccatctcccttgacgccatcgccatcatcgtcgccgccatagaagcggtgcgcgtaatgcacggtaaacagcgtgtgcaggaacacccaggagatcagaatggtgactacggccgccagcgcccggccgagcgcgacgctgggcgccgcctccttgacctgatgcagctccagcccgatgccggcgatgctggcaagggcggccgagatcgacaggaacatcagaagcgaatccgagaaatcgagatcggccgaacgcttgcggatggtcgccacgctcgccttcaacatccgccgccatgtggcgacgatgaacatcaccgcggcgacgttccagccggccaacaagttacgcgccgtcacctcgcgcgtcgtcagaagcaggaagaccgcgaggccgacgagcactgcgatcacgaagatcgcatgcttgcgcagcaaccgaaggggacggccactgccgccagacgtaacctctgccatcaaatgctccgccgctgcgagatcgccaacgatatcagcttgataccggcaagagcaatatggcctcagccggtccagccaccatcgaccacatggatctggcccgtcgtgaacccggcctcgtcgccggcgagataggtgacgagtgccgcgatctcctcggcggtggcgatgcggcccatcggctggcgggcgatgaagtcgctgagcgccttgtcgtaatcgccggtggcgcgcagccgctcgtgcagcgaggggctgtcgacggtacccgggcagatggcgttggcgcggatgcccttggcgacgaagtcggacgcgatcgacttggtgagcccgatcacggcggccttcgatgcgctataggcaaagcggttcggcacgcccttcacgcttgatgccaccgaggccatgttgacgatcgaacccttgcccttgtcgagcatgccgggaaggaaggtgcggcaggtcgtatacatcgccttggcgttgaggttgaacgagaagtcccagtccttctcctcgcaatcgaggatcgagccggcatgcacgaagccggcgcaattgaagagcacgtcgatcggcccgatctcggacgcgaaggcccgcacggcgtttgcgtcgagcacgtcgagaacagtggtcgtcgcgcccgccagcgtcgcaagcgacgcctggttgatgtcggtggcgtagacatgggcgccgagcgaaatgaaccgctccgcgctggcgcgtccgatcccctgaccggccgccgtgacgacgaccttcttgccttccagaccgtggctcataattcctcccgttatgcgtggcgcttgcggcgcattcattcatatgcaaacattatattcattatgtcgtcaatcacattgtccgacgccggacgctgacacgggtgggaggcccgcgtcatcaatcgaaaaatccggcaaaagactaagaggacggcaagaaaagcctgcatgaagggggaggaaccgcatgctcttcgacacacatctgcacgtcatcgaccgcaatcgcctgcactatccctggctccccgacgtgccggatctgaaccgcgacagcctctatgagcactacgcccgcgacgcacttcgctgcggcatcaccaatgtgctgcacatggaagtcgatgtatcaggtgatgcgatcgagcaggaaacggccttcatcaaggagatcgcagagagacccaaaagcctcgtgcgcggcgccatcgccgcctgtcgtccggaggaagagggctttccggcctatctcgaacgctgcctcgtcgaccccttcatcaagggcttccgccgcgtcctgcatgtggcgcccgacgacacctccgagcgcccgctgtttcgcgagaacgttgcccggctctccaatatccggctaaccttcgatctatgcgtcttcccgcaccaattcgaacgcattctcgatcttgtcgacctcaaccccggtgtccgcttcatcctcgaccactgcgccaatccgccgatcaagtcgggcatgagcgccgtctggcatcgcggcattaccgaattctcccgccgcccaaacgtcaccgccaagatctccggcgtcatcgcctatggcgatctggagcgctggtcggtcgacagcctgcgcccctatgtcgagcacacgatcgaaagcttcggctgggaccgcgtcgtctggggcagcgactggcccgtctgcacgctcggcggcgggctgacgccctgggtggcggccacgcacgcgttgacatcaggctgcagcgccgaggagcgcgacaagctgtatcaggggaatgcgaagcggatttgggctgtggagtagcgaggtcgggaaacgtcgtcgcccatcgccgccgccctcgacgcccgctttgatacgtcaagcgccaccccaccctccctcattctcgcccttgtggcgggaatccagccacggcgcgtccgcgccgtgaataacctcttacggtgcgcctggcagaaaagagtctttccgccgcgcagacgcgcgtcgactggattcccgccacaagggcgggaatgagggtgaggacgtttcagcttggagtatccaattgaccgcccgccgagaacagacccacaacgcaaaaaaagggcggctccaccggcaccgcccttccgtcattcaactacccgcaaaacccttaggcggctgcgagctgcagttccttggtgaccatggcgcgcagcgtgccgaggtccttggcgaaggcgcggatgccttcggcgagcttttcggtcgccatggcgtcttcgttcatcatccagcggaaggtcttttcgtcgacggcgatcttggagatcggcttggcaccttccggcgacagcttgcgctccagcttgccctggtcgttggagagttcgtcgagcaggttcggcgcgatcgtcaggcggtcgcaaccggccagtgcttcgatctcgccggcgctgcggaacgaggcgcccatgacgatcgtcttgatgtcgttggccttgtagtagttgtagatctcgcgaacggagagtacgcccggatcttcctcaggcgtgaattccttgccggtcgacttcttgtaccagtcgaggatacggccgacgaagggcgagatgaggaatgccttggcgtcggcgcaagcgatcgcctgtgcctgcgagaaaaggagcgtcaggttgcagtcgatgccttccttctgcaggatttcggcggcgcgaatgccttcccaggtggaagcgagcttgatcaggatgcgatccttctcgatgccgcgctccttgtagccggcgatgatgccgtgagccttttcaaccgacgccttggtgtcgaaggaaaggtcggcgtcgacctcggtcgagacgcggccaggaacgagcttggagagcgcggcacccacggaaacggcgagacggtcggcaacggcggaagcaacggcttcggaattgccgccctgcttcttgccccaggaaacggcttccttgatcgcgtcggcgaacatcggcgtgccgagtgccttcaagacgatgctcgggttggtcgtgcaatcgaccggcttcaggcgggcaacggcttcgatgtcaccggtgtcggcgacgacggtcgtgatctcgcggagttggtcaagcttggatgtcatggtcgcgtgtccttttgacttgagctgcgagccggagcacttgaggcccggcgaatgaggtgatctacggattgcccgtactgtctttgaagtcgctgtctgtgaaatcgtgcccgcgcgtttggcttacatcataaacgtcggcgagcaccccatcgttcccgtctcgggctgccgcaacgaagacgtccaagggcaatccagccccggcgcaagaccgctgcgatttgccatatgcccgcacagtgcctcctacaatggacggaacgaccagttatcaagactatcgctattccggggccataatgtcaaggacatttgtgcatttcaattgacataagtgtcacaccggtcattatcgcggcgacaaaccatgccctgtctgagcaggatctagggcgcctttgcttttggaggagatgtggtcaagctaaaacgcggcacgcacaccgcctattcggaagcctcctcgctcagactgcgcgctgcctggctctattataaccagggattgacgcaaaaagatgtcgccgaacagctcggcatcagccgcacgactgtcatccggctgctcgacgaggcgatgaagcgcagcgaggtgcagatctggatcaacgattcgatcggcgattgcgtcgagctgtcggtgaagctggagcgcgcctacggcctggacgaggcgatcgtcgtgcccgctcccgtcacctccgatccgaatgcgctggccaaaagcgtcggactggcgctcggccagtttctctccgaagccattcccgacaactacacgatcggcgtcggctggggccgcaccatgacagcctcgctgtcgagcttccgcccgccgcgccgcgacaattgcaaggtcgtctccctgctcggcggcatcgtcgccgtccatcagaccaacccgatcgattacacctggcggctcgcaagccagctcggcgctgagtgctacatgttcctcgcgccgcttctggtcgattccaccgagaccaagcgcaacctcatcgagaagtgcggcctcgacaccatctaccggctcgccgaaacgctcgatctcgccatcgtcagctgcggcgatatcggcccgcattcgacctctctgtcggagggatggatctccaagggcgagttgcaggagctgatcgatgccggctgcgtctgcgataccatgttcaatttcctcgacaaggacggcaacacggtcgatcattcgatcaacagccgggtgatgtcggtcgatctcgatacgctaaagaaggccaagcacatcgtgctctcctccggcggcgcccaccgggcggtcgcgatcagcgccaccatcaagcgcatcggctgcaacaccctgatcaccgacgagagcgccgcccgcgccctgatcgagctatgggatcaaacggctggcgccgctcccggttaggctgaagccgccgaacaattgcgccgccgatttccgacggcatccggcccgcactaacatgtcacgaacgacgagcggcgttgcggcaatctggtttccctgcacacctgcgggcgcagtagcaatggctcgacgaacttcctcagtcgtcaacgtgagaggccgctgacacggcgcgcctccgaggtcgacaacaactcccgcagcctcgccgacaccgctcagataagcggtgagcacctgttgcgccgtccggttggttggcgcctgatccaacatccgggtgacttgcgcgaccgatatggcgccagcgttcgtcgattgctcggcatgggcgggaacgagcacgaggcacgacgcaagtgtggtgatcgtcattggaatgggtcgaaacatcgatatgtgacctcctaggtgcataaataacttctatacaaaaatttattattgtaaaacagaaattattttttatgatgcaatcattcaaaggagctctcgaatgatcacatccggcataagcgcgacgcgacgcgataactcacgcacaaaccagctttatcgtgttcgccgtttaagcggggtgatggcaacggccagtgctgtggtggccgtcctgctcgggaccgcgatgctactctattggtgcctgacccctgccgatatgttgtttcgccatgccggcctcctcgctcctccgccggcatacatcgggctttccgcgcggctcgccgcattcgcgattgcgatgatcccgctcggcgcgctgattgttggcctgctgagcgcccgacgctgcttcggttgcttcgcggctgggcgcatcgtctccagcgatgccgcacgacacctccgcggcttcgcgctcggcgtcggcgcgtcggctctgctcaagcccgtggccggggcaggcctgggcctgctgcttggcacgctctccccgagtcacgcgcgcagtctggttctgaacatcggttcggacacgctgctgtcactgctgtttgcagcgatggtcgcggtgatcgcgggagtgttggtcgaagcggccgagatcgccgccgagaacgaccagttcgtctgaggagaaccggtcatgcccattcaagtccggctcggcgtcatgctcgccgagcgcaacgtcaagtcaaaggatctcgccgagtatgttgggatcaccgaggcgaacctttcgcttctcaagaaaggccacgtgaaaggtgtccgtttcgaaacgctggagagaatctgcgacttcttcgactgccagcctggcgacctgctccgctatgaacgcgccgaacccaaggccggagacgctccgtgagctgggcaccggttcgcggcacccggccccttcatctcggacgttcgcctcgagatccgccacgatagcgaggatgtcgccgacgtcatcgtcaatttcgatccgtccagcctctgccagagcatcctcggcgtctggctcacgtgcgccgcattcgcagcaagcatagcgacgaccacgtcaaggaggaggccaaccgccccgaggcactaagctgatccgaagggccgacagcacgctcacctgccgacctctttccgcacgcatctccgcgtccggccgaagcgtcatatatccttcatgagacgctgcttacttggcgccatgagtggccttgccgtgcgtgctttcatgatatcgtcatgcggcgcagagctaggcagctccgcaagcgtccgaagcgacaaatctgaacagggatcgagatgaccaccatgagaggcacgccttcaaccgactggctcgaggccgaactggccgatacgctggatgaagattacgagctcgagctctccgagccggcgctgtccgaggaaatccgcaagatctaccgcaaggcgcacccgccatcgatgccgcgcatcgagtatttccggtcgctgatcgcccttcagtccgagctgatccgcctgcaggactgggtcacctaccacaaggaaaaggtggtcgtgatcttcgaaggtcgcgattccgccggcaagggcggcgtcatcaagcgcatcacccagcgcctcaacccgcgcgtcgcccgcgtcgtggcgcttcccgcgccgtccgaccgcgaaaagtcgcaatggtatttccagcgctacgtgccgcatctgcccgccggcggcgaaatcgtgctcttcgaccgctcctggtacaaccgctccggcgtcgagcgcgtcatgggtttcgccgacgaggaacaggtcgagcagttcttcaacgacgtgcccgaattcgagcgcatgctggtccgttccggcatccgcctcgtcaaatactggttctcgatcaccgacgaagagcagcaactgcgcttcctcgtgcgcatccacgatccgctgaagcagtggaagctctcaccgatggacctggaatcccgcgtccgctgggaagcctacaccaaggccaaggaagaaaccttcgcccgcaccaacatcccggaagccccgtggcacatcgtcgagggcaacgacaagaagcgcgcgcgcctgaactgcatcgaccatctgctgtcacagttcccctacgaggacgtaccgcacgaggagatcgccctgcccgagcgcgtcttcaacccggactacgagcgcaaggtcctgccgccggagttgtacgttccgtcgaagtattgattggaagcgtcggcgggtgaggccccctcatccgcctgccggcaccttctccccgtcggggagaagagactcggggcccgccgctcgcgccaacctccccttctccccagcggggagaaggtggcccgaaggtttcaggtgcaacaaagttgcaccggggatgagggggctgcacccacaaccccatccatcccaaccacactcaagcgtgcgccgactcccaccccagcatcgcccgcttgcgcgtcagcccccagtgataacccgtcagcgcgccgctcttgccgagcgcccggtgacacggcaccacgaaggagatcgggttggcgcccacggccgcccccaccgcccgcatcgccgtcggacggccgatgtcgctggcgatgtcgctataggtcaccgccttgccgaaagggatcttcaacaggctctcccagacctgcacctggaaatcggtgccgatcagcacgacccgcagcggctggtccgaggtccagcggccgggctggaagatgcgcgaggcgtaaggagccgtcgcgtcgcggtcctcgacgtaatcggcgttcggccagcggcaggtcatgtcctcgagacacgcggtttcgtcgccgatatcggcgaaggcaaggccggcgaggccgcggtcggtgatcatcacaagcgcgatgccgaagggcgagggatggaagccgtagcggatcgtcagtccgccgccccgcgccttccattcgcccggagacattgcctcgtgcgtgacgaagagatcgtgcagccgcccggggcctgacagaccgacctcgaaggaggtctccagcaagggcagctcctccttgcgcagcagccgcttggcatgatcgagcgtcaccgcctgcaggaaggccttgggcgaaaggccggcccagcgggtgaaggtcttttgcagttgcgtcggcgattgattgagacgcatggcgatcgcttccagcgacggctgctcacggtaatcctcggtgatcagctcgatcacctggcggacggtctcgtagtcgggaccatcgggcgtgatgtcttggttcagcttggctaccatgttcatgatctttctccttgtcacaaggagatagtcaagcggaatggctgaggccacccgattcttgcgcctgaatcagatgatcgtcagatacgctgcttgaccgtcgccagcgcccgcctgaaggccttggcgaagctttcgcgatcgtcgggattgagaaagccgccgatatcggtcgcccgtccctcgccggaaatatgcatcgacaggatgccgatctcctcgtcgcggcgcacggaaaagcgcgtccagaacggattgaaatgatgctcgaccatacgccccgacggcgcgaccttgcgcaccgcgatatcggtgcgcgacacggtcaccatttcgcgcgccctcgccgcgcggtagttcagccggaaggcgccgtagagcagcaggaaatcgagaccgaagaagaagccgatcggccaggcgccggtaacgatgaagagcaggccgtaaaacaggaaaaagccgcccgtcagcagcagaaccactctgaaccccgttcggccgagcgaccggtggggaaagagctcggctgaaaataccggctggtccagaaccgcctgctgatcagcgctgtcggcgttgctttccatcatggctggcgagtatagattgtccatgtccagtccgaaactcaaatcctccgccacgtcgtcgcagcccgaaaaaatcgtcgttcgccgcaagaagaaggcgaccgtccgctccgtttatagcgaggccgagcgcgaggagatgttccgccgcttctccgtgcagcggccggagcccaggggcgagctggaacacagcaatcccttcacgctcgtcgtcgcggtcgcgctctcggcgcaggcgaccgatgccggcgtcaacaaggcaacgcgcgcgctcttcaaggtcgccgacacgccccagaagatgctcgatctcggcgaggagaaggtgcgcgattacatcaagacgatcggcctctatcgcaacaaggcgaagaacgtgatcgccctgtcgcggatgctggtcgatgtcttcggcggcgtggtgcctcagacgcgcgacgagctggtgatgctcccgggcgtcggccgcaagaccgccaacgtcgtgctctccatggccttcggccaggccaccatggccgtcgacacgcatatcttccgcatcgccaaccgcatcaagctggcgccgggcaagacgcccgacgaggtggaagaacggctgatgaaggtggtgcccaagcgctacctctaccacgcccaccattggctgatcctgcacggccgctacacctgcaaggctcgccgcgccgaatgcgagcactgcgtcatcgccgatctctgtcgctcgcccgaaaagagctgcgacatcccggcgccactggtcgagctaccgccgcaggtgatcggcgaggccgtcgaatagggctttgctctatcgcatgtcggtgccgcaaaaccgctgcacgcttttgcgcgacatgctttagacccgaacgccgagctgcttgcgcgacagcagcttgtgcaggtgcaccatcatgcccgcggcaaacagcggcgtcagcaggttgacgatcgggatggccaggaaagcggcgatgacgaggccggcgagaaacaccgtcggcgcatgttcctggcgaaacagccgcgcctcggccggtgacctgaagcgcatggcggcgaactcgaagaattcccggccgagcaggtagccgttgaccatgaagaaggcgacgagattgacgccggggatgaacagcaggaacagcgccacgacattgccggcgacgacgacgccgaggaacttgatcgagctcagcatggccgggccgagcggcatggcggtgcctggcacgtcgtcaggataatcgcgcttctccacaacctcggcgacatcgtcgagaaacaggccggcgatcagcgccgtcaccggcgagagcaggagcgcaagccccagcgccagcccgatccccgccatgatggcgaggacgaagcccagccagccggcccaatcgggcatggcaggaaagaagctggcgagccagggaaacacgaaagccatgaaggcgctgcgcagcgccagccacaggccgatcagcgcgagcacggtgagcccgagcactttccagaacaccgaccgcgtttgcgcggcgaaaagattggtgatggaaaggcgagccgcttcgagaatcattgtgacgtctccggttgtggcgatgatgtaggaatctgatctttgaacggcaaggctgaaattatttcgctaaatcgacggaattgttgttcaaaagcctttcataatatatatttaaatcagcatctaagattacttgcagggcgctgcgaatatttacgtgcgcagggatttgtttcaagctgacaggaaacaccacccaaaaatcgggacggctaccgtggaagactttgtccagaagctccgccaatacgcgaaatccggcacgcccgccgaacgtcgcatcgcgaaatatttcaccgaacacttgagcgatcttccgttcgaaaccgccgcctccgtggccgaccggctggatctgagcccgatgaccgtcggccgtttcctgcgggcgcttggctatcaggggctcgacagcgtcaaggtccagatccgcgacgtcggcggcgtttcggccacgcagatgcaggcgtcgatgtcggaactgcaggtcgatgcagccgacggaaagccgctcgccgtgctcgtcgccgagcagatccaggcgctccaccacatctatcatctcaccggacaacagcactggagcgacgcggtggcgatgatccgcgcggcaagcgaggtgttcatcgccacccatgtctcgcaggcgagcttcgccacgcatttcagccagcgcctgacgcaggcgcgcgacggcgtgcacgcgctcgacggcagcggcaaccgttttgccgaactcttcgcgcgcgtcagcggcgaaggggcgctgcttgtgatcatcgacagccagcgcttcaagaaggcccgcctcctggcgcgcatcgcccggcgctacggatacaaggtcgttctgatcagcgcccagagcgccaactgggtgctcgatcaggccaatctcatcctgccgctccccccgacccggccgggagaacaggacaacctgccgccggtgatcgcgcttctcgattgcctgtcctcggcggttgtcagcgccgtcggcgaagaggccgtcgcccgtgccggacgcatgacagaattcagcgtcatgctcggcgaggatccgaaccggtaggcgacaagcagcctcaacggaggcttcgccggatcagcttttcaagaacagagttattccatcgcctcgagctcggcgcgatggcggtacatcgcgagcagccggcgatagtcgcgatcgtaaagcgcgcgcttgctctcgtcgggcatgtgcacgtcgccgccggcatacatggccgaacccgccgcggcgagatcttcatgcagaccacaggcgacggaggccgccatcgcggttcccagaagcaccgcctcattcatcttcggcaccacgaccttgcagcccgtcgcatccgaatagagctccatcagcacggggttcttcacatgcccgcccgccacatgcagcgtgtcgggcgcgtagccgtattccttcatccgctcaagaatatgacggatgccgagcgcgatggccacgccggtgcgccagtaaagcgcgcagagtccgtcgaacgaggtgtcgagcgtcagcccgctaaccgcgccgaccgcgtgcggatcggcaagcggcgagcggttgccgtgaaaatccggcagcacgaaaatcctggcgccgaaggcatccccctcctccgcgcgcagctgcgatatccgcgacacgatcttctggtgcaacgccgccgtcggctcgcccccggccgcatgcatcctgacgacatggtcgagcaatgcccccgtcgccgactgtccggcctctaccagccaggtgccgggaaacacggcctcgtaataaggcccccacatgccgtggctcggacgccgcttgcgcgaaaacgagacgatgcagctcgacgtgccggcgatcagcgccagctgccgctccagctgctccggatcatgcgcgcttccgccgagcgcgcccagcgcgcccgcataggcgtcgatcatgccggaggagacgtgacagtccgtggtcagcccaagcgccgaggcagcctccttcgtcagcgttccgacgctaccgccgacagcaatggtggcgtcgggcagacgcccgcgcgcctgcaggtcctcgagaccgatctgttcgaggaaatccttgcgccagccatccttgagatgagccagatagttccacttggacgtcagcgtgcagcgcgagcgcgccagcgagccggtggacttccaggtcatgaaatcggcgaggtcgaagagatagccggtattcgcccatgtgccgggaagcttcttcttcagccacatcagcttcggcatttccatctcgggcgacatgaaatgccccgaatgctccaggacctcgtggccggttgccgtgcagaaatccgcttccttcagcgcccggtgatcgagccagacgatggtgtcgaaccgccgctcgccgcccgtcgacacgctgatctgcccgccatcgatatcccggaccacaagcgaacaggtgccgtcgaaaccgatcgcgccgacgctctcgggtgcggcgcccgattgctccatcgcgcggcgcacggcgatgcacaccgccgaccatatgtcctcggaatcgtgctcggcgtggttctcgcggggccggttcatgatgatcggatgatcggccttgcccagcagctggccgcgcgcatcgaagacgccggcgcgtgcactgcccgtgccgatatcaacagcaaccacatgctgaggcattaaaggtcgttcccgtcccgctgatgttttttgataaggtgtatcaaatccggcatgacgtcaaacgtagcgtcgggggcaaggcggtcaagctcgtcgcgatagccggcgaaattggcatgcgagccgccggtgaaggcaaacaccgtcatgcccgcggccttggcggcctcgatgccggccggactgtcctcgatcaccacgcagttgacgggagcgatgttcatctctctcgccgcatgcagaaacagatccggcgccggcttgccgttcttcaccatcgaggcgctgaagatattcggcagccggtcgatcagcccggtaacggtcagcgacaggcggatgcgttcgacctggctggacgaagcgacgcagcagggaatgtcgagcgcatcgatcgtatcggcgatgccgtggatcggcttcaactcggtgcggaagcgcgcatagagatcggtgcggatctgctcgaggaaggcttcgcccggatggacgttgtactccgtcttcatcgtctcgatcacggtcgcgaggctgcgcccgaggaaccggccatacacctcgtcctcggtgatcggcacgttgagatcattcatggccttgacgagaaccgtgacggagatcggctcgctgtcgacgaggacgccgtcgcagtcgaagatcacaagccgtgtttcagcatcagccatgacacatccaatcagggttcaagacattgcaggcaaagatgggtggatagcggcggggagcgtccgccgcctgatgcttatgccgcgagcttgttgtcgaggtaaagctgcagcgtctcgcgcgtacccttttcccacagcgtcttcagcgcatgcgcgaagcgcttgcggaagagctcggacttcgccacgtcgccgaagatgtcgtcgaaggcgaggaacgccatcggatcgtccttggccttcagcgccgccgcatgcagccggtcggcgctggcatcgttgaagacgatgtcctggccggtatcggtcttgccggcgaagtagcggcaccacaaagccgaaaccagcgacaggccgacgacgtcgcggccctggttcaggttgtcgagcgtcgacggcagaatgaatttcggctggcggttcgagccgtcctgcgctaggcgcgggatggtgtcggcgatcttcgggttgagcaggcgatgctcgatcagcgcgaaataatcagtcagcgaagtattcggcaccggcggcacgatcgggatgatctcgtccttctcgagcttggcgaggaaggcgcggatcagcggatcttccatcgagtcgtgcacgaaatgaatatccatcagcgccgccggataggcgatcgccgcatggccgccgttgaggatgcggatcttcatgtgctcgtagggcgtgacatcgggcacgaaggtgacgccgacattctccagcgccggacggccggcggtgaacttgtcttccagcacccactgcttgaactcttcgcaatagacgggccagttgtcctcgatgtcgaagacgtccttcaggagatcgatctcgcgctggccggtggccggcgtgatgcggtcgaccatggcgttcgggaaggcgacgttcgtcttgatccactctgcgaaggcggaatccgacagcgccgccgtgccgaccacggcgttgcgggtgacgacgccgttgtgcggaatgttatcgcacgacatgacggtgaacggcacgaggcccttgtccttgcgcgccttgagaccggccacgatcaggccgaagacagtcttcgggtcggcggggttcttgccgtcggccgcgattgccggatgatcaggattgaacttgccggatgcgtcgatgaagtagccgccctcggtgatcgtcatcgagacgatgcggatctcggggtcggcgagcttggcgatgatggtcttcgcgtcgccaacaggcaggatgtcgatcatcggcgcggtgacgcgcgccgaggtcttgttgttgtcctgctcgacgacggttgtcaggaaatcctgggcggcgagcttgtcgcgcatggcggcatccgacggcagaatgccggcgccgatgattgcccagtcatgtgcctcgcccttgttgaacaggtcgtcgagatagattgcctggtgggcgcggtggaagttgccgacgccgaagtgcacgatgcccgccttcagcgacgcccgctcataggccggtacagcggccgtcttggccgcgtcggaaagcgttgccagcgatagtttgcacgtcatgtctcagtcctcttgaaggtcttcagggtctatcgaccccggtatcggcgcgccgggcacctcgtccggcacgcgctctcttccccacccctaaaaccacgctcagatggcaaggccctgctcgttgaacctgtgaacacgggacttgtctggtgtcaggtagacggtgtcgccgtgatgggcgccgaattcgccgctggcgcgcgccgtcatcttgccgatgccatcgacatcgagatgcaggaacgtgtcggcgccaagatgttcggcaaccgaaaccgtgcccttccaaagcccgctttccttggacagcgtcaggtgttcggggcggataccggcggtcttggcgccattcgactgtgcgtatgcaccttcgatcaggttcatgcgcggcgaaccgataaagccggcgacaaacaggttgcgcggcgtgttgtagagttccatcggcgaaccgacctgctcgatattgccgcgattgagaacgacgatcttgtcggccatggtcatggcttcgatctggtcgtgggtgacgtagatcatcgtcgttttcagctggttgtgcaggtcgctgatttccagacgcatcgtgccgcgcaaagccgcatcgaggttggacagcggttcgtcgaacaggaaggccgacggttcgcgcacgatggcgcggccgatggcgacacgctggcgctgaccaccggaaagctggccgggacggcgttcgagataatcggagaggttaaggacacgggcggcatcctcgaccttcttgtcgatcttcgactgttccatcttcgccatcttcagcgggaaggcgatattcttgcgcacgctcatatgcggatagagcgcgtaggactggaacaccatggcaaggccacgcgcggccggggccgcttccgtcacatccttgccgtcgatggtgatcgtgccgccggtgacgtcttccagaccggcgatcaggcgcagaagcgtggacttgccgctgcccgacggaccgacgaagacgacgaactcgccatcggtgatttccagatcgacagacgggatgaccttggcctcgccaaagtgcttctggacgttcttgagagtaatgctgcccatgagaccaattccttacttaaccgcgccaaacgtgaggccgcgaacgagttgcttctggctgaaccagccgaggatgaggatcggcgcaatcgccatggtggaggccgccgaaagcttggcccagaacagaccttgcggcgaagaaaacgaggcgatgaaggccgtcagcggtgccgcgttggtggtcgacagctggatggtccagaaggcttcgttccaggcaaggatgatgttgaggagcagcgtcgaggcaatgcccggcaccgccatcggcgtcagcacgtagacgatttccttccacagattggcgccatccatacgggccgcttccaggatctcgcccggaatttcgcggaagtatgtgtagagcatccacaccacgatcggcaggttgatcagcgtcagcatgatcgtcaggccggtacgggtatcgagcaggccaaaattgcggaacaggatgtagatcggcagaagcaccgcgaccgccggcatcatcttggtcgacagcatccacatcaggatgtccttggtgcgcttgccgggtgcgaatgccatcgcccatgccgccggaatggcgaagatgagggcgagaatggtcgaaccgaccgacaggacaaccgagttcatgaacggcttgaagtaatcgcgctgcgtctgcaccgtgatgtagttctcgaacgtgcccgacgggatcaggctgaacccgtcgatcgcttccggctccgtcttgaagctggtgatgaccgcgtagaggatcgggaagaagatcaccagggcaacgacccaggcaaggatggtccaggcgatcttgctttgcgtggtggatttgcgagccatgaccgtctctcctacttgtccaggttcttgccgacggcgcgcatcaggaagaaggcgacgatattggcgagaacgactgcgatgataccgcccgctgcaccgccgcccacgtcataaccgagacgcgcggtgcggtagatcaggaaggtcaggttggtggaggcgtaaccggggccgccattggtggtgaccaggatttccgcatagatgccgagcaggaagatcgtctggatcaggatgacgaccgtgatggcgcgggaaagatgcggcagcgtcaggtagatgaaacggttgacgaaattggcgccgtccatctcggcggcttccttctgctcgccgtcaagcgactgcagggccgtcagaaggatcagcgtcgcaaagggcagccactgccacgcaacgatgatgataaccgacaacagcggatactgcgcaaaccagtcgaccggctgcagcccgaagaatttcgcgatatcggccagcaccccataggacgggtgcatgatcatgttcttccagatcagcgccgccaccggcggcattacgaagaagggcgagatcaccagaatgcgcacgatgccctggccgaaaatcggctggtcgagcaaaagaccgatggcgatgccgccgatgaccgtgatggccagcacgccgacaaccaggatcagcgtgttccagatcgcggtaaagaaggccggatcggtataaaaatactggtagttgaagaaaccaccgaagctgacgttttgcggcgtcaggagattgtagttctggaaggaataatacagcgtcatcgacagcggtatgaccatccagaccaacagggcaatgacggagggcgccatcatcagccgcgccaacgtcttcgtattctgcgttgccatttcagcgaccctcccttgagtggccacgcgcatcgcctctgcgggaggcgcacgcacggtttcatcttcttgttatggctttaagcgcttttgccgcgggcggcgggtgtggctgcccgatcagtcgggcagccacatgtcccggggaggacctgttacttgatgtaaccggcgcgggtcatgtcgcgggttgccgttgcctgagcggcggcaagcgcgtcgtcgaccgtggactggccggcgatgacagccgagaacagctgaccgaccgtggtgccgagagcctggaattcagggatcgcgacgaactggccaccggtgtaaggcaccggcttgacggtcggcttggtgatgtcggcagcgtccatcgcggcaagcgtcggcgcggcgaacggagcagccttggtgtactcttcgttcttgtagagcgaggtacgcgtgcccggaggaacgtttgcccagccttccttggaagcgacgagcgctgtgtattccttgctggttgcccaggcaatgaacttctgcgccgattcagccttcttcgaggaagccggtacggcgaggttccacgaccacagccacttgccgtggttgtctacgccttccttgttcgggaagatggcgtaaccgaccttgtcggcaaccttcgagtccttcgggttcgatacgaaggatgcggcgacggtcgcgtcgatccacatgccgcacttgccctgctggaacagcgtcaggttttcgttgaagccgttggaggaagcaccggacgggccggcatccttcatcaggtcggcataaaactgcagggaagccttccactccggctgatcgaactgcggcttccactgctcatcgaaccagcgaccgccgaacgagttgttcagggccgaaacgaaggccatgttttcgccccagccggccttgccgcgaaggcacatgccggacacgtcggccttgcggtcggtgatcttgcgggcagcgtcggcgatgaattcccaggtcggggtttccggcatggtcagaccggctttttcgaacaggtccttgcggtacatgatcatcgcggattcaccgtagaacggtgccgcataaagcttgccgtccatcgaaaggccaccgcggatcgccggaagcaggtcgtccacgtcatacttgtcgccgaggccgtcgagcggcagcagccacttctgcttggcccagatcggaacttcgtaattgccgatggtgacgatgtcatattgaccaccgccggcggcgatgtcggtcgtcacgcgctcgcgcaggacgttttcttcaagggttacccactcgacctgaatatcggggttggccttggtgaattcggcggtcaggccctgcatgcggaccatgtcgccgttgttgacggtcgcgatcgtcagcgtttcagccgaagccatgcccgcgaacgccagaacggagcaggcaccgagcagaaaagttttcaatgtcatgatcttcctcccagaagatgttagcgagcattcgctttgctcatgggcaattactcaacgacaagcgataaatgtcaagctccaatcgttgctgcagccgcgaaacgacgagctatcctgctgattcaaaatgaaataaatttttgcccactaggtgagcaaatactcggcgacctcttcatcggtgatcaaaccgttgatctgatggccggtgacggcagccttgatcgccttcatcttgcgtttgcccttgccgatgccgatgacgacggaggtgtcacgcgaggggagcggagcggaggcgacgcgctcgttgatcgggttgtcgagcagcctgccttcgctgtcgaaaatccagccgcagatctcgcccacggcgccattgtccatcagctccatcatctcgcctttctccaagaagccgtcgacgcagagcggcccgtcgatgccgagttcgccgataccgacgaaggtcacgtcggcctgcgcgctcatgtccagcgtcgagcgcaccagctgctgggcatgcagcgtctcgcgctcctcggcggacgtgaccagaaccggcagcggcatcgggaagtgccgcgccttgacggcatcggccatactgaagatgacgttgtaataggcggccgatccgtcgggcgcgatgttgccggtgagcgagacgatgcggtggttgatgcattcgatggccggcagctgatcgaccgccgccttcagcgttcgcccggtcccgacggcgagaacgatcgggtcggtcttcttcagccagcgttcgatctcggccgccgccgcctcggcgatgccgactgtcgcggcaccggcgcccggatcgctcggcacgatgtccacctgccgcaggccgtatttctcgcgcacggcgttggcgagctcgagacaggcggcgatcgggtgatcgagccgcaccttgatcagtcgctcggcgacggcaagcgacacgagccgctgcgccgactgtcgcgaaatccccatggacgaggcgatctcgtcctgcgtgcgcccggcgacatagtagagccagccggcgcgcgccgcgtcatcgagacgaccagaagtttcggaccttttcaccatcgactatccattgcgcgcggactgcaccggctttcgccggcaaagcatttggttgaagctatgttcgcgccagatcaaaacaaaattcgggcaaatgtcgagtgcattgagaaattgcacaatctattttaggtccggtgcacgcggcggctgctctccaaatcgccatcgccgcgccatctttgcccgcgaaggcatgcttgacctgagatcgaccgccacgctaactgtgtcgcagaggaagaaatcgtgcgaattctgctggttgaggacgacaagatgattggcgaggccgtgcgcgatcacgtcgccgcctcgttccatgccgtcgactgggtcaagaaccttgccgacgcggaagccgcgacgggtcccgtcgagtatggactggtactgctcgacctcaaccttcccgacggcagcggcgtcgatttcctgcgcaagctccgcagccgcgacatccgcacccccgtcatcatcctcaccgcgcgcgaccagatttccgaccgcatcgaagggctgaacgccggcgccgacgactatctcgtcaaacccttcaatctgggcgagctcgaggcccgcatcatggccgtggcccgtcgctacgacgccaacccgcatccggtggtgcagatcggcgatatcgaaatcaacaggccacagcacaagctctccgtcgacggcgccgccgtcatcctcaccagccgcgaatgggcggtcctcgacctgttgaccgcccgccccggcgccatcgtctccaaggaccgcatcgaggaggcgctttacgccttcggctcggaaatagagagcaacacggtcgaggtctatgtcagccgcctgcgcaagaagatcggcaaggatcgcatccgcacggcccgcggcatcggctatacgctcggatcgaaatgaagcgcgaacgcagtatcacccgcccgctcatcaccgcgctgacgacggtgatggtcatcttctggctcctcgccatcgggctgagcatccgcgtgatgcagcacgagttcgacgagatcttcgacagcgcccagcaggaaaccacggagcggctgctggcgctcatccttgacgacatggagcagcgcggcctaggcgacccgcatggcatcgcgatgctgaacagcgccgccaatagcgagtacctgacctatcaggttcgcgatgcatccggaaagatcctgctgcgctccaacgacgccctgtcggagccttttccggcgccgctcgagccgggcttctacgacagcgccaccgagcgcatctacacggagaagacatccgacggcacgctcttcctgcaggtcgcggaccgcttcaagaaccgccgcgaagccgtgcgcgaaagcgcggtcaccctgctcatcccgctggtggcgctcattccggcgagcatcttcgccatctggttcatcgtcggccgcgccctgaagccgctcgacgcgctgcgccgggatatcggcaccaaggacggcggcaacatggcggcgctggagagcgccggcctgccgaaggagctgaagccgatcgcccgctccgtcaacctcctgctcgggcgcctgcgatcggcgcttgaatccgagcgcgaattcaccgccaacagcgctcacgaattgcgaacgccgatcgccggcgcgctcgcgcaaacgcagcgcctctccgaagaactgcccccgggaccggcccggacgcgggcaaatcagatcgaaagctcgctggtcaatctcgggcgtcttgccgagaagttgctgcagcttgcccgcgccgaggcaggcatcggcggcagcgccaccgccacggatcttcgcccggtgctcgacatgatcgtcaccgattacgaacgcgaccatcgatcgcaaggccggctgcgctacgcgcccgcgcccggcgcaacgctggtgcgaaacgccgacatggacgcgttcggcatcatcctgcgcaatctcatcgaaaacgcgctcgttcacggcgaccggcaactgcccgtcgaagtcagcctcgatcagaacggtgtcgtccgtgtcgtcaatggcggcccgctggtgccggaacgggatatcgccatgctcaagaagcgctttcggcgcggcaataccggcgcgtcgggatcggggcttggcctggccatcaccgagcggatcgtcgcgcaaatgggaggaacgctcgacctgatgtcgccggccagcggccggacctcgggtttcgaggcgcgcatcacgctgccggcttagcgtatcgtttgggcttgcaaatcgccgggaacgatgcgagcagattgagacagtttcgaacaagcagaatacggatgatcatctccttcgacatcggcggctcggcgatcaagggcggcgtagccctctccgaaaccgagatcacgccgctcggccgccgcccgacgccactcgatgatttcggcgccttcgtcgatacgctgagaaccttcatcgcggaagcgggcggcacgccgacgctgctgtcgatctcgatcgccggcgtcgtcgatcccgatacgcagctcctcacctgcgccaacattccctgcatccaccagcgcaccatcgcggccgatatcgaggccgaactgggcgtgccggtgctggtcgccaacgacgcggactgcttcgccatggccgaggccggcctcggcgccggtcgcggccaccgcatcgtgctcggcgtcatcttgggcaccggcgtcggcggcggcgtgatcgccaacggccggctgatcaacgaggcgggcggcttcgccggcgaatggggccacggcccgatcgtcgcgctgcgcgccggccacccgccggtggaaatcccgcattatgcctgtggctgcggccagagcggctgcgtcgattcggtgggcggcgcgcgcggcatggaacgcctgcacaagacccttcacggcctcgatttgaccagcgaggagatcatcggagcctggctgcgcggcgaggaaaaggcggcccgcacgatcgacgtctacatcgatctcgtcgcctcgcccctggcgctgaccgtcaacatcaccggcgccaccatcgtccccgtcgccggcggcctctccaatgtcgagccgctattgcatgagctcgacaaggccgtgcgccagcgcatcctgcgcaagttcgaccgcccgctcgtcgtgcgcagcgagtgccgcgtcgagccggggctgatcggggcggccctcctgggcttgaaggcggaagcggagatgctggggtagaggcgaccccaaatcgaaggcgacgagcttgcagccccctcaccctaccctctccccgaggggagaggggaaaatagcccagagggtgccgcttctccccttctcccca

SEQ ID NO: 27 - DNA, 58776 bp, Rhizobium matallidurans
  source 1..58776: mol_type = genomic DNA
tgtggcatctcgaagaagctgcggttcaaagggaggtagaaagtgctgctgtgacgcgccgaggaccaagacggatatcgggtttgaaatcgttcaggttcgccgcaacaccaaagcggccaagcgattgctggtccgttttatatagcgcgacgcgatctttcagattcgctcgtcgcgctctagatctttgtttttccgcatgtcttgatcccgaaacgggcagccactttcgggagacatggtttaaaaaaataagggattggcgccaagcgcatcatcaccgacaagctgctatcctaaagcgccgccccgccgtcaggtcatgcccgccgttgagcatcgctctcattaaggtgtctgaacaacaggcgcgagaatttgcatctgccatttctaagcgtgaacgaacccagcaaggatttagctcgattgggtcgctgcaacaatttgcctcgatcttctcagccgtccgcctttcgatcccgctaaatcgctacgctgcccagatcaaattcttccgccaagctgcgactatccaatggaggatggccgcgctgcaacgcgctgatatccctccgcgcggtttgcaggctgacgcgccaagtttgagcgatctcctttccttcgcactgaagcgctcacccgtccttctgctctaagaaccatagtcgtcgttgactaaaggattgtggttgagaggcaccttcaagatccctctcggagacaagattaaggtcacggcggcgcctggttcagcgaccgtagcgtaaacataggacctctgctttccaaaaaagggttgaaccactggttcgatacgatttatatcattccatgatatttttcaccggagcacctcgtcagcgtgtcagatgcactcaatcccctatccctgccgactgacgaggtccttgcggaccgcctgggactttcgacgaaagaattccagcgctaccgtctgcagaacctcatatcggtttccacgacgtccgcgaccgggagcgacggactcctggtcacctgccagctcggaaatagggtctgggaaggcgtcgttgttgatggaagcgtcacctccgaacaggtcaggttcattcgcggcaagcgagcgagtagttcgccttcgacagttcgtcgccaaccctgacccgactctcagaaaggaaaacaatgaaaaagcttgccggcctcctcgtcgccgtatcgatgccggttaccgcccatgctgcggccagaatggtctcccagaccggcgactggggcgtctactccttcaagagagacggaaagcccgtgtgctacgcgctctcggtgcccaaggaagccagacccgccgatgtggatcacgggaggaattacttcctcatcgcgccagcggaaaaaggcggcggcaacgagccagaggccatcctcggctacgcagtgcgggccggttcgccggtgcaggtatcggttggcgagaagaagttcaagatgttcgtaaaggacaatactgcctgggtctccgacgccgcgcaggaacccgaactcatcaacgcgcttcgatccgggagccggatgaccttaaaggcgacgtcggctagaggaacgcgtaccagctacgactactcgctatcaggggtcacggctgctttggagcgcgtcgctcgctgcaagtgaaggagggctcaaccgatcccgaatggagccttgctgtcaggcgtcgcgagttccctgaggcggtgcgaatcggttcggcccttgccagaaagcagcaggtccagttcgtgccttgaatttccaaaccttagcagaaggcgctccgcttcgtgtcggccgatgccgtagcgtcgccgcaggcttccaacatcatatctgggttcgatctcggtttcgttcaccgatgggagaggactctgttcttgttgggagcgctgcatgatcaaaactccttcaagggagtaatggatccgacgccccggcagttccaaccgcaacattatatctcacgtcatgatgtagatgaccgctatacatgcagaaaaacgtagatcgcgccgccccagattgcggcgacgaacagggcgacgcccgctaggaagagtttgacgtcatgggacatgatcaaccgtcaacgccgtatccagtccacgttccgcaggcgttcagttcgacgtcataatcagtgcggcttgagacgcttcggacggggcctcgccagggatcgacgctataacaaacatgacggcgacgtagcttgcgaacaccgcggaaaggatgacgctcttggtcaatggttcgctcctttgtatcatgtgatgacattctttaactgttcgcgcataatgtcaacctgaatgcagcatgaacggtacggggaggcgaatggctttgggaagaagtctgatcgtggagacgacgcgctaatcgcggcggatcttcgaagatatcgtggagagttccggctacgaggtggtggggattgccgatagtttcgagagcgcgcagcggctcccaccgcttgcaaccatcgccctggtcgatgtcaaccttcgcgacggggccaccggaccgaggattgcgcaatatctcgcgaacgacttcggcgtcgcggtagtcatgctcacggccaatcccgaaatgatcgttaccgatcgttcgaaagtcatcggtctgataacgaaacccgcagccgaaactgatcggtagcgttctcggatacctgaggacgattcgcgagggtgggcgcggcttgccgccagaagggatgcgtatcttcgcgtgaaggagggggcgacaccatgatcgacagacgtgcagaactcggtctctggctgggccggctggaatccatcctgatcgaacgcggagtgctgaacgaggatggcgaggtcgccttcaatgtcagatcacagtttcccgaggacgtccaagaggcgttggatggcttcattgagaacccggtggagcttgtcggcctcctcaagatctgtcgcgaggcccgcgatggacgacccttgtctcccgcagttctgatggcggcacatctcatgaccaaggagatactgctggcattgcaagaggccatgggcgccggacggtagagggcttccaaagaaaatggcccgcccgaaatcatttcggacgggcctcgcgcggaccggacatctcataacgtccgacctgaactctagctgtcggtgactggcgcgtctcctcccgactgcggcagttccttcatcttgacgagttggtcggcgcacgtgtcggccgcattcgtgacggtctcgtcgatccccgcgaccgtcgcccagcccccttcggtgatgaagtcgtcacgctgccacgaagatttcgcctgcagggccttcaggttttcctgtgcattgctggcgctcacgaagttatggacgcagatgcttgcgaccagatccgccttggcgttacggacggcaatctcggtcatcacgttcgccctgcctgacgtcgtccagccgccccaggtgaagccgagcaccatcgtcagagcggacgcgccaacgatcgtccaaccccaaagagtcttggaaggccggtatcccgaccagccactctcgccattttccatagctgttctccactagtttatatcatggcatgatacaaatttgagagcagaggtcaatcatgctgtgatcaaaaaatggtgacgccgttcaagcgagctcggtcacttgtcgcagtcgcgagagggattctgccaatagcggttcgttctctagcatgccgtcgacatggatcttcgccagagcttcaagaaccttctcgcccttggtggtcaggccaatcagcacgctccgcttgtcgtcttcagcgggtatccgttctgtcaggcctgccaaacacatgcggtcaacgagctggaccgcgccattatggtgcatcagcatctgttcagcgagatcgcgaagcctcactttccagcccggcgccgtgcgtactacaagaagagcctgatactgctgcgaagtgacgcccgcctcggtgagcgcagcgtcgctgaacgacaggaaccgtctcatggcgagccggaagcctgcgaggccatcatagacttcgtcagccaggccggatgtccggcgtcccgatcgaggcattcattagtccttccaaaaacgtcatgatgtgatataaatgacgaaccaagctaggagaacggtccgcgagtgcggccgatgcgggagacggtgcaaagcgccggcgtcggctgatcactcgcggaccataatctcccgatggtggcaaaaagactgtgccaatttcgtgacgtcgcgagaaaattaaatcgtgtttgaaccgccgaagcgattccttctagctcgatttcaggctcgaagcgcctgcgcgattgcctttccatgcctggaagctatctgaccttgtctcgaagaagggggcaccatgaactcgcgcttgatttggtcgatatcggttctggcgcggcggatctggttcagggccacgctgttctccctcgcggcagttgccaccgccctcctggcgatcgtcgtcacaccctacattccgacggacctgtcgacgaagatcggtgcggactcggtcgacaacatcctcggcattatcgcttcaagcatgctcaccgtcacgacattctcccttagtacgatggtctcggcgtattcggcagccacaaacaacgtcacgcctcgcgcgacccggctcgtcatggaggacagcacgacgcagaacgtgctggcaaccttcgtcggctcgtttctattcagccttgtcggcatcgtcgccctgaccacgggcgcctatggcgagcaaggccgggttgttctcttcgttgtcacgatcggcgtcatcgtgctcatagtggtgacccttctaagatggatcgaccacctgtccagattgggccgggtgaccgagacgacacgtcgggtggaagaagcgacgctcgacgccgtcaaagcctcgcgaatatccccgaacttcggtgggagtgcgctcgacggagacagtcttacgcccagtaccgacgacacaccgtttttcacaaatgagattggctacgtgcagcacctggatgcagcggcgctcgcaaagatcgccgacgagagtaagttcgacctggtaatcgtcgcgatgcctggcaagttggtctcgccggcccggccgcttggatggcttcggggagccgtcggcgaggatgttctggatcgggccgctgcctgcttttcgatcggcgacgtccgctccttcgatcaagacccgcggttcggagcgtcggtactgaccgagattgcgtcgcgcgctttgtctcctgccgtcaacgatccgggaaccgccatcgacgtcatttcgcgcgcgatgcgaattctccacgcgtggcatgacgcgaatagcgaggcacctgacgaaatcgtctatcctcagctccatgtcgcgacgctgtcggcagccgacctgtttgacgacctgttcaccccaatcgcccgcgacggcgcgggccttgtagaagtcggacttcgacttcaaaagaccctcgcaatgctttcgaaacttagcgcggaatttcaggcaaacgccgtgcgccattcgaaggaggcgctcgaccgtgcggccgcggtgatgcaggtcgaggccgacatggagaggctgcaggccgctgccgccgcaatcgccgcagacgacaagcatagttgagtggcagagcgaggagggtccatgccgtctcaacgtgaacgccgtcgatcactggtctcgctgttaggcagttgagcccgccgaccacgtccgcgaaatgtttgtactgccgcgcttcacttaacagatctgctatcgatctgaagacgatctcgtcacgctgctgacaggaacctgcgtccgaatggcgtccataagaatcaacgcgtcgtcctcgataacggttgactgatgcggacgtcgcggacttgcccgctttgatcgacgtcgcctcgtgcagcgtatctaaggggtccagggaacaagttctccgagcctcgctggccaaagccccagatcgtccttcaccgcaattggcaatgcgtctctctgttttaccagcaaggcttgatggatggccgcttcgagtggctcggcctgacctggatgagattgatctttgaccgccagttcaccagtgattccggcttcgtcgccagcaacgatgatgacgtgccccggataggccgaggcggttttgctatccaccaagtcgaatctttgcatctcttttcctttgtccaagtcttcggcatccatcgaggcttctgaaagaatctcgaaccgcacctcctcgatggttcgtccatcccctcggagcctgacgatcctagcaattgtggcataggccttcggatcgccttggttgactgacgaacgcctgcaccactcgtcaagaagaatgctcacagccacaagctcatgagcgtcgatcgcggcctctggacgccgattgaaggcaggaattaagaacccgatgagtttcaggaatatcgcagtggctgaaaatatcatgcggtgatattaagtcattttctgacctgaggaaaatgacaataccgcgagcgatccacatgacggtacacggatatttcgagttgtcgtcatctatgagagtccttagacgtttgtaaaagttgcaggtaacgagcgtgttcttgatgttagaaccggtcggtgtagtcgcgcacggtcgtcgtccgttcaggttcgagttgacttcggttccttttccgccgcgcgtcgcgcccggatggccgccgcgatgaagacgcgcgacagaccatggtaaagcggttcgcgggacaggatgcgtgatgtcacgtagccgatcatcgataccgccatgatcgggatcaccgcctggtggtcgccagtcatttcgagaatgatgacgaaggccgtcatcggcgcttgtacgacgcctgcgaagtaacctgccattccaaggattgctgcaagggtgatgctggtgccgagcagggagccgacggtgctaccaaaaccagcgccgacggcaagagacggcgcgaagatgccgcccggaattcccgacagcatcgacaggaagctggccgcaagcttctcgacgaagaagagcagtggcaaggagttgccttcgaccgctccgcgcgcctgttcgtagccggtgccaaaggtcgtgccgccggatgcaacgccgatgacagcgaccgccaaaccgcagcaagccgcaagcgccagcatacgcgttagcggttggggttgcgcccagcggcggatcttttggccgaaatgcagtgcgaagccactgaaggcggcacccagcgcgccgccgccgacgccacagatcagaaccggtccccagtcgcgcagctcggtcggcgcggcagacgccatgccgaaataattgtagctgccggaaagcccgagcgccgccaggccggaaaggatgaccgctgtcagcaccagtccgttggctcgcgattcataggttcggctcatttcttcgatggcgaagacgataccagcaagcggcgtgttgaaggcagccgcgatacccgccgccgaccccgccaagatcaatcctcgcgcctgccctataccgccaaagcgggcaacggcgagcatgatcgaggcgccaacctgcactgtcggtccctcgcgcccgatcgaggcgccagaaaataaccccagcaccgtcaacacgatcttgccgaatgcgatcttcagcgacaggagccgtgtccggtcttctgtttcgtgcaagtgccgcgcggcgatcgcctgcggaatgccactgcctcctgaattcggaaacaacgtcgccgctacataggccgacagcatgaatcccacgggcgtcaacaccagtggcagcaggaaagcccattcacctgccgaggtgacggactcgaatgcgttctgcgccagatccgcgagcttggcgaaaccgacgctgatcacgccaatcgccagcgctccgcaccagaaaacaagtcgtggtttccaaagcgagaacgagccccagatcacacgggaacggcggaggagcttggaatagcggtaacggcttggcatggcggctcggtacgtgacgcaggttatgaagtcttctaccgccaaaggttcccgaagatcacccctaaaaaagaaaaggcgcaggtcggggggtggggttgagccatccgagtctcggaggacgctgtgcaaagcgcgttcgaagcaggggaactttatacattatatcacgttatgatgtaaattatgcgcgcgttatcgacacttctcgtgccgaggtctgtcgcatggaagacggtgagcaccagaaaaactcattgacggtactaagaagtgttcccgtattggtttcatactctcgcgatcatttgtctctgccttggtggggtgtcggtggtaatcgtcctttcagatatcttgcggcatccgcagcgcatggcagtcatgaacgtcgtctggcctgtgacggcgatcttcggaacgcttcccctgatggtcctctattatcgctatggccgcctcaccagccaggaggcgcaccaccgggccaaggcgcttgacgagaagatgccaagcatgacggacacgccctttcctgtcatggttgccaaaggggcgctgcactgcggaagcggctgtatgatcggagacgtcgtggccgaatggctggcgttccttgtccccgccgtcgctgtagctttgggctggcagaccctgttctctgaaaagatgttcgcggtgtggatcctagactttatattcgcatttgggctcgggatcgcatttcagtactttgccatcgttcccatgcgtggcctgtcgccaaaggaagggctcaaagcggctgtaaaggcggatacgttctccctgctttcctggcaggtcggcatgtatggagccatggctttgctgcagctctggatcttcccggccgccttcggcgtcaaggcggaggtcaacagctgggagttctggttcgccatgcagattgcaatgatctgcggcttcgttacgagctatccggtgaactggtatctggtgtcggtcggcatcaaggagaaaatgtaacgtggcgcatcaccattccgatcagcacggcggtggaggccatggatcccccgaggacttcggccgcgcgtttgccatcggcattgcgttgaacctggtttacgtgatgcttgaggcggccttcggcctatattccggatcccttgccctgctggccgatgcgggccacaatctttccgatgtgcttggtctggttctggcctggggagccgtttggctcggcaaaaggccaccatggggccgccagacctttggattcaagcgcagctccatccttgcatcgctcagcaacgccattctcctgatgcttgcggtgggcgccatcacctatgaggcgatccggagacttctggagccggagcaggtcgcctcctccaccgtgatctgggtcgcggtggtcggcttgttcgtcaacggcttcacggcctaccttttctccgcaggcagcaagcaggacctcaacatcaggggtgcctttctacatatggccgccgacaccggcgtgaccgtcggcgtcatctttgccgctttgcttatcagctggactggctggctctggcttgatccggccatcagcctcctgatcgccgcggtcattctcgtgggaacctggtcccttttgcgaggctctaccatgcttgcaatggacgccgtgccgccgaacctggaccttgcaagcatccgaaagcagctatgcgaagcggacgggaccgtcattgaggttcatgatctccatgtatgggcgctgagcacgaccgaaacggcactcagcgcccatcttgtctgctcggaaatggagaaggggcagagccttctgcgaaagctgccggggcagctggagcaggcattcgggatccgccataccacactacaacttgaaacgcctgccacggcggaggcatgcccgctccgttcgacggaaatcgtctgaggacgggcgaattctcgtaacgcagctaaccactgcctttgaacgtcaaaagcatcaacaacggagcctgatttcatgtctaaagaggacacagttgactatgatggaccagctggcggctggggctctctgaggggcgtcgcctccgtttttggaggggaatgggcgacgccggcggcgttggaaactttgcggcgccagaacaagccgggcggctttatgtgcgtctcctgcgcctggaccaaaccggccgactaccatcctttcgagttctgcgaaaacggcgccaaggcgacgctatgggaactcacgagcctgcgctgcacaccacacttcttctccaaccacacggtaacggaattgcgtggctggaaggactacgatctggagcagcagggacgccttacccatcccatgcgctatgatcgcgagagcgaccattacgtgccatgtttctgggaagaagccttcaacgctatcggcgcagagctgaagcaactcgacccgaaatcggtgatcttttacagctcgggccgagcgagcctcgaaacctcctactgctatgccctttttgcccggctctacggccacaataacctgcccgatagttccaacatgtgccacgagacaacatcggtcggcctcaagaaggtcatcggctcttcagtcggcacttgcgtttaccaggacttctcggcctgcgacgccatctttttcttcggacagaataccggctccaacagcccgcgcttcctccatccgcttcaggaagctgccaagcgcggttgcaagatcatcaccttcaacccggttcgggaaagggggctggaattcttcaccaacccccagagccccgtggaaatgctgaccggcaaagagacccagatctccagccagtatcaccaggtcaaggctggcggcgatattgccgcccttatgggcctgtgcaagcatgtattcgccaaggacgacgaggccagggcacaagggcgcagtgtgctcgaccgtgatttcatcgagagccaaacaagcggctttgacgaattcgagcagcgggtgcgttccatcggatgggacgagatcgtccgcgggtcgggcctggagcgttccgcgctcgaagcggcgggccaggtctatgtggaggccgacaaggtcatcggcgtctacggcatggggctgacccagcaggtccacggctcggacaacatcgccatgctggtcaacctactgctcatgaagggcaatatcggtcgcgacggcaccggcatctcccccgtgcgtggccactccaacgtacagggccagcgcacggtcggcatttccgagaagccggaactggtaccgctggacaagctcgcagccctgttcgggttcgagccgccccgcgacaagggcatgaacacggtggaggcctgcgagggcatgctagccggcaaggtgaagggctttattggcctcggcggcaatttcgtgcgcgccatccccgaacgggacgccatggaaaaggcctggcagaccatgcgcctgacggtgcagatcgccacaaagctcaaccgcagccacctgatcaatggcgaggtcgcctatcttctgccctgtctcggacgatcggaggaggacaagcaggaaggaggcccgcacacggtcaccatggaagacagcctgagctgcatccagggatccatcggcaggcgcaagccggcaagcgagcatctgctgtccgaactggcgatcgtcgccggcatggccaaggcgacgctcgcgcccaatccgaaggtcgactgggtcggctgggtcggcgattatggcaaggtccgggacctaatcgaggagacctatccggaggagtttcatcgcttcaacgagcgcatgtttacgcctggcggcttctatcgcggcaacagcgcccgcgagcggatctggaagaccgagagcggcaaggcgaatttcagcgcgccggaaatgctgtcagcgaccgggttcgaagacaagcccggccggtatcgcttgatgacgctgcgcagcaatgatcagttcaacacgacgatctacggctatagcgatcgcctgcgcggcatcgaaggcacgcgcgacgtccttctgatcaacccggatgagatgcagcgggcgggtctccaggaagggcaggtcgtatcgctggtaagcgatgcgggagatggcgtggaacgccgggttggcggcctgaaggtgcttccctttgctctgccggatggctgcctcggcggttattacccggagctcaatccgctgatcccgctatcgcattatgacaagctgtctaagactccagccgccaagtccgttccggtgcgcattgaaggctgaacagaaccggcgacgcatggggcaaacccgatgcgttgccgctggctcttgactcgaaaaacatggccgctctcggccctacccggcagcggccttgtgttgtttcgcaacttaagaaaaggacggattgcctccagccgatggcaccggacggcgatggcccaacggccatcaccacgcgacctcatcaaggtcagggattcttgtttggcggaagctcacccggcttcacgaccggcatcgtgcctgtatgcggggtcggcgccacaatctcgttatcgccaaccttaggcggcttcagaacgctgttgcagttatccagcttgctgctgagctttgcgttgtcctgctgcccagtgggcagattgcagtcctgttctaccgcaggctttgcatcttccgcggatgccgcgctcggtgcaaatgccgctgacagaacaagcgtggcgatactgaatgaggccgaccatgtggggacctgtttcatcgtttcctccttttggttttcaattcagttgaaaggcgccggttccgcccggtcctgggaggcagcctacgaggagattgtcccaagatgagtttcatcaagccggacgtccttcctccgccacataccgaccgaacgaaacagtgactgaacgggccgtccggaaaccagataagcgaggcgccaacccgactgtttccgccgacaggcagatcatgggagcgcataagcaattaccgcgtcgccgaccggtgtttccatgaagtgatgcccgccagccatgatgacgagatattgtttcccattgatctcgtaagtcatcggcgtcgcctgaccgccagccggaagtttatccgtccaaagggtcttaccggttctgatgtcaattgcacggatcaggttgtcggtcgcagccgcaatgaaaaccaggccacctgctgtgaccacggagccgccgttatttggcgtaccaatggtgattggaagcatcgacggaatgccaaagggtccattggtgcgtgcctctcccagcggtcgatcccaaagcgtcttgccagtttttaaatcgatggcacgaatgccgccatacggcggctccttacacagaagccctgtcacggggagacgccagcccgcattgacgttgatcgcaaagggcgcacccgcttgcggatctcccgctccctcggctccaccgatctttccgcgggcctggtcgcgcggcgcccagcccagcttgtcggcttcagccctggggaccagccgattgtagttcggcatgtcattgtagttggcaatcagcacaccgcgctgcgggtccatcgcgatcccgccccaatcggagccgccgttatagccaggatattcaatgctgtggcgattacttgttggcggagtgaagatgccgtcatagctcgcctggcgaaactggatccggcagatcatttggtcaattggagacatgccccacatcttcgcctccgtgagatccggcttgcgtaggctatggtaggtggaaaagggttgggttggggtgcgttgatcgggctcgacgccgccctttggcaccgctttttcctctaccgaaacgagcggcttcccggttctgcggtcgagcacgaatatgtcgccacgtttgcttggcaagacgagcgcggggaccggtcccgcctcggtcggataatccacaagcgtcgcctgcgagcccaggtcgtaatcccagacatcgttgtgcaccgtctgaaaatgccatgccggtttgcccgtcgaaacgtcaatggccaccaaagatgtagagaattgcttttccaagggggaacgggcgccgctccaataatcgaccgcagcgctgccgagaggcaggtatacgagcccgagctgttcgtcacccgaggccgtcgtccacatgttaggggtaccacggctgtaagtctcgtgttcgggaggcaagccattattgtcgggccgctccatgtcccatgtccagcgcagcgcgcccgagaccgcgtcataggcttgaatgacgccggacggagcatcaagtttctgaccatccaaaacttgatgtccaactacgattacaccccgcacgattgtcggtgcagaggtcatcgagaacatgccaggatcgtgctggcctatgccgtccgtcgtatccacggtcccggcacggccgaaattcgggcacggcactcctgtcttcgcatcgacggcaatcaacctggcatccagcgttccctcgataatgcgttctgcacagacgtcggaaggctttgcgtcggtttgtttgaagaacgcgacaccacgacaggccgccgtataaggaatgctttcgtccggcacgagcgggttgtaacgccatttttccttccccgtcgcaggatccaaagcgagcatgatatttttcggggcgcagaggtagagggagtcatcgaccttcaacggcgtggtttcggcgccataagtgttctttgcctgctcgcttggaagatcgccggtatgcgctacccacgctctcttcaaatgcttgacgttgtcgggcgtgatctcggccaacggcgagaaccgacgggcgctatcgctgccaccgtatgccggccaatcgacgcccgcttgcagggtcgagggatccgccatggtgcgagcagccacgaccggcaaggaatcgacggcggggtccggcgctagccggtaaacaagaaagccgctgaagaaggacaggatgataagaatgctcaagccgctgattgtctgtcgccagctggtccgcggatagaggaagggaaggcacgcaataacgaaggtgaaaaggactaatggggcaaccaggcgagggaccaaggcccacccgtccagcccagcctccgcgaaagcccataccgcagtggcgacgatgataacagcatagaggagcacaccgccgcgcctgcgcgtgaagaggaggacagagcttatgaagagcgaaattccggctagcagataataccagctccctcccaacgccgctagccagccaccgccgacactaagaacgatcccgatgagtgaaacgactgtggcgacaacgagcacatagatactgcggtgctccgacgaccggcgagattgcaacatccaagcgctccgttttgcctttgcataggcatcctacaatatatacatcatggcatgatataaatcgcaccgcgtgtgcggcaaggcttagagggcatcacaaacacgtgcacgccccggccccaaagaggcatagactcaatgctgatgaacatgccttcacatgcgagtcagcgagaagtcttctcagccaccgaaggcccttcgacaaatatggttcgccgcgcgagtgcacccaaggtgagaccctgaacgatgatgctgaacaagaccaccgaataggtggaggataaaatgacaagcttggccgggctatctggaacggatagcgccagtgcaatggagatgccgccacggatgcccgcccaagtgaggaacggcacgtttctggtcgacatcatgtcgcttgaccaggcagccagtgcgggggccccgacggcgatcagccgtgccagcagaacgagcggtatggccacggccgcgatctccagggatagcgtgtcgaatcttaggacgagtacttcgagcccgatcagtaggaagagaaccgaattgagaatctcgtcgatcagcgtccacaatccgaacagatacgtctgggtacgatcactcatggctttgcggggtccgtgataaccaaccagtaggcccgcggcgactacggataagggaccgctgacgtgaaggcgctctgcaatggcataagtggctgtgacaagggcaagcgagatcaacacctctactgaatagtcgtcgatcaggcgcatagcccagtaagcaatgccgccggtgacgatgccgagcaggagaccgccgccgccttccacgaggaggagtttaaggaccgactcagcggtgaccttgtcaccctctgcttgcgttgcaaacagcagcatcacggtgaagagaacaataccgatcccgtcattaaacaaggattcaccctgcatttccacctcaagatcgccaggcactttgacgttcttgagcgtcgccaggactgcgacgggatccgtggggctgatgagggcgccgaagaccatcgcccaggcgagcggcatgtcctgaccgaacagtttcgcgagaagccagaaaccgccgcccacgattgcggtggacacgatcgtcccgaacaaggcgagaattgcgaccggcgccgcccgttcacgcatcctgccgagatcgacatgcagcgagccggcaaaaagcagaaaagcgagcatcccgttcattaccacttctgtaaaatcgatacgaagcatggcctgggtcagcggctcgaagaagtgccgcccgggataggcggcatcgatcgcgaccaggatcagcgatgccgccacgctcatcaccagaaggccgatcgtgttcggcatcggcaggtatttgtgattgatccagccgagcacggccgaaaggcttaagagaatggcagaaagctcaaagatcgacacagttgcccccgagtggtctgcggttcccggccggaaaagagatgggcgggaggttcatgataatccgaggttagcggaaggaggcgcgccgtcgcaatcctccctcgttctcagggcatggttggcatggtcggcatcattttctgatcgagattatgcatgatccagagcgagcctcctacgatcaggatcacgacaagcgtcccgaacgcgagcgccagcgtgttattagtattgtcggaaccagtggtcaggtgcagaaagaacacgagatgaacgccaatctgccccaccgccagcgcgatgagagcagctcctatacccggttgccagacgaatgcccatccattggcaacggcaaaggacgcagcggtcatcagcatggccagcaccagaccgattacatagctggtagctcccttggtgatgtcgccgtcgttgccctgcgccttttcgccgggcgccttttccttggcgccttgggtcgatgcgtctcgactgtcggtcaatgctttatccccatgaggtagacgagcgtaaaaatcgcgatccaaacaatgtcaagcgcatgccagaacagattgaagcaggcgagccgccgttggatctgtggcctgaagcccttcacgaggatctgggccatcatcgtgccgagccagaggaggccgccgaacacgtgcaggccgtggcatccgacaagcgcgaaaaaagcggacaggaaagcactgcgctgtgggcctgcgccctgcgcgatcaggctggcgaattcgccgagctccagaaagaggaagccgacacccagcacgcccgtggcgagcagccatatctcgcttgccgcgacttgttcacgcttggccgcaaccgcagccatgccggctgtgaaactcgaaaacagcagacaggccgtctcggcagccgttctgggctgctcaaacagttccgcgcccgttggcccacccgccgttcggattaccagaacagcataggtcgcgaaaaatgctgagaacataatgatgtcgctcaggaggaagatccagaagccatagctggcaacggtcttcttcggtgaaggcccgccctcgccatgaccggtcgcgcccttggcgttgccgcctccgcggccgacgcggtaaggatcctccctgcctgcaaagagatccgcttcactcacgaggcctctccttgctgcgccagccatgcctctcgggccgagcgccgccggcgatcggcgacggctacgtcttcggcgctgatttctcgttcctgcgggtccatccaggtgaatatgacaaagagcacaaagcccgccaccaggccaacaatcaccagccaccaaatctgccagatcagcgcgaagccgagtaccgtggtaaaagcggcagtcacgaaaccaactgagctgttttccggcatcccgatcggctgatacgtcggtgctggaccgaggtcctgctgttcgatcgcacgctgcttgatcgcccagtaaggctcctgctcccgcacatccgggagcacggcaaaattgaaggcgggcggcggagatggcgtcgcccactcaagagatcgcccattccacggatcgccggtctcgtcacgcaaagcctcgcggttgcggatgctgacgatgagctggataagctgcgccgccgcacccgccatcatgatgacgatccctgcggcagagactagaagccaaggataccacgcagccacctctatatgctgcaggcgtcgtgtcatcccttcaagccccgtgatgtaaagtggcacaaaggtcacgtagaaaccaatgaaggcgagccagaaggcccacttgccccagcgctcgtccagcctgaagccgaaggcctttggaaaccagaacgtcattgccgcaaaggcgccgaatagcacgccgccgatgatcacattatggaagtgagcgacgaggaagagactgttgtggagcgcgaagtccgccggtggaaccgcaagaaggacaccgctcatgccgcctatcgtaaaggtcaccagaaagccgaccgaccacagcatgggcgtctcgtagcggatgcggccaccatacatcgtgaacatccagttgtagatcttcacgcctgttccgaccgaaatgatgctcgttgcgatgccaaaggcgccgttaacgtcggcgccggcacccatcgtgaagaaatggtgcaaccagaccgtgaaggaaacgatgcagataaacatcgtggcgatgaccatggagcgatagccgaacagcggcttgctggaaaaggtcgagataatctcggagaataccccaaaggcgggtagcacaagaacatagacttctgggtgtccccaggcccagatgaggttgatgaacatcatcatgttgccgccgccggaattggtaaagaaatggaagccgagatagcggtccagcgtcagcatggcgagtgtggcggtcagtatcggaaaggcggcgacgatcagcagattagtcgcgagcgccgtccagcagaacattggcattcgcagatagctcatgcccggcgcccgtgtcttcagtatcgtggtaaccaggttgacgccggtcatcagcgttccgagacccgaaatctggattgcccagagatagtagtcgacccccacatccggcgaatattgaagttccgaaagcggcgggtagggaagccagccggtgcgcgcgaattctccgatcagcaggctggcattgaccagaagcgcgccgctggccgtcagccagaagccgatcgagtttagccggggaaaagcgatatcccgaacacccaactgcagcggcacgacaaagttcatcaggccgatcatgaagggcatggccccgaagaagatcatgatcgtgccatgcgcggaaaaaatctggttgaaatgttcaggcgggagatatcctggcgactggtaggcaatagcctgctgcgagcgcatcatgatggcgtcgacaaagccgcgaagcagcatcagaagcgccagcacgcagtacatgacaccgatgcgcttgtggtcgacgctcgtgatccactctcgccaaagatagggaacatagcccttgaccacgacccaaaccaccagcgccagcccgagtaggaggatgctcgagcccgccaccagcggaatgggctgatcgagagggagcgatgaccagctaagcttaccgagcaatgcttgcggcctcccgaccccgggtcgaagaatgccgcgcatgtgccggcaaattgtccggcgcgccgctgacgatcctggcgaagagtgccggatccacctggccaaaagtggttggcggcacgttctggctgggcgcctcgagcgcctggtagctcttcaggtcaagcgaaccgcccgactgccggaccgacgtcgtccacgcgctgaaggcggcgggagacacgctgcgcactttgaaattcatatcagcaaaaccctggccactgaactgagtggactggccgtagaagtcgccgtcacgatcggccatcagatgaagctgggtcaccataccgtacatgaccgccaccatgcttccgagctgcggcacaaagaaggaattcatcacgctgcctgacgtcagcgacagatgcaccggagtgccggttggaaccaccagctcgttgacgctggcaagttgcagctcgggatagagaaacagccacttccagtcgagcgacaccacctggacctcaagcggcttcttctgagaggcaaggggcttgtacggatcgagctgatggctgccgatccagatgatcccgcccagaaacaggatgaccagaaaggggatcgaccagatcagcagttccagacggccggaaaacgcaaaatttggcctgtaccgcgccttgctgttggacgcgcgaaaccaccaggtaaacaggccgacaccggcgatcgtggggatgacgatcactagcatgacgcccagcgagttgagcatgatggcgcggttggcggcagcgaccgtaccatggggggaaagcacgctcggaccggcgcatccgctgaggactgcggacggaatgcaaactgagagccaagctccttcacgcacacatttatctaccacttttcgtccaaacatgctgcgcctcgtaggcattttgcgtgaaagcggtgagcgttaaattcccatagccggtttgcttttattttcgcgccctcatgcccatacatatcatgccgtgatacaatcggcaaaacgtggcgccagatcgcgttgggttactcacgcatttcccctcccgcctaagttactcctgctttcgctccccacgcgagggaaggcgttaaacgccaggcaacgcgagcccaagccgaacttgccaggaacgagttagttcccgcatgaatatagcggcggaggaacaggacagggaaagcgatgataaatcctcccgcgattgtcagggcccaccgtagggccactacggacgcttgcagcaggtggacctaccgggaagacagaagacgcttgaacggtctgtcacgcgcgccccgaccttttactacagcttcccgagagcagatggcggatatagctagcgcaagggatttaattggagggcaaacctgagcctgtcacttcctgccgggctcacatcctctcaaccttccactcaggcgtgagccgtccctgactcacatctcgataccggctaaactggcggcggagccacagtatggccgaggaacagggtgctgatcatcagagcagcgattaaggcgatagccccgaacgccatcaggaagatctgggtattggtgattttcatcgttagaatctaatagcgaaaccattcgatggtagaccccgcgacacattggcgcttgccgggccctccaactcatccccaaggtttagcgtaagcgccgccagcgccgaccgttcggtctcgtacgtttccctacatgcggtcgccaactccattcgttcaaatcgtcgtttgcagaccgagttccaccacccggccggaaggcaggccgaagtaatcggtcgcgttaccagcattttgcgcgagcgcgatgaacaagcgatcctgccagaacggcattccgcccttcttcgacggcaagatcgtgcgccgggacaggaagaacgacgtcgacatgatgtcgaacttgaaaccgagcctccgtaccaacacaagcgcgcggggtatattcggcgtctccatgtatccgaacgtcagaaccaggcggctaaaaagcggattgaagctctccaggaaaattttctcgtcatcaggtacgaacggtgtcgcggcggtgacaacgctgaggatcacattctgctcgtgtagtaccttgtagtgcttcaggctgtggagaagggccgttggggctccctcaacgtcgctcgtgaggaagatggccgtgccgggtacggtcggtggcttcttgtgcgccaacttcttgatgattgcgtccagcgggatctcatccgctttcgtgcgggctgacagaagtcgacgtccggacatccatgtctgcatgatcaggcccatcgtgcaggcgaccgccaccggaacccagccaccatccgcgaatttcgcaacgttcgcagcgaagaatccgagatcgatcagaagtaatggcgccaccacggcgagcgcactgttccgcttccaaccccagatgtgccgcatcaccacgaatagcaggatcgatgtgatgagcatttcaccagtgacggcgatgccgtaggcagcggacagcccgctggagtttctgaaatatagtaccagggccacgacaaagatgaacagaaacgagttcacctgcggcatgaagatctggccggagtgagtttccgacgtgtgcaggatctgcaggcggggcaaaagattgaggtgcatggcctggcggacaagcgaataagcgcccgaaatcacggcctgactggcgatgacggttgcggcagtagcaaggcagaccatcggcagcttggcccagtccgggtgcataccaaagaatggatgatcggacatcccagggttcgcaagcacgaatgcaccctgaccgaagtagttaagcagcaggcaagggaagaccatcagaaaccatgccaacacgatcggacggcgtccgaagtgcccgagatccacgtatagcgcctcagcgccagtgaccgccagaaagaccgccccaaggaccgtgatggtgatgccgatgttttgtaccgcgtatgtgatggcgtgagccgggttagtcgccgaaagtacggccgggtcatcaaggatatggatggcaccgctgatgcccagcacgaggaaccagagcgccatgatcgggccaaacacggccgcgacaccgcccgtgccaaatcgctggataaaaaagagtatcgcaataatcaccagcgtgatcggcaccacccatttcgacaaacccggtgcaacgatctgaatgccctcgaccgcggacagaaccgagatcgcgggcgtgatgatggcgtctccaagaaacagcgacgcgcccgcgacgcccagtacaagaatccagacggacctccggggaaggctcccgcgggcgagcgtcatcagtgagagcgtgccgccttcaccccggttatcggccttcaagacaaaggtcacgtatttgatcgtcactacgatcgtcagtgcccagaccatgagggacaagatgccaaggacgttgtcacggtgggtaccactacctgccgtggcgtgtagcgcctctcggaatgcgtaaagcggactggtcccaatatcgccgtagaccacgccgagcgctgccagaacaagtgcgggcagaccgccatgcttggtgtgctctacttccggatcttctgagcgcagctctgattgagacactgggcggcctttctgtcagttttacgccaggttgcgattccggcgaggatgtcaaaaaatcttcggtgctgtcgccccgccaaggtttcgagatgacacatttgtctgtttacgagggcggcatttgacgggccagggtttccggtcagtcaggcgcgccttttgaatgtccccaggatgactgcaccgacaattccggacgccacagacccgagtagaattcccatcttcacgtggtcctggattgtaggatcgtcgaacgcgagaagcccaatgaagaggctcatggtgaagccaatcccacaaagcgccgcgacccccgtcatctgaccccaactggctttcgcgggaaggtcggcgaggccaagtttcaccagaagggcgacggtaccgagcactccgacgagcttgcctagcagcagcccggtcgccactcccatcgtcagaggctctgaaaagatggacatggacgctccggcgaaggaaacgcctgcgtttgcaaatccgaagatcgggacaacgacgaaggcgactggcttgtgcagcaggtgctcaagatgatgaagcggagattcctgatgagtggcttccggtgttcctggcgtcagcttgagcgggatcgtcagcgcgagaaggacgccagcgagggtcgcgtggatgcccgacaggaagaccagaagccatagcacagcgccaagaacgaggtagggccagagcgtcagtacgttcgcgcggttcatgacatagaggctcgctagcacgatggctgctccggcgagagcgaacatgttgagatcgttggtataaaagagagcgatcaccacgaccgcaccgagatcgtcgatgatggcgagggcggcaaggaagatcttcagcgaagctggcacgcgagagccgaagagcgaaatcacgccgagagcgaaagcgatgtcggtcgcggtagggatcgcccagccccggagagccgccgggttctcccagttgagtccaacataaaacaaggcggggaaaaccatgccgccaagcgctgccgccccaggcagaattctccggctccaggaggaaagctgcccatcgagcatctcacgcttgatctcgaggccgaccagcaggaagaacagcgccatcagggcgtcgttgatccagtgcagtaggctcagtgggccaacgaagacgtggagcgcgtggaagtaagcctcggcagccggcgaattcgctgtcacgatggcaacgagcgcgacagccatgagcacgagaccgccagatgcttcattgtcgagaaactggcgaagggtggaccgaatacggcccgcagagataggcgacgacataggccagcgctcccttgtggaaggttgatcgtagtctccgtcgatttcggggaatcccgtggcgcacgcagcacacgccatctatttgaatagtggagcaagacgtcgacttccagcaaaatcgttcactcaggggtgcgaaaaccacccgaaactgctagccgcgaccatagcgaacgcgctagagtatccgtgttggtcaaggtagggatgggacccgttttctgcctttgctgagcagtgtacagcgcggcaatcgtgcaagaaaaagttcgccggttcatatcctttcaaggcggaatgatcctatgtaatgcaaactcaaccaccgtttgaagctgcgccgtctactatccttgacatacccgttggctaagaacatcgcccgatgtgcacgcgtttccccaaacggcaacaacgtccgctctggagcccccccctagaccagcagcgctaaccgtttagttgcgcaccgcgccggtcaatccgttgctccggcgacgatcctgcctccgttttgctcttggacgatgacggccctcttgagacctcggtgcgcagacgggatcggcaacatcaccgtctccccttgccaagtggcgagacgctgtagctcatggacgacatgagcgtgaggtaatgtctcgccggcattctcgcctctggcaactggcacttggacgatgcctggtccatattgcaccagccagatgtcgaccggcgctggaatgcctttcccggcgccaaccacgacgccatgtgttgacagagagatcggcggcccggacaaagggggctcggagtcgatgacgcgccggatctcattgaaatcctgacccacaatcgactcgcgcccgttgataaccatctgcggtgtgaacgcgccggattggccgagtgcaggctcgtaggccgtctgccggtcggtgaattccttcttcccgaaactgtccttccagccgagataatcccaataagtcaccgaaaagctcagcgtcagtatatccggttccttactgagcctgacgagattggcattggctggagggcaggaagaacagccttggctcgtgaatagttcgacgatcgctgttgattgcccggcatccgcatgcgcgataaagccgcaactcaagacgagcgcagccactgcgggcctcaatccactcaaatatctcatgattaaactcccttggtgatcttcctctcatcctccttcgcgagagaagcacccttcgttacggcatcacgctttcgtgacgggttgcgagcgcaatgctggcaaaagccacgcagcaaaaaacattgccgccgcttgtaacaagtcgtgggcggcctgcgtacttactccgggaatgtgacgtaaccggacatcgaaaccgatcatggcgacactcgacaaccacagcgacgcaccgccggaaaggatcttcatccgccgacactccttggtgacgcggatcactcactggatcaatgttctctgtctgagcctgctcctgatgagcggactgcagatcttcaacgcacatccatcgctctactgggggcaatatggcgccgatgccgatccgtcctggctgtcgatcgggacggtcgagcaggacggcggtacgcgcggagttctaaccgttggggatgtgcagcttaacaccacgggctttctcggcttgtcaggtgtcggcgacggagcgaccgaacgcggctttccagcctgggccacgatcccgagctaccaggatctcgccaccggccggcgctggcatttctttttcgcgtggttgttcgtgatcaatggctcgctctacgccctgtatggcttcgtgcgcggacattttcaccgcgatctggcgccaaccgcggagcaactcacaccacggcatctgggtcgggagatcgcggaccacgcacggctgcgctttccaaaaggcgaggaggcgaggcattacaatgcgctgcagaagctcgcctacctgatcgtcattttcgtgttgctaccgctaatgttggcaaccggactgaccatgtctcccggaattgatgccggataccccttcctgctcgatctttttggcggccgccaatcggcgcgatcgatccatttcatctgcgcatggtcgatcgtcgccttcgtgatcattcatgtgtcgatggtcatcctttcgggcctctggaacaacatgcgttcgatgatcactggccgatatgccatcgaaacagagcgaggcgagccatgacgttctcaatcacccgccgccgcctgttgaccggttcggcagccagcctcgccgccctcggtttgagcggttgcgatgacgtcgcgcagaattcgaatgtccagagcgtccttgaaatggcggagcggctgacgatgcgcggccagcggctgcttgtctccaaggacacgctggcgcgcgagttttccgaacccgacatctcgccggtgttcaaaccaaacggctcgacggcgcccgacagtgaagactatgcgcgaatgatggaaaccggctttgctgactggcggctgaagatcgatggattaatcgagcgtcccgttgttttgtctcttacggacctgaagcgcttgccttcgcgcacgcagattacccgccacgactgtgtagagggatggagcgccatcggaaaatggacgggcacgccgcttgggccgctgctgcagagtgcagggcttaagccaggtgcgcgctatgtggtgtttcattgcgccgacgagctcgagcaaacgatggatggtagcggcacctattacgaaagcatcgatctgatcgacgccttccatcctcaaaccatccttgcttacgagatgaatggcaaagacctggaggtcgctcacggcgccccgctacgcctgcgcgtcgaacgccaccttggctacaagcatgcgaaatatctgatgaggatcgagatcacgcacagttttgccggtctatggggaggcaagggcggcttctgggaggaccgcggctacgaatggtacgccggcatctaacgtaaatcgaagcggatctgcgcagcgcttcgcgcccgagagtcttgcaacgggcaatggtgcccacaaggaggagaataccatgttgaaatgcaccctagctgctatcattctggcagccgcttccgcgctgcctgtctttgcccaggacgcgatgatggcggcggaatgcgacgacgcctcgatgatgaagatgcagtccggcatcgatgcgatgagcgatcctgcgatgaaggaaaagaaagaaatggcatcgaaggaaatgatgatggccaaggactcgatggcggccaaaaaaatggacgactgcaaaatgcacatggacaatgcgatgaaaagcatgggcaagatgtagttcattggggcaaggggcggcacatttgccgcccctctcgtgctgtgcaatgcgagcctgttatttgccgttcaatcggacgcgatgaatccttggatcacctacgcggcagaagctgcgggtcgtaggttcgaatctcatcaactcgcgttactcaacttggccgcactgccccacattaccaaagatagacccttgggatcattcgccgaaaaggatggcgccatagtcggtggcacgatgcaggatgtggatgatgatcaccttagcacgtacaacgcggtaaaagatcaggtagttgccgtgaacacgtcggcgaatatcatagtgttcaaagcgggggacgacggcgaagccattcggactctcgacgagaccgtaacaactactccggagttcttggaggaatgaaacggcgcgcgcgcgctgtggattgtgctcggcaatataatcagcgatctgctcaagatcgcgttcggcctccctggaaaattcaaggatcataccgatttttcggccttctcagccatcgtccgatacttggcgtcgaggcggtcgaaaacatcgctcgctgccttagttcgatcagcgtccgcatcggcaataccgcgcatgatggaagcatccagcgcggcgagcctggtctccctatcctggaccaatcgcacgccttcacgcaggacttcgcttttcgaaccgtagcgccctgtgtcaacgagttgctggacatagctttcgagctgctttcccagatctgcgctgatcatgtgatcctccatctattgtgatggcgaagtcataagccatttatcaactattatcaaggcgagcattcttttggtgagcttcagcgccggcagtcgccgccttgccagacctgtcgaccatcttattgggccgagcgtcatccagttcggccacgctgagcgcaacggctagacaaacctatactgggcgcttttgcgatgcgaaatgaagctagcataactgctgggtcggcagttcatatctcatcaagacctgggccctacgcgattggttcacgttgggttgccaatgctttcctgaatgaatgcagcggttcggccgtaatgtgcaacaagtagttcaactgccgcgtcgggctgtgaatccagcacagcgcgaagcagtgcatcatgctcctcgccaaccttgcgaactctaaacgattttcggcttgataaagctcggtatcgcgaaagccggtcggcgagctgctcgcaaaacgctatcaacggacgagaaccgcagttgccgatcaacagggcatggaatttgcggtggcagcgctcccattcgggattgttctcaaaattgtcagggttgagcgatctcggggttcgatcaagccggtgatgcgcaaccagaagcgcttcttcccaggcgggagtagcgttcgcgatcgactcccgtagtgctgttccctcgacccagccgcgtgttttagtcagttccgccagctcctccaggctgatggactggacgaagaaaccgcgctgttccttcccgactaccaaatcctccgtggtaagccgattaagcgcctcgcgtagcggtgtttgccccgcaccgtaatgctccatgagaaaccgaagttgcagtttccgcccgggttcaagctgtgcggaaaggatgtcggctttcaatcgctcgtagatgccggtggccaaggtagcaggcgcttcaacggctccatggacaatcccgatactcatgatgctcccagcttctgatgacttccgattttatatacacagtttgccattgacttggaatttataaatttttggcttgcgttacgaaatttgcataattaaaggtacggcagggagaggacgaatggttggagctttcacatcgatgccaaagagacgagccgcgtgcacttgctgcgccgtggatgtccactgtcatgtcgtgccgtcacgtttcccgggggcgccgggaggcgtgtcgacggcaggctggcccagcatggtagatgccggcgaatgccacgccaccatcgtcatcaacgataagccttaccgcaccgtcagcgatgcctgctggatggccaaacgtcggcttgcggaaatggatcgtgcagggatcaggctgcaggtgctgtcgcccatgccggaactcttcggttactggctcgacgccagcccggccaatgatcttgtgcgccatgtcaacgatacgatcgcgtctctggtcgcggagggcgaggggcgtttcgccggcttcggcggcgttgccctgcaggatctcgatctcgccatcgcggaacttcatcgcgtgatacgcgacctgggttttgccggcgtagagatcggcagcaacatcaacggcatgccggtcggcgatccgcgcctgcatccgttcttcgcggaagcggaagcgctgggtgctgccgtttttgttcatgcggtcaggccggccggcatggacaggctcgttgggccggcccccctgcaacagatccttggttatccgaccgatgtcgggcttgcggccgcctcggcgatcacaggcggacttcttacaaaatttccgaagctgcgcatcgcgttcagccatggcggcggcacattcgcctcgttgctgccgcgtctgcagcaggggtatgaagtctttccggccgtcagggaagtgatgcccaaagcgcccgtcgagcttgcgcgccgcctctatgtggattcgctcgtcttcgacgaagagacgttgcgccggctcgtttcgattttcggggaagacaaggtgctgattggcacggattacccattcaatttccgcgaggcggacccggtcgcccgtatcgaggcgacttttgcggatctcaccctgcgcgaacggctgacattcgccaacgcgcaagaatatctggctttggacaaggtttcttcagatgagcgactttcccgtttcggcgctgcgcagcgttgagctgtcgacgcccgatctcaacggttccgttgatttctacacacgtgtctggggccttgaagtggtcgccgaggcggacggcaaggtgttcttggcggccagcggagatgatttccatgtgctggaactgaagcagggagaacgtgccgaactacgcaagatcagctttcgcgtccgttccgcggaggatctcgccgaccttctcgacaaaacgatggcagcgggctgcacggtcctgcgcacgatcggagacgcggatgccccctccggcggccgccgcttcgtcattcgcgagccgcagggttcggtgctggaattcgtccatggcgacagccgtaaggctggcacggaggtcgaaaatcgtccgacccgcttggcgcatgtgaatattaatagcgccgatatcggggctctgactaccttctatcaggaagtcctcgggtttcgccttaccgaccgctccaagctgatggctttcctgcgctgcaacgacgatcaccatgctgttgtgttggccgaggcgcagcaaaacgggctcaaccatgtggccttcctcgttccgaacctggaatcggtcatgcgcggctccggcaggatcgccgatgctggctatccgatcggctggggtgtcggccgtcatggaccgggggacaatgtgtttgcctatttcgtcgatccgaccggcgtcgtcatcgaatacacggccgaggtcctccaggtcgatgacgactaccgggtgaaaggcccgtccgattgggtctggccaccgggccggaccgatcactggggcatcgcgctacccaagagcgaggcctgcaaaaaagcccagaccgccatcgccttcgcccaatagaccgacccgacgaacagtttttagaggcatgccagtgcatattgaaagcgaagtttccgatcatatcgatatcctcgtcgtcggcttcggcccggccggcgccgttgccgccggcatgctcggacagaaaggccaccgaactcttgtcgtcgagcgcctgactgagatctacgacaagccgcgggcaatcgcgatcgatcacgagatcctgcgccatttcgacaatatgggcgtggccgatcaggttctgccctatgtcgcaccgttcaccgcgtctcagcatttcggcgccaagggacaactcatccgtcgcatcgacatggtcgcaaagccctatccgctcggctatacgccgagcatggtcttcacccagccgccggtggaagtggcgctgcgccgccatgccgaaagcttcgactgcgtaaccgtcgagcttggcaccgaactgatcgatcttgccgatactggcgaagaggttctggccaggctgaaagatgccgctggtcgtgtccgcaccgtctctgcgcgctatgtcatcggttgcgacggcgcctggagcacggtccgccagttgtccggcatgaagctcgaggatctcgtcttcgacgagccgtggctggtcgtcgatgtccaggttcatgacggagccctgtctaaacttccctcgacatccgcgcagttctgcaatccggcgcgcccgacgagtttcatcatggggccgaacaatcatcgtcgttgggaaatcatgctgttgcccggcgaagacccgcgcgaaatggaaaagcaggaaaatgtctggatgctgctggcgccctggcttgcgccggaagatggagagttgtggcgcgccgccgcctaccgtttccatgcgctcgtcgccgacgaatggcggcgcggccgcattgccattgccggcgacgccgcccaccagcaaccgccttttatcggccagggcatgtgccagggcctgcgggacgtgtcgaacctcgtctggaagctcgaccgggtactcaggcaagaatcctcgcccgaccttctcgatacatataccgtcgagcgccgccgacacgtgcggacgctgaccggcaagatcaaggcgatcggccagaatatctgcgagcgcgatccggcagcggccgaagcgcgcgatgcgcgcattcttgccgagggcggcggacaaccgttgacgattacccgccaggatatcgttccgccgattgaggaaggcctcattgcagccgagggaacgccggcgagaggcgtcctgtttccgcagccgtcgatcgtcgagccatcggccacgacactgctcgacaaggtaacgggtaccggttggcgcgtcttcctcgatggccgcaagatcgcgtccggcgagggggctgggctcggcgcgcagcttgcgggcctcgccgtgcatgccgtcgttccggcaggcaagggcaatggcgaagcctccgttcttcaggagaaggacggggttctggccgattggttcgatcgcaatggtgcggtcgccgtcatcgtccggccggaccactacgtattcggcgcggcaagatcgctcgccgatctcaacgaacaactttcggatctgcatcgccgcctcgcataaggcgcggcgcgacctgctgatcatatcctgatacggttctgggaggaaaacatgaccgatacggcaatccagaaaggcagtgcgtggcgcccattcgcggttctcgccctccttttcctgtttcaaacgctgaacttcttcgacaagctcgtcttcggcttgtcggcagtgccgatgatgaaggagttgcagatctcgccgcagcagttcggcctgatcggcagcagcttcttcctgctgttctcgatctccggcgtactcgtcggcctgttcgtcatcggtcgcgtgccaatcaagtggatcctggtggtgctggcggcgatctggtcgctgacgcagataccgatctatttcaccagctcggtaacggttctggtcgtttgccgcatccttctcggtcttggcgagggaccgggcctgccgacggcactgcatgccgcgcataactggttcagcccggaaaagcgaagcgtgccaagtgccgtcgttcttcagggcatcagcgtcggcctgctcgcgggcggcccgatcctcacctatatcatcgtccagcatggctggcgcaccggcttcctgttctgcggcgttatcggcatttgctggattttcgcctggctgttcatcggcggcgaaggtccctatgcggcgagcaacgaaaagaccgttgcaagccagccttccgaggcaccgatacccgcccgcaagctctggctcgatccaacggttatcggcgtcatcatcatgtcgactatgtcctattggatcgtcggcatgtccgcgacctggctgccgccgttcctgcagcaggggttgggctacagccagatggagaccggcagcgtcatttccgccgtctacatcttccagtcgccacttcttctgatcggctcctggatcgcccagcggatgctgcagcgcttccggctatgccctgctggtcagcggtcttgccctgatcggttccgttcatgtcagcggtgggttgcaactggtgctaatcgccatcgcctttgcggcacctagcctcaccaccatttatggcccgattacgctcggtgccgtcgctccggccgtccagcgcggcaagctcatcgtcgtcatctattccgccaatgccgtgtccgccctcgcatcgaatgccatcaccggcatgatcgtgcagcacgccggccccgagcaccttcccgagggctatgcgaacgcgatgatgtttaccgccgctatcctcatcatcggtgcgatttccgccttcgcgttgatcttcccggaccgcaccatccagcgtttcggcgagcgcagccgcatttccgatcacatgcagcgggcctgacggcccgccacttcatagcactcaaggagaagaacgtatgagactgtccaccgtcagaatagccggccgcacgacatggggcgttgtcgaccaggagagcttccgcgatgtcggtgccgtgcttgccggccgttatgccgatctcaaggcagccatcacggccggcctggcgggggtggcggaggccgcggcttccgctgcggcgacaccccttgccgatatcgaatggctgcccgtcgtgccgaacccggacaagatcctttgcgtcgggctgaactacgagatgcaccgccaggaaaccggccgttcggaagtcgaaaacccgaccattttcgcacgttatgccaatagccagaccggccatctagcgccgatcgtgcgccccaaggtctcgaccgatctcgattacgaaggcgaactcgccatcatcatcggcaagcccggccggtatatctcgcgtgaagacgcgcttaaccacgtcgctggctatgccatttacaacgacggtagcattcgagacttccagaaacacacacaccagttcacgccgggcaagaactttccggataccggcgccttcggtccctggatgatgacgccggatgaactcggccccttgggagatctgcgcatacagacacgtttgaacggtcaggtcgtgcaggattccaccttcagccagatgattttcgacatcgcgcggcagattgaatattgctctagctttacgcgccttgaagctggcgatgtcattgccagtggcacgccaggcggcgttggcgccaagcgcacccctccgctctggatgaagcctggtgaccttgtcgaggttgaaatcgacaagcttggcatcctgagcaacccgatcgtcgaggaagtctgattactggactgcgtgcggtcccagaggatgccgatattcggcatcctctgggatgcatactaatttcaggcgttcagatcttagccgaaagcttgtcgcaagttcggttcccatcacgccaagaaggcatcagcctcccgtcgcccgaactgcctatctcagcgctgaggttaaatggcaaccaaccggtaactactcacggccttcaggtaacagtcgtggaggtcggcggaatgtaaggatcgcgggctgttgggccgccctcctaaaagaattcgcgttaaagcttcgcttagactcgacgataacgctggcgccctgcctcgatctgctccggagtgtagggatcagctgcctcatcgaagcgggtccaaccttgctggatggagcttacacagcgcgccgcgacgtcgactgggcgagagctgttcaagatcgcctgggcatcgacgactttgttttttcgtatcgctactacgaggttgctcccgacgaccaggcatcgcacacactgggcgcgccgccatccagttcttcaacgatggtcaccggtcgctcggcgaaataaccaccatgttgatcggcacctacgtcggaaagtgcgcaacgcgcaccaatgtccccacgtcagatgcagtacatcaggccgcgggcgccgaatgaccaaccaaagtacgctggctctcaggtcttgttagtcttcggggtgaatacagccacctgattgcgaccgccagtttttgcagcatagagtgcggcgtccgcagaccgctgaagctgctcgggcgaccccgtatcaaggtcgtgcctacaagcggccacgccgatactcatggtgacatgcgacgcaacccgtgaggtcgggttggggagagcggcggcttgcaccctgctgcggatggtttctgcaatgattttcgcatctgcctcagatgcccccggcagcaggacaagaaattcctcgcctccgtaccgcgctacctgatcgtgctcgttgcgaatgctgctctggatgatgccggcgaccttgaccagacagcgatcgccttccgcgtgcccgagattatcattcagcttcttgaagtcgtcgatatcacacatgagcatggcggcgccaaagttagatccggtcgctcccttccaacaacgctcgatggtttcagtcattgagcgacgattggcaactccagtcaggggatctgtccgcgccagcagttcgagacgagcattggcctcggccagatccgccagtcggccgcgatcccgcaactcgagcaggaaggtcttctgggagaggatggtggcggtgcgacgggcgacgagcgtcgcggccacgccgcatgcgaaaaacaacgttccggccacagcgcttcccgcaccaatgtcggcgtttctgagctggaagaataggtagaggcccaaagcataagctgcgatcgtcattgaccagccaagcggtaccggaaagatgacgatcgcggtgaccgcgacgaaaagcattatggtcaggtgccgctcgtagaattcgcctccggagctgacgccgaccaacgcaaccgacagcaagatcaagaagacactcaccaggacgaccgcgccctgtgcccatagggggcggggtttcgagaagacggccgcagcaatgaaggccgcgggcggtaggatcaacgcgggcagaagcattgatctgaccgtttcggtgggaaggaggacggcattgagagccagcgtcagcgcatcgagcacaatgacccacatcatccaagctcggatgatctttgaagtctgagaccaaaagcgctcgcgaaaaaggcgagcgagttctccggtaaggcggatctcgcgtgtgcgtctggtgagttgccgctcgacttccttgtcgatctctgggctcaacctttgaggtggcgtgcgcggaaatggcgttggtggctcgcccgcggctgttgatctgacggcgtccattgggatgaactagcaagggcagcgtcacaggcaaggggtagcgcgcaaacacggtctcctgcagaccctgtattgtctaccgatgtttaatctgccgcggctgcaaaattgataactgtgtcgctatgggtcagggggatgtccgacggttagctcggtcaagttcaaggaccagatccactgcctttgagcgcgcgagcgctggtcggtcggaaccgccggcggatcgggctctattcggcagcgtaacgtacagggaagacttcgagcggctcaacaggggcgataatctcgaaatcgccgatcatgtggtgctcgtcggaccccggcaccgccaatgtccagaaatcaggggactcgccgaagatcgtggaaacctggacgatcgtcgttctcccacctgcatacttgtttgatcgagcccggtaaaacttgtccggaaccaaactcttcataacgcctgctcccgacgctgtctctgcgtaataccagaaaattcaaagatgactatcgctcgtatctgcgcttccaccgcagcgtcgagaattcaagctctcggaagcatttggcccgcgcaaaacacgggccaagcgacttgtttaaggaacggtaatgtcccagctttcgacttgcccgtcctgcggtcctggccaacgtcgtaggtgaccttctaacgtgtcgggcaaattacgaaagtttaccggagctaggattgctctttgcacaatgggtctatcgattgcttgagtgccgggacaggttttatggtgtggcagatcgcccccggaaatcctcgcagccttaacggcgggatgaaaaacgacttcgaccgtctccgaacgctgtccgcgttcggcggctctaggcaatcttaacctgcggttggagcgcgagaacaatcttcggtgctcggcactaacctttctcacttgcgatgtattttccggctacccgcgacaccaacgccagagagactgcaccggcgtcaggatgacctatgctcttttcagcaagcggacggacgcgaccaagttttggggtcagcgttgcagtcgcatcggcggcagcctttgccgcatccgctgcagcagaccatgcttcggacagcgacttgcgggcagcagcttctttctccagggtctcgacgaagggcacgagtgcgtcaacgagggtcttgtcgcccgggcgggcgcggccaagacgggtcacgctgtctagcgccagacgggcgcctctcacgacggcatgcttttcgattgcggccgtatcgctcaaggcgttgctccacgcgcggagcagcaagccccagatggcgccagaggtgccgccggcgcgatcagcccaggcatcgcccgcagcggccagaacactggccgcacccgctccgagcgcaacggctgccctggcggcatcgagagctgcggccgagccgcggcgcatcccctgaccatggtcgccgtcacccgcaacggcgtcgatgcgaccaagttcttcttccgcttccttcagtgtaagcgcgatctcctcgattacgcctgctacgcatttgccctcgattttggagacgtcgctggctttggcaaagttggcgagtgtgtcgctgtcgtcgagcgcttccgtggcaggaacggtggtgaacgtcgctccgcggcgcagcaccggcgtatcgcaggcggccgtccagagcggctccagctcatcgtccagccagagcagcgtcagcgagcaagcctgcatgtcgaggctggtgacgaattcgccggcctccggcataacggcttcgaggccggcagcctcaagccgtgcggcgatcgccgtccagagcacgaagagctcttcgtatttcgttgcacccagcctgcagcgcttccataatcctcttgccgtcctcaatcgacaggccgaggtcaccatcaaacagccgctccccccgagattgtctttctaggctgtcaaccgattggatcgtctccaagtccgtgaaatccccgcagcgaaaggctaggccatagcctgcgcgatgcagggtttggctatggcatcaaaagcttcgaaatttcgcggggcttagcgcatggccagcgcacgttccattcggtcgaggccctcgctaagcagcgatcgtgggcagccgaaattgacacggacgtagtctccgtaagcggcgccgaattccgatccggcgctgaatcccaccttgccgtgttcgaggaagaacgcctgcggatcgggagcgagccccatgtcgccgcagtcgagccaggcaagaaaggtggcttccgccttcacaagccggatggcggggaaacgggacgccacctgttcggaaagatagtctcggttggcctggatatagccgagcatcttctctttccaggcagaggcatgtgtgtaggccgctatcgtcgcctcgaggccgagtacgttgacgctgtcgaccattccgagcttcgactgcacgaagcgttcgcggatctcttggttctgaacgatcgcgaacgcggtcttgaggccggcgatgttgtaggttttgctggcggccatcagggtgatggtacggttcgccgtctcctcggaaagcgttgcgatcggaacgtggcggcgggcgtcgaacagcagttcgcaatggatctcgtcggaaatgatcagcgcgtcattcttttcgcagagcgtggcgatctcggtgagttcgtctcttgtgaataccttgccggtcgggttctgcggattgcagagaagcagcgcgcgtgatctggcaagcgcggaggccagcgggtcgacatccatcacgtagccctgctcggttgtcttgagcggcacttcgttgcgaaccagaccccaatggccggctgcattgaggatggggcggtagaccggcgtctgcaccaccagcccgtcgccgggctccagcatggccttcaacgccatgttgaagccgggctcgacgcccggcaggaacacgatgtcgtctactgtaatcgaccaatcgtatttagaggccatgtcctcgacgatccgggcgcgcatctcgtcgcgggcgacgccatagccgagcatcggatgttcgagccggttgcgtatggcgtcgacgatctcaggtgccgccggaaagtccatgtcggcgacccacatgggcaggatgtcagccggatacttgctccatttcgagctgccagtgccgcggcgctcgtgcacagcatcgaaatcggtcattgcttacagtcctctgatcatgccgccatcgacgcggatggacgatcccgtgacatagctcgcctgagaactcgccaggaatacggcgacggccgcgaactcctcgggcttgccgtagcggccgaccggaatttcgttgcgcgatgcttcctgaaccgcctcaagcgaggcgcccgtcttctcggccttgatgccatcgagctcgcgaacgcggtcggtggcgatgcggccggggaggatcaagttgacggtgatgccgtggcgggcgacttcggaggcgagcgtcttcgaccagccggcgacagcggcgcgcacgccgttcgacaaagcgagattggcgatcggctggacgacgccggaggagccgatggtgatgacgcgcccccacttgcgggtgatcatgcccgtgagcatggcgtcggtgatcgaaaagattgaggtcgccatcgactggaaggcggcaacccagttctccgaggactgaccgagcgccggaccggccttcgggccgccggaattgttgacgacgatatcgacaccgccttccgcgtggagcttctcgatcagcattgcgaccgaagcggcatcggagagatcgacggccaccggaacgatgttttcggtcgcctggatcttgtctgcgccgcgggcggcggcgaagaccttgacgccttcggccgcaaggccggccgcgatggcggcgccgaggccacggctggcgccgagaacgagtgcctttttaccagagatctgcaggtccattagttcaaagctcctagtttcttttcctggcgggcaatcagccgctcgacttcggccaccgccgctgcattcaatgccgcaccggggcggcgctgggcggcgctggcgatcgcgccgcgcttggccaatacatatttgcgaacggcgaggccgagacccggttgctgctcgtagcgcatgagggggagatatgcgtcgaagagatcatgagcctcctcatgccggccttcattgctgagtcggcaaacaccggccatcatttctggataggcaaaaccggtcatggcgccatcggcgccgcgctgcatttcctccggcaggaagacgccagcattgccgcacaggatcgagacgcgtcggcgacccttggcctcggcggcgcgcaggtcggcgatcttctgcaggccgggccagtcctcgtgcttcagcatgacgatgctcggatgtgcctcgaagatcgccccgagggttttcgagctgatctggacgccggttgccagcggaaagtcctggagcacgacggggacgtcggtgccgatggtttcgacgacgtcgcggtaataggtgacaatctggtcgtcggtgcgcaggctggacggtggcgcaaccatgacgccggcagcgccgatatccatcaccgccttggtcagttcgccgatcgcggcaaggccgggcgcggaaacgccgacgacgacgggcttgccggccgagcgggcgagcgtccggcgcgtcacgtcgatcgattccgcctgggtcagcttcggcgcctcgcccatcatgcccaggatcgtcaggccgtcggcgccttttccataatagaaatcgaccatgctatcgatgctggccgcgtcgatcgcgccgctctcgtcgaaaggggtgcaggcgatgacgaagacgcccgaggcgtcggctgtgatgtgtgacatgtattctcctcgctagaacactcagaaccaggcggaattgccgcggccgacatactggccgtcgccgggggcattgacgatctccgtcccatcataggcgagcttgccgccgacataggtgcgggcgacgcgaacgctgaattcgcggccgtcgaaggggctccagcggagctcatcatgggccttggacgaatcccagacctgcgattccatcttgagaatggcaatgtcggcatccgcgccaacgacaagcgcgcccttttgcggccacaggccgaagaacttggcggggcgttcgcacagctgctcaacggtcagcttcacggcatcgaagccgcgtatctcggcaccggtgtagaaggcgggcaacagggtctcgaggccgggaacgccggcgccggcgtcgaagatcgatgccgtgaacttgttgtcgatcggccagctcgaatggtcggagctgacgaaggcgacacggcccgccacgacgtcgtcccagagcagttcgatctggccggggcggatcggcgggttgaccttcatcttggcgccgagcgccgggccgtcgatttcggggtcgagccacagataatggacgcagagttcgccggtggcgcgatatccgtccgtcaggtagttttcgacgaggtcgaagccacgcgtcgtcgtcaggtgcacgatgtgggcgtgcgcgccggcggcggctccgagttcgaggaactgcgcggtcgcggccatttcggcggccggtggtcggctttcggaatgcgcctcgatgccgtcgcgaccggcggccttggcggcggcgatgttggcgcgaacgatttcctggtcttcattgtgcacgccgagcgggatcgcggtctcggccagcgcggtgaagatctccagcgtctggttggaggagatgcgcgggaagcgggtcgggctgctttcgaaggtcgagatcttgaaggcgacgacgccgcctttgatcaggccgtcgatctcgtcggtggactggccgggcatgaccgtgccgtagagggcgacgttggtgtgggcgttctcgcggattgctgcgaccttggcgtccagcttagcgaccgagttgagcggatcgggattgtcgtagggcatgtcgacgatggtggtgatgccgccggcaaccgccgagcgcgtcgtggagcgtatgcccggcaggccgccatagctgcaggcgtgcgtctggccgtcgatgacgccggggatgagcaggtccgcgccggcgtcgaaactctgggccgcatcaggcgcctcgccggtgccaatcgcggcgatcttgccgtcgcggatagcgatccaggcattgtcaagcggtccctcgggcagcacggcggtgccgcgaatgacgatgtcgtaggtcatgatgcgtgccttccgtattgcagatcgagagtggtgcaggcgagtgccacgccggcctgaaccggatcgatgacgggaatgccgagcgcgtcctgcattgcctggcgatagccgccgaggccggcgcagccgagaatgatgacgtcggcgccgtcctcgtcgcgcagcaggcgcgccgtgcgggcaacggtttcgaccacatcgccggccatgagctggacgaccgtcatgtcgatggagcgatcaccggcgagccggccgtcgaagccgagcaccttgagatagcgcaggtggcggtcgatcgaggattggccgagcgagacgatgccgaacttctgtccaaggcccagcgccgcaagataggcggcctcggcgatgccgacgacgggacgcgttgtcgcctttcttacggcggcgatgccgggatcggaaaagcatgaaagaacgaaggcatcggcgtcggagaccgcgatcgcttcgagaatgttgggtatcacctcggcgacatgtgcgtcagtctcgatgccgggcggggatttctgcagttccgtgcaacgaatgtcatggcggctggcgccgcgaacgatgccaaggcacgtctccatcgaccgggtgaccgagacggagctgttgggattgatgacgagaatttctgacaaggcgatacctgctgggggacagcattgcgtccaataaatatattacgtagtatatcagaaaaattagcttgtcaaagttctgttggcgcaggcctgatgatgcgaagtgttcgtggaaattggcggattgctcgcctatgttgatgctcggctcgacggatgacgccgccgaaatcggaaactggagattgattttgattaaagcggacacgtcgagcggcaagcgtggaaagtcgctgacggagacggcttatgccgttcttcgcgagcgcatcatcaccggcgacctggcgcccggcgtggaggtctcggagccggagctggccgagcagctgtcggtcagcaagacgccggtgcgcgaggccctggcgcggctttgtgtcgaaggcttcatggaggcttatccccggcgcggctaccgagtgacaccggtgacggtaaaggacatgaacgacctcttcgccatccgtgggatgctggaggggactgcggccgcactggccgccaagaaccttagtgatgccgatctcgatcttctcgatcagctcgccgatgtcagctatgtgatcggcgaggaagtcagcaccaagaccttcgtcgattccaatcaggagttccactccgcgatcgcgcgcggctcgcgcaatccgcgcctctatgcgctggtcatgagccatctcgaggaatgcgcgcggctgttctacatgggcgcccgcgttcgcgacatcaatccggagacgaatgacgaccatcatcgcatcgtggcggcgctgcgaaagcgtgatgccgacaaggcgcgcgacgccgtggtcgagcacaacgagaatacgcgccaggggatactgggcgcgctcgtcgcaacggggcaggtggggctgacgctttaagtcggcgcccgtcgtcgcgtcaggcgaccttgacgaggtggccgggcgccggttcgtcatagcgggcgacaggcggctggtagtcggcgggcctgatggcgctgccgatctcgccgccgggtgtcgcgcggcggatgtgacggcgggccggatcggcgatcggaaccgcgctcaagagcttgcgtgtatagccgtgttgcggattgctgaaaatctgctcgcgcgtgccgatttcgacgatctcgccgagatacatgaccgcgacgcgatggctgacacgctcgacgatggccatgtcgtggctgatgaagaggtaggcgatcttcagctgctcctgcagctccatcatcagattcacgacctgcgccttgatcgatacgtcgagtgcggagaccgcctcgtcggcgacgatcagaccgggattgagggtgagcgcgcgggcgatgctgatacgctgtcgctgtccgcccgagaattcatgcggaaagcgccgcgccatatcggcctgcaggccgacgcgcaccatcagatccgccaccttttcgcgcgcctccttcgctgtcgcgaggccatgcgtgatcattggctccatgatggcatcaccgacgcgcatgcggggattgaggctcgaaaatgggtcctggaagatcatctgcatatgctggcgctgcttcgtaagctttgcttggtcgagcgctctgatatcctggccgtcgatatgaatggaaccgctgacgggctcgatgaggcgcaacacggagcgaccggtggtcgactttccgcatccggattcgccgaccagcgagagcgtttccccctcatggatatcgaaggagacgttttcgacggcatgcacgcggccgctgacccgcccgaaaagccccgacttgatgtcgaaacgggtgacgagattgcggacctcaaggatagggcgcttgccggtttcgacggtgccggcgatctcgcgttccggcgaggcaacgcccgtgtccgtatccgtcagcggcagcgtggccggaaaggcgcggccgtccatcgagcccagcctcggaacggccgacagcagcgccttggtgtagacattggcgggcgctttgaaaatctgttcggtcttgccgatctccagcgcgcgcgaacggaacatcaccaccgtgcggtcggctatttcggcgacgacgcccatgtcgtgggtgatgaagagaacggccatgttctcctcgtcctgcagcgacttgatgagctgcaggatctccgcctggacggtgacgtcgagtgcggtggtcggctcgtcagcaatcagcagcttgggccggcaggcgagcgccatcgcgatcatcacacgctggagcatgccgccggagagctggtgcggatattcgtcgtatcggcttgctgcggccggaattctcacgcgctcgagcaggcgcacggcctcggcgcgtgcttcctttttcgagcagccgcgatggcggataattgcctcggcgatctggcgcccgaccgtcaggaccgggttgagcgaggtcatgggttcctggaagatcatggcgatgtcgttgccgcgcacgtcctgcatctgccgctccggcagcgacaggatgtcggtgccgccgagcgtgatcttgcctgatacccgcgacgtgcgctccggcagcagccgcatgatcgacattgcggtgacgctttttcccgagccggattcgccgacgatcgcgaccgtctcgcccgccgcgatgctgaagctcacgtcgttgacgacaggcgtccacgcgccatttctgcggaaggacgtggtgagattttcgaccgaaaggactgtcaagcgcggatactccgggtcacggcaaagctggcaggtcgatattgcaacgcgtcaatggacaaatgtcaataaaaatacctcgtggaatatcacgtaagatattttaaacttgcgatcttgttcccaatcgacaaatctgccgctgacatagatgcagacaggtgcctcaccggatcgatcggagaccgacatgacagacgcgcagcgccagaccgttttgctcacccctactcagctgcagaagatgcgcgcatcgggcgccgatgtgaccgtgatcgcggttcactcgatcaatccctataccggccaggcttctttcaagggggcgcgcatcgagggtgcgatcgatacgcaagcctatgaggatttccaatcgccggcgaccgtcgagggcgggcagcggcctttgcccgatatcgcggtgctgcaggccaaggcgcgcgcctgggggctgcgccgcgagagcacgatcgtcatctatgacgccgatcgcggcatgacggcggcgcgggcctggtgggtgttacgctgggccggtcttcctgacgtgcgggtgcttgacggcggcttcccagtctggttgaccgccggccttcccgtcaccgaagcggtttctcatccaacgccaagcgatgtcacgctgacttcaggtcacatgagcgaaatcgggccggatgaggcgctgcgtctcgccgtcgatggcgtgctcctggatgcccgtatccgtccgaactacatcggcggcgcgtcgcttcccggccagccgccacgcgggcatatcccgtatgcgctcagcgcgccggcgcccgacaacgtcaccgattacggcaactttaccgatacggcgacgctgaaggagatgtatcgcgcgctcggcgccgatgggcggaagccggtgggcgtctattgcggtgccgggatgtctgccgcgcacacggtgctggcgctggcgtcgatcggcatcgatgcggcgatgtatcccggatcgtggtcggcctgggtgagcgatccgtcgcggccggtcataatgggagccgaccctgtgtgagctgtgggtggcctgaatttttcgcatgaatgctgctatgcggaataatcttttcgcaaatgcacaataaataggccatattcgctacttgttcaaaacgcttgcagccaaggctttacagccggaaaagcaatgatatatttcgtggaatatcagaaggggaaggccttgataggctgacaatgagaggctcgggcgacgttgaacgcgtcccggccagaccatgaaagggtcgtgcgaatgaaactgcttaaaggacttgccgccgcggccttggtcgccttgccgatcttttccggatcggcgcatgcccagagcgacgagcaattgaagacgctggtcgttgccgttccttccgatcccgtaagcctcgagcccggcaccaacaaggccgaaccgatcggcagtgagatcattctcaacgtgttcgacacgctggtcgcctggaccgcgcccgatttcaagcagctcgagggccggctcgccaacaactggaccgtttcggccgacggcaaggaattcgatttcaagctgcgcgatggcgtgaagttccaggacggcaccccattcgatgcggccgccgtgaagttctcgctggagcgcaccaaggccaccaactcctacgtcaaggcgaccttcgacctcatcaaggatatcgcggtcgtatcgccgaccgaggtcaagatcacgctctccgagccctatccggcattcctgtcgatcctggcgcagccgcagtcggcgatcgtcagcccggctgccgtcgcgaagtacggcgacaagttcgcggccaatcctgtcggcaccgggccgttctccttcaagagcgcgcaggccgataccaatgtcgtgcttgaagccaaccccgactacttccgtggcgcgcccaagctctcgcgcatcatctaccgtgtcattcccgatgcctcgacgcggcgcctggaactcgaaagcggcggtgtcgacgtcgtgcagcagcagggccagctctcggccatcgcggccgaggatatcgaagcgctgaagtccaacaaggacgtcaagatcatcgaggcgtccagccagatcattcgccagctggaattcaacaacagcaagaaggatggccccttcgccaatatcaaggtccgcgaggcggttgcgcatgccatcgactatgacggcctgctgaccggcgtattcggcggcacggccgaacgcgtctacggtccgctgacctcgaacagctgggcgttcgatccgaagatcaaggacatggcacccgcttacgatccggagctcgcaaagaaccttctctccgaagccggcgtcgatccctccaccatcaacctgaagctctacagcttccagggtccgctgtggggtgccgtcgctaccttcgtgcaagccaatctcgccgatatcggcatcacggcaacgatcgagcagaccgaattcccggcctaccgcgcgctgcagacagtcggccagttcgacgccgcactggatggtcgccagccctggtacaacgatcccgacgcgcatatcaccatcggctatctctcgtcgctcgccgacaccgcgatgaccttccgcatgcctcaggacaaggcgcttgacgacctgatcttgaaggcgcagcagacggtcgacatggatgcccgcaaggcgctctatcagcaggtgcaggaagagatcgtcaagcgcgtgccgggcgcctatctgttcagcccgaagctcatcgtcttcacccgcgccaatgtcgagggcttggtggtcaacagcgcgcctccgctcaacgagtattggggcgtgtccaagaagtgaggcgcatcgcgccttactgacgaaaaatcgatccgcagcggttcgccgccgcgggttctttccctaggatgtgagtagaactgggcatggcgaccttcatcttgcgccgattgatcgcgttgatacccgtcatgtgtatcgtgctggtcatcgtcttttcgctggtgcgcttcattcccggcgatccggccgtgacacttctcggacccggagcgacgcaggcgcagatcgatgcgctgcgggcgcagctcgatctcgaccagccgtttccgatccagtttctgaattatgtcggcggcctgctgcagggtgatttcggcatctcgctgaagaccggccaaccggtcgcgcatgaaatcctgctgcggctgccggccaccatcgagctctcggtgctcgccgtcatcgtcgccgtcatcatcggcatcccgatcggcgttctgtcggccacccgtcccaattccgtcttcgaccatgcgacccgcgtcgtctcgctggtcggcgtttccatgcccgccttcctgctggcgctaatcctgcagctggtcttcggcacctatctcggctggttgccggtctccggtcgcatgagctccttcatcgttgccgaaccggtcaccggcttcgccatcctcgacggcgtgatcaccggcaattgggcggcggcgctgagcgcgctgcagcacctgatcctgcccaccgccgtcctcgccgctttccttgccgccacgctcggtcgcttcgtgcgcaacaccatgctcgaagtgatgggcgaggatttcatccgaaccgccaaggccaaggggctacgacgcggcgacgtgatcatccatcacgggctgcgcaactcgcttttgccggcgatcaccgtcatcggcctgaaattcgccgagatgctcggcggcgccatcctgacggagaccatcttcgcctggccggggattgggcgctacatgttcgaggcgatcaagaaccgcgactatcccgtcatccagggcacgacgctggtctttgcgctgctattcgttttcacctcgatcgtggtcgacgtcctccacggcgttcttgatccgcgcgtccgcaagaagatgaagtgaacgcgatgtcagagtttttcagcttcctgcgcaagaacacgctggccatggccggcagcctcatcctgctcgctctcgtgctggtgatcgtcttcgggccaatgatcacgccctattcgccgaccaagctagacgtgctgcacaagcttgccgcgccgagcttcagccactggctcggcaccgatgccttcggccgcgacgtcttcacccgcatcatgcatggcggccgtgcgacgcttgcgatcggggtcggcgtcgtcgcgatcgccttcgtcgtcggtgtctcgttcggcatgctcgccggtttcgccggtgggtggacggatagcgtcatcatgcgcatcgtcgatgcgatcctggcgtttccggcgctggtgctggcgattgcgctcgcggcggccttcggcccgagccttgagaacgcgatgctcgccgtggcgatcacgctggcgccgcagttcgcccgcgtcgcccgcagccaggcgctcagcatctcggtgaaaccctatgtggaagccgcgatctcgctcggcctgccgacgccgcgcgtgcttttccgctatgtgtttctgaacggcctcgggccgctcctggtgcaatcgacgctggcgctcggcagcgccatcctgcagaccgcgagcctcggtttcctcggcctcggcgcccagccgccgatggcggagtggggcgcggatgtgtcggccaacctacaattcgtgcgtggtgccgcctgggtggccctggcgcccggcatggcgatcctgcttgccgtgttgtccttcaatctgatcggcgattcccttgcggactggttcaatccacgccgacgcagcgaactcgactgaggcctataatgtccacactgacgatcagcctcgagaaggtcgatttcctgccgccgacgcgggtgacagacgataccagcgtgctgacgctgaagaacctggtgttcgagccgctgttgaagtggcacgacggacaggtgctgccggcgctgttttccgattggacgcatagcgacgaaggccgcgagtggcggttttcgatccgcgagggcgcgacctttcatgacgggaagccctgcgtcgcgggagatgtcatcgcgttcatcgacggaattctcgaagcggtcgatacgttcgggatgaagtggtcctacgcgcgctatctcgccgatgccgtcatcactgccgaaggcgacaccaccgtcgttgtccgcaacccccatgccttcgccgatattctcgacattttctccgagttctacatctgccgcttagcgcccaatgggcagccgatcctcgggaccgggccatttcgcgttcgctcgttcgagcccaaggcgaaagccgtgcttgagcgtgtcgccgggcatgccgagccgcgcgagatcgttgccatcgtcgaaccctccgccgacaagcgtcttgagatgctgacgtcaggcgcggtggacgccgccctcaatctcgagcgcgtcgatgaacgtcttgagatgggcgaccgcttccagtggggcaaggcggtcaatacgctgtcggtgatgttctatctcaattgccaggcgggcgtcttccgctcgcctgaagcgcggcttgcggccaatctcgcggtcgacaccgcccgcatcgcggacgagattttccacggcctcgccgtgccctcatcgagcatcgtcagcccctatcatctcggcatggcgagcgccggcctgtttccgatcccctatgatcccgcgcgcgcgcgcgcactgcttagtgaggtggagggcagcaagcgcgtcaagctgcgcacaccgaccttcatgccggagcgcgcacccgaggtcagccggttggtggcggcatcgctggaggccgtcggcttcgaggtggaaatcgagatcgagaccgaccggccggaatatgcgcgccagatcggccgcaaggagatgggggatctcgcaatcttcgattcctcgccgcacagcacctaccgcatcttgaacgacaagatttccagcatcaccaaggccgtgtggtggcagggctatgacgacgccgaggccgaacgcctgatcgcagcggccaatgccgccgtcgagcctgcggctcgcgaggctgcctatgcggcgtgcctgacccatctcaacgccaatccgccctggctctacctcgtgcatccggtcgatgtcttcgccgcgcgcaaggagattgccggcctatccatcgatcacaagggcaccttgagcatcgcctgagcctgtgaggacagaccatgaaaaacgactattcgatcaccttcttctactatgacgacatccatgccgtggtcccgttctacgaacagacgctcggcttcgaactcgttctcgaccagggcttggcgcgcatctatcgcatcgccgagaactgctatttcggcatcgtcgatggcaatcgcggccatctgaagcatcaggaaaagagcgcggtgctgctgacgatcgtttcgcaggatgtcgaaggctggcattcgcggctgaaggaagccggcgtcgccggacagtccgagatgctgcgcggccgattctgcgagcatttcttcttcgaggatccggccggctacgcgatcgagatccagcgtttccacaatcccgacgttgcaaagctgtttcaatgaccaccccgaacaaaacgctgctcgaccccgcgtttgacgctatccttgcggaagcgaaggcctttggtcaggtgccgctgcttggcttgcctgatggctccgtggcggatctcgcgacgggctacatcccgctactggtcaacttcaccttcgaggacaaagacgcgaaggggctgcgcaagctcaaggatcaggctgaacccgagccaccagtccattttacggcgctggagatggttcgcgacaatccggcgatcatcctgaccggcgagaccggcagcggcaagacgagcttcgcccgcaaccttgcttcccggctgtccgtgggcgcatcggccttgcggccacggccggtaccgcgaaacgatcttggagccgtgcatgaggagcgctgggacctcgataatgtcattcctgtctacatgaccgtcaccggtccgcagacattcggcgatctgctcgaacagaccggcacccgcgcggtgtttgacgatcaggcgctcgcggacgccggtatcaccattcttgtcatcctcgatgcaatcgaagccgctggcgcggaaggtccgcgtctgctcgccgaggcgctgacgttccagaagacccatcctcgggtgcggttgctggcgctcggcgagagctccagcgtcaagagctggccgctgccggcggactgcgtccgctacgatctcttgccgctcctgaaaacccagcgtatggatgcggctgcccgactggcggggctcgaccttgtccagtcaaacgttgcgcttggtgcggcggccggcaacccggcgcagtttgccatggcgatgtcggccggggacgccggtaagaccgccgaagcgattaccgatcgctgggtggcgcggatcgccggggacgagaagacggctagcctcctctgcggcctggcattcgatgcgctcagtggaaagaacaacgatcccgcgctgtttcccgtcacccgcgtgcgccaattgctggcggcgcggcatctggcatcggagccagccgacaaggccgtgctgccgttccagacgcacccggtgctctgggcaccggttctgcggggccttgccaaccgtctctccggcacagaggccgctgacctgctcatcggagcgttgctcgctggcgagggcgacgacgtcctgcgcggcgcgctccttgccgccgacattgtgaccgagaccagcgcacttcgcggctgtattgcagcacatctgctcgccatcgtggctgacggaatgctatcggcgccgcaacgggaacaggcggcccgtatcctctcgcgttggggcgatccgcgtgacctgcaggcgctggccgaagttccctcgggaaacttcaccttcggctcagacacgcatccgaattcagcgccgccgcatccattgacggtcggtgcgttcaagatcggcatctacctcgtcacgaaccgcgactatggcggcttcatcgaagagaccaaccgcctttggcgtagccctgacggctttgccgaggatcgccgcaacgcacctgcgacggatctgacttggcgcgatgcgcgcgcctattgcgactggctaaccgaacgctggcgtgccgagggacgcatctcgccggacgaagccgtgcgcctgccgacggagccggaatgggagcgcgcggcgcgcggcgatcagcccgataataggcccgaaaagatcgtctatccctggggaacagaatggcgggacgacgcctccaattccgaggaggccgggttcaacaccacctgtgccgtcggcctattcccgaagggcaagtcaccatacggctgctatgacatgacgggtcaggtctgggagtggacgacgacgctttggggcgatgacatggcaacgccgcattacaaatacccctacgccggcgacggccgcgaggcgccggatgcaggaccatccatccgtcgtgtgctgcgcggcggttgtttctccagcggcaagcttaaggcctgctgcacctatcgcgggagcctggaaccggacggtttttggcggggcaatggcttcaggatcgtggtcgcacgagcctgaggttgagtaggtggtccgtatgcccgtaacagttcctcatgagctacgtgcggctgaagtgtgtgagccggagctcgtggtccgcaacctaagccagcaccactcagcgtgccacggcaagctcaaccccacgccatcggctgctgctcacaagcgacaggatgccttcgagaggaagcgggttcgaaaaatcttccctttgcgcaagctgtccggcgatgtgctggacggtgccgttatatggtgccgctatgccatgcaggcggccgagcatgacgatctcgacatttaggaagtcgacctcgtcagatgcgacacgggtaaaacttcgccaggtggattgctggccgggatggatgtcgctgttctcagccacccgcagttcgaaatatcaatgtcgcgctcggataccgcggcaagcctataaccgactgcctgaagtggcagcccccgcctcttcaaatttggcttcgccgaggagtccaatcgatggcaggatcaaccgacaccagaccgccggctggatctcgtcgatggaaactttgatctgaaaggcgcttgcgggcttgaacccgggggaatgaacaaggtcggaaggagatcgtcaagaaagccgctcgacgctattgctgggatcggctctctccgatagcaacctgccgacttgtgcagtcgccgatgctcactatctctggtgtgggcctgagttggagcatcgccatgaatcaaagcgcggccgatatgctgttggaagtcggtatcgaaattcttccgccggaacgagaagacaactgcacatcggacgcaacaacctgtccctgctgtcaaaagttgcgcccggcatcgagcatggatgacgatggctgtgggatttgtgatgaatgcctggcgcccctgacctccagccgagaagagctttcttctgttcctgcctcatttgaagccgcgtttgcgatactactcgacgactatgttgacggaaattttggcggtcgagcatagagcgtgaccgtcaagcgatcgcgggatggaaaacggacttggctttatggccaggagtttggcggaaaagatattatcagcttcaacctctatcgatttgctggatctggcccgatgctgaagtggtgcgaaacgtcatccgccaaggtgatcgaatccgttctcggcatcgagccgagtacgcagaaagctgcgcctacatcataaataatggaccaaaaatgagcagaaagttttcattgcattgcaacatgcgcatggctgcattgcgatctgaacgctagcgatcggggcagtctctggtatctttagggcatcgaagtaatgcacttcctcccgcatagcttcgtgttcaggcgacccactcctcctcccaaggggcgcctgacggaacggcggcattcctcctcccagccgttgttcaattcttttgaaaagcctgccgcacctcctcccgcggcaggctttttcgtttccgacagattcatgttcggagatcagacgtcaaagcagggtaccctgttccaccggctctccggatttcgacacgatcgtggatccgtaccgtttgcgtgaagaactgatgagcgcgtcattcgggaggtacgcggccgtcagatggaatgtctagaaacccaaaagctgtcggcggcggtcacctttgcgatatctgcacaggccgaggccgctgaatcggcgcgatcgcgggctgcggcgaagggtcgatctcgccaggccctcctctccaacctgctgatcgttttcgtccaagctttttagcgcgtcgatgatctcgtcataggtgacggctttatccgcgccatgatacagccggagaccgggcgtggactcgatcgcaaacatatcggaagcccacgacgcgaggagggcgcgtttttcatctttgccaatctcaaccgcagcaaggacctcacgcggatggccaaaatgtttcgccggatgaagaaggtgcgcggcgctgatggccgctgccgccttctccggtatcgaattttccaatcgttcctttctcatagcttgaccccgtttgatgccaggtcgatgtttggttgcatttggcgcctgtggttagagcgcccggtgatcgaagaggcctctcgcggcctcgaccattgtttttagatggctcggttcgtgaacaccttgcctgtacaattccactgtgatggccgccatccgttctgcttcttcggattgcttaatgactccagttctcgatcgaatgtcatcgaaaacccgctgacagaccgcaagatcacggctgtcgaaagacgtcgacgaaggttttgttattgcttgagccattcttccacctcctaatcgaaggctcgccccgagaggctagggcgagccttcccaatcgcctgcttagaagtccatgccagcgccggccggcagagcaggagcggtg

SEQ ID NO: 28 - DNA, 56931 bp, Rhizobium matallidurans
  source 1..56931: mol_type = genomic DNA
aagacctgggggctgatgctgcgtgagcggctggacttcaaacgtgccgcggttgctgttgcgcgaaaacttgccgtcataatgcatagcatgctcaaggccggggaagcgttcaatccattgggcggcgcagcggcttaaccgaagcgccggcctacctgcctcagcacctcaatccgactgggatgctgggcgtccctgctgtggacgtgggttgggtcattccgtcgattccggcgcagctcattgagactgcgtcttgaacataggaagacctgccctgcgaaaacccatcatgcggcgactgcatgtcgaccgcggagacaaccgtgctcccagcaccggacgaatttgcagggatgaaagatgtcgaaagaaaatctaggaaagatctcgcgctagcaacacggcaatgacgtacctcgtttaaaatctgcttgacccgatgcaagcgattagacaacggaatcgaacacccgtttacttagataattacctcggtagaattcattaaattaggaacggacagagcctttcagtcagcacagtgtcgtagatgcgtctccctcgatcacttttctacggctgcaatccggcgcaacgcgcggtatttcgaatatgcgtttccatctcattgcgcgccaaatctccgtcattggcctttagagctgcgataatgcggcggtgttccgcaattgattgtcgcattcgttccggatccgtgatggggataggctgacgctgggtttccgtaacctgatcgcgcaccgtctggtaaagtgccttcagcatggtgttggcgcaggcggacacgatgatgccgtgaaactccagatcggcatcaacattggcgagcaggtcctgattagcccagcactcctccatggtcttggttgccttttccatcatatcgagctgtgcctgggacagtcgcccagcggaaaggcgtgcgatctcaccctctagcaggatacgggtctggaaaacatcaaaaacagaataactttcggaataacgccacggcgccatgttgcccgtttggccgacagtcccatcaccggcggccacgaatgtccctctcccagcttccgttttaagcaagcccaatgtctcgagcgttaatagtgcctcgcgtaacgatgctcggctaataccgaatctctgggagaactcacgttgagaagggactttttcgcctgctttcaattctccagactggatcatagcctggatttcgcgggcaaccgattgtggtaaaagcgttttattcagcatccgatccttgctccctgaaacctgcactgcctctttcgatacatttttcaaatgggatcttgcaaaggattaaagcgcgtgcttgtctggtcatactggtctgaccagttagaccaacgtagattggcttgaatcataaaacaaggggttctcaaatgcttcacgtttcacgcatgaaaagtacatttctagccggactgatatcggcgctcggcgtcttcagcgtccatgctactgatctgacggtcggtgccaacattggtaacgtgccatgggagtttcaagatgccagcgggaaaaccgttggtttcgaagtcgatctcgtcaacgaaatcgcaaagcgccttggcaagtcggtggagttcgtcaacacgccgttcaacgggctctttcccgctgttcagtccggccgtattaatatggcgatttcatcgattaccatcactgaaaagcgcttggcgtcggttagcttcgcccagccatactacgatagcgatcagtctctgaccgtgacagcagcttccggcatcaccggcctgaaggacatgagtggcaaggtcgttggcgtagacaccggatcgacgggcgatatgtgggcggaagcccataagggtgattacaagcttggcgaaatccgcaagttcgaaggattgcagcccgccatgctcgatctcgttgccggccgtgtcgatggctatatctccgacattccggcactgctctactacgccaaggacaagccggagctaaaggtcgtcgagcgtattccgacaggcgaaaaatactcgatcatgttcaacaagggcgatccgttggccgcagaggtcaacgcggttatcaccaagctgaagggcgagggcttcatcgccaagttgcatgaaacttggttcggcgcgaaggccgaggacacgacctcgaccgttgccgtacttgatatgcccaaggccaagtaggcttacaccgcgtctggcgggactactcgtgtcccgccagattgccaagggagcctgtccggcatgaacctcataaataccttcttcaacgttcccgtatttctcaacagcttgccgcaattgctttggggacttgttgtcaccattcagatcggtattgccagcatcctttgcggtctggtcggcggtctatttctggcggtggcacgtctttatgcgccggccactttcacgccgctgatccgtatctacatcgacatcttccggtcgatccctttgctggtgctgttgatcattatctattacgccctcccattcgtcgggatccggctgtcgccattcttctctgctgtgaccgcgctatcctttgtctctgccgcctataccgcggaaatctttcgcgctggcatcgaggctgttccccacggtcaatttgaagcatccgcagcccttggcctctccaaccgcaacacgatggtggatatcattcttccgcaggccatccggatcgtcattccaccgcttaccaacaactgcatcaatgtcatgaaggacaccgcccttgcatcggtcgtcgccatgccggacttgttaaaacaggcaacccaagcgcaggcgctcaacgccaacccgacgccgctgatcggtgcggccctaatctacatcgccctcctctggccaatggtcgccctggtggcgcggcttgaaagacatttcaatcgggggaaacgctgatggaaaagaccacacccccactgatttcgatccgcgggctgactaaagcgtatgggctatttaccgttctgcatggcattgacctcgatgtggcagaaggcgaagtcgtctgcgttattggcccttctggttccggcaaatccacgctcattcgctgcatcaatcatctggaagcctttcagccagatagcagcatcaccgtagatggtattcgcgttgcgcccggcccggccctagccaaggtgcgtgccgaagtcggcatggtgttccagtcgttcaatctgtttccgcacatgaccgttctgagaaacgtcatgatcgctcccatgagggttcgaaagacaccagaggcggaagccgaacgcaaggcgcgcgagcttttggcccgcgtcgggatttctgagcaggcagggaaatttccaggtcaactctcaggcggtcagcagcagcgtgtggccatcgcccgggcgctggccatggagccacgagttctgctgtttgacgagccaacatcggctctcgatccggaaatggtcggcgaagtgctggatgtcatgcgcaaactggccggcaccggagtgaccatggtgattgtcacacacgagatgggttttgcccgtcaggtggcagaccgcgtcatcttcatggatggcgggcgcctcgtcgaggcaggcacaccttcagacatcttcgacaatccaaaagaggcaaggacgcgtggcttccttcgcgccgtcctcaatcactgagaccattcgggagacacttggaatgaccacctcatcaccgctcgacctcgactatgtgcgcagccagttcccaggcctaaaccgcggctggacctattttgacaatgctggcggatctcagattcttaaaggcgcactggatcgcatcaataaatttctgatcgaaaagaacgtgcagatcggcgggtcctacgccgtatcgcaggcggccgccgaagcgctctacgaagcgcggactgcagcaatgcacctggtcaacgcttcgtatccggaagagatcgtcttcggcaattccaccacagcgttgctgcagaaccttgcccgcgcgatgcagagccagctttcgccaggcgacgagatcgtcgtcacggtcagcgatcacgaatcgaatatcggcccctgggaccggctgaaagaggcgggcatcacgctgaagatctggccgctcaacaaagacacgttgatgctcgatctcgcggacctggcgctgctgatgagcgatcgcaccaagctcgtctgcgtcacacacgtttccaacatccttggatcgatcaatccgatccgcgagatcgccgatttcgtgcatgcgcgtggcgcaaaaatttgcgtcgatgccgtggcatttgccccgcaccgtgccgttgacgtacaggccctagacgccgattattacgtcttcagcctctacaagacttatggcccacattacgcgctgatgtatggcaaacatgacctgctgctcgaactcgacacgctataccattatttctacggcaaggacaaagtgccaggcaagctggagccgggcaatcccaactatgaactggcatattccacatgcggcatcgttgattatctagccgcactcggcgaacaggcaggcgaaaccggaccggtgcgccagaaaatagaggcagcctttgcggcaatcaccgcacaggaaaatcttctgacggaaaggctcctgggctacctacgatctcggaacgattgccggattgttggccaggccaaccaggacgagaagcgcgtgcctacaattgccttccgcttcgatggccgtgaggccggcgagttgtgcaaagcaatggacggcgaaaacattgccatgcgtttcggggatttccattcgaaacggcttgccgaatatcttgggctgaccgaccatggcggcatgctgagggtgtccatggttcattacaatacgctggaagaggtcgatcgcttcacggcagcacttgaccgtattctggctggagatgcgggatttgcgaaagcaagctgagctgtgaacgacaagaaggacagggaatgatgcgtttcgatacggtgatcaggcacggaaccgtggtgacggcaagcgacacgttcgtcagcgatgtcggcatcaaggatggtcgtatcgttgcacttgccgctgacctgaccgatgccgacgagatgatagacgccacgggactcttcgtgatgcccggcggtatcgacagccatgtccatcttgaccagccctccggcgatggcatcgtcatggccgatgacttcgacagcggcacccgctccgccgccattggcggcaacagcacagttttggccttctgcatgcaggagaagggacagtcgcttcgggaggcattgaaggtctatcatgccaaggcagaagggaaatgccacgtagacgttgcctttcatctggtcatcaccgatccgactccagaagtcctcggccaggaactaccagcgttggtgcaggacggctatacctcgttgaaagtcttcatgacctatgaaggcctgcggttgcgcgacgacgaaattcttgcgacgctggatgcggcacgccgcaccggcgctctcgtcatggttcactgcgagaacgaggatgcgatccgctacctgatcggccggcatgaggaagagggcaagttcgcgccgaagttccacgccacgacgcggcccgttgccgccgagcgagaagccacccaccgggcactttcgcttgccgaaatcgtggatgtgccggtcgtgatcgtccacgtttcgaaccgcgaggcgatggaggaaatacgccgcgcccgccagcgcggccagaaaattgttggcgaaacctgcccgcaatatctgatgttgaccgccgccgatctggatcagaacgagatggagggcgccaaatatgtctgctctccaccgccgcgtgacaaagcgagccaggatgcctgctgggaggggttggaacagggcgtgttcgatcttttttcgtccgatcattgccccttccgcttcgatgaccccgaaggaaaattgaatgagaaaggcaagcggcatttccgttggattccgaacggcattcccggggttgccacacgcttgccgattcttttctctgaaggtgtcatgaagggccggatcgacatcaaccagttcgttgcggtgacctcgaccaaccatgccaagctttatggtatttatccgcgcaaaggcacgattgcgatcggtgccgatgctgacattgccttatgggatccggacaaaagagtcactgtgacaaatgatatcctgcaacacggcgccgactatacaccttatgaagggcaggaggtgcgtggctggccagtgcaactgctcttgggtggcaagacgatcgtgaaggatgggcttctagcccagcagaagagacgcggcaactacctccagagaaatcgatcttccctcgtgtcgaaaggcaagtaccccagctagataaagcgtcgaaaattccaaacccgctcaccgattggaagcccggctcagccacgcgcgttctattttaggcttttgataggatcagaactacttgcgtaccaaatgttaaacttcgtccaccgcaccacgctggatcgctcgcccaatcttcatgcccgtgacgaattcttatgacgaacacgttgtcatcttcgattatccgaaacacgatcaggtgcgctttgaaggatgaattctgaccggcgacttaatctcgaagctctcgcgagcaatccgtggattatcggcgatcaaatcaagtaaatcgaaaggttcattgttgtagcgacgtgcctgcggtgttccgaatatgcgcaaaccttgctcggcgatcgcgacgacgtccgcttccgcctcgacagataacgtatatctcatgatttattggcacgagcttcagcctcagcaaacaagtcatgcttcgatcgcactccaacgccgctctcgagcccggcgtctacgaaactctgcatcgctgcgaccttgtcattccggacctggtcacggcggatcaaatcacgcacgtaatcgctagcgtttgaataccgtcctgtgcgagtttgtgcctcgacgcagtccctgatcggatccggtagggatacgttcattattgccatcggtacactccatctacgtccactgtgaacccatttgacaaagattgtcaaaggtccggcagtcggcctcatagtgatcgcggcaactgcttgtgaaatgccagtggcgcccggaagcgggttcttgaagtgttggtgaaggcggaaccgttggcccacctattttcatgaactgagaggcaggggatcggtgccctagcttggaattatatcgatagcttaacacacggccacgcttgcggccagtcacctagaggtggctcggtttgtctgaacagtttgggccgtttggctaagtggatttccgcctcgattatgccgccaccatcattggtgccagcacgttgaagtaggcctgatccggcgtctgccggtcaagggatgaatgtgggcgtcgagtgttgtaaaaggtcagatatcggccaatgccaacgcgggcctcagacacggtcttgtaggcatggaggtagacctcctcgtatttgatcgaccgccagagccgctcgacgaagacgttgtcgcgccatgcgcccttgccatccatcgagatggcgatctcagctttcttcagcattgccgtgaagtccaccgaggtaaactgcgagccctgatccgtgttgaagatttccggcttgccatagcgagcgagcgcctcctcgactgcttcgatgcagaaggctgcttccatcgtgatcgaaagccgccacgacaggacctttcggctgaaccagtcgacgacggcgcagagatagacaaatccccgcgccatggggatgtaggtcaggtccatcgcccagacctggttgggtcgggtgaccgctagcttgcgcagaagataggggtagattttgtgcccaggcgctggtttggaagtgttcgggcgacggtagatcgcttcgatgcctatcttcttcatcagcgtggcgacgtgcagccgcccggtcttcagcccttctcctctcaagagcccttgcaacatccgacttcccgcgaacgggtagttgagatgcagttcatcgatccgccgcagcagagaaaggtcgccatcaggcaccggacgtggagaatagtagacgcagccccggctgaagccgagaagcttcgcctggcgcaccacggatagcttgtgctcgcggtcgatcatttctttccgcccagcaatcccgccttgccgagcgcaccggataaaaaatcgttctccagtgtaagctcgcctattttcgcgtgcagcgttttgacatcgatggtcggacccgtcggctcagccttcgtttcatcgccgaacacacccgtcgccccctcaaggagctggtctttccattgcttgatctggttggcatgcacatcgaactgttgggataattccacaagtgtctgctcgcctctaatggcggcgagcgccacctttgccttgaaagccgggctgtggttccggcgcggtcgtctcgtcatggtatctcctgttctcggcatctaagccgaagtcaggcagaaattccacttatcccaactgtgcagatttcccgaaccacctctcctcatcaacggagcccaatcgctccagatctgcaagtgcagcgttgaccgtaggtgcggacagacctgttatctgaacaacctggttggccgtgtgaaaaggattctgttggaaaagctcgtgaatgcgaagggccgaacctgctctatcgctctcgaccgtgatccgtgtcggatgaaagccgttacccacggccagcggccgaagccgtcaggtccttcatgttcctccaacctggcctccatctcgggcttcgacataagaacctttgccaaattcgtgtctgccgccgtggaaactacccgacgtcagaacgccgggttgaagatatgaggtgcggcgagcagcgctggagtgatcgcgaccatgggcgggaggtctttgccccctcggtcgcattcaaaaactccggctcgttcttcgggcggaaaccatttcggctgatcctgccagatctgctcgatctctacgaataccttgatgcccatatcgaccgtcatcgcggtgtgctccttggaggagccaaggatcccggaacgcttttcgtcaagacggtgatcctagccatgcgccgagatcgcgggcgcgatcgaagctgctggcgtttcctattgcagcaaccaaagccgtggcattcaacactccaatacccggaatggctgttagccgacgccttgcaagatcatctcgtgcgagcgccaagaactcagaattgagcgctgcggttttggcatcgagcatattccactcgcttcgcagttcgacgatcaactggtgaattcgcgctgacagactgctctcctgttagcgtggaagagcgtccagcgcactctcgaatttgcaacggccagcagagaagatccggcccgctccaaaaggatggcgcggttctgattgatcagcgtcgttctttgaacacgaccgaactctgtgcagggactggatatcgagttgctctttgcttttgagatcgacgaaccgcattgccggacgcgacgcagcttcggcaataccctccgcatcccgatcgtcgttcttctgcgctttcacatatagtcgaacatactctgagacatcagccgagacctcgtgcccttgagccacgaagagccgaccaaggtagtgagcgccgcgacatacttccatagcaatgacacaagttggcgtcttgctcttaaaactcaattagcgtctgccgccgtatcgttcgacggacgatgattgcaccgtggtcgtcgacaccgacaacgctgcagctattcttgccgatgtcagcacccaaaattgaaatcgtcatgggtcggctcctcttccttcaatgacggaccatcctactccatgtcctctgaagggggccatcccataatcaacaccattgcgactagcgagtttgggaagagcgatctcatcttgtcagcaggaggtgtaccacggagatcgctggtaccggataaacgcggccgcaatagcagaaaacgtggatacggtctgtctactgtgtccggattaccttccgaaggtgtggtaggagcgccacgcgataagagagtagctcgacaaaatcttcgtcgcgataggaactcagattgtggaaaaatgatccgcacgtcagggatcgacgtaattcaaccgtgaagaaagataagtcgttgaggcttaggaacgtgtcttttgctcaggcctagaggtggcaagacgatggatcgaacctatttcacaggtgtctcgcggccgctggccacaagtgagccaaaccttgtgttgcttattgtcgatgatgacatcaccttcgcgagaaggcttggcatggcttttcgagagcgcggactggctgtggaaatatccacgaccatcgaggaagctgaggtcgccatcaggcttcgtcaattcgatatagttatcactgatctgcgtatcggaacgggtagcggcctagaactcgtggaactaacgagtgagatttctccaacaacaaaattgctcgtcctcactggatacggggatgttcgggcagtggtgtcggcggtcaaacgcggggccacagagtttttgagcaagcccgccgatgccgatgagatcttggaagtactaggcataaagatcgaaggagacaggtccgcagatcaattcatcaagtccgcagaccttgtgcgatgggaacatatcaatacggtcttcgaccagactggccgtaatatatcagcgacagcgcgactgctccagatgcatcggcgcacgttgcaaagattgctggcccgtgggcctccgggcagctgaattatcgatcagttacgccatatttgtttttttgatctgccgacaaaatgcggcgcatcaactgcgtcctactcgaaatcatttgaaggcgggacaggctccccgccccaggagctgtcgcgggccgtataaacgtgcgcaggggttggcggcacgtccgccgaccccttttttaatggagatggtggttgaagtatgaggatgacatgacagttttccacgatccggtcacaaggtctgttatcgtcgttttccgcgggaaaacgatcatattgagagggccgtttcaagatggtcgaagcggaattgctgccggtgaagagttgtgcaaagaactcggatgacagtcaaatgagcgacctgaaagctcgggattaacgcaacccgaatagtctataaaacaaatgccgagccgctaaggcggcccggcatctctcatcacattttcggcaaaagaaccttgtcgatgacgtgaatgacgccattcgattgcttcacgtctgcgatcgtcaccgttgccgttccgcctgcctcgtcggtcaacatgatcttacccatgctttccctggctttcagaacgcagccgccgacggttttgatatcatgctcgccaccatcgtctttgatcatcttggcaacggtactggccattgcgtcggccgcaacgacatggcaggtgaggattttcgtcagcttatccttgttttcaggcttcaaaagcgtgtcaacggtgccttttggaagtgcttcgaacgcttcatttgtcggcgcaaacaccgtaaacggccctttgccctcaagcgtggagacgagaccagcagctttcaccgcagccacgagcgtagtatgatcttttgaattggcggcattttctacgatgttcttgttttcatacatggccgcaccaccgacactcgggtttgcggcatatgcactgaagctacctgtggcggtggcggcaatggcaacggccgaaactatcataagctttctcatagtcgtctcctctcaatgccggccttctggctcggtactgattgtacgaacgaccatggcgccggttcaaaattctctccacgataccgaagaatttggtgcttcaatgtatcacgaattcgtaagaacgctcgaacgtggacgatatccgtcagatgccaatcaatggctgtatcatccgcaacaatctacttttgaagcgcagcagcgaggcatatgcagttcttgccggcgtcgaccctaggctgatgcatcagcgtgtcgtccgcatctcgacatcaccgcgcgaaaatgtcgaaaccgcgtcgctgacgctgccttcaaggacaagtgtcaattccatgccgcggtgcgaatgctccggaactggctgaccagcaggtatttttagcagccgtacagttgtcgtgttgtcgccggtcggtatcaacatccgcgctgccccgcgaccgagttcgcacaacttcagcccgccggcggcctcgatgtatccattgaggggcttgggataggttttatcctgtcgaggattcttttttataggcaggacgttttctatctctccagcatcgatccttgccttgaggctctgccagctctgcgacacgtcagtttcatcgggaagctcgcagtctataaaatggccgccgacactctccaggatgccgagctttgatcgacaggctgggcaatagcgagatgagttgctacagctacactccagcgctctgttagatcgtgccccaccgagcggtgtgactcggtggtagcgcagcctctcgcgagcgcgcccccaattgcgctgtagcgagtgaggggctgtgcgggcggccatcagtgttttccgctagggtcgagttgttcaagacacaacctgacggaaagatcactgatgaccactgacatgatgaacgtgcgttcgctcgttgagaagagcgcggatgcggatttgttgcgcgagatgatcggctttgccgctgaatggctgatggaactggaggccggctcagctacgggtgcaggtttcggagaaaagaaccctatgcggcttgcgcagcgcaatggctatcgtgaccgcgattgggagacgcgagctggtgcagtcaggcttcgcattccgaagctgcgcgaaggtagctactttccgagcttcctcgaaccgcgccgcatggcggagaaagctctgacggctgttatccaagaggcgtacattcaaggaatatcgacacggtcggtcgatgatctggtcaaagccatggggatgagcggcatctccaaaagccatgtgagccggtttcgcgccagcgagagatggtggaagcggattatggcggcatttgtgttcgcagtttttgtgttcacgcgcggacatacattggcatgccgctgcacctctggaacgaaactggcaagcctgaccgctttcatcgtgcttcgatacgcgagcatcgatcgtgactgactgttttacggctcgatcgcgttcgttaagtggcgtcaacgtgttgagtatcttggcgggcagtgacaggtcgttttgattgcaacggtagatacttcagcaaaaccacgagggctgttcaagaatcgatcggaaccctctcaatatttgaggcgtgagttcgacacgtcaatacggtgccggaccggcagcgtaagcagccaggtcaaggcggtagcgggatcggcacgtgtgcatcaattgccgacggcgcttacgccctttagcgcctttgcgaggctcaatccgctcatgtacgcggcctcaacgcgtccagcgatacaccagtcgccgcaagccgcaagctgtgtttgcttatcccacagaaacggctcacgagcgggagtttcgacgtcagcgtaccgccacttgtggaggacagtagttttggcttctgccaattcgatccgcataaagcgctgtaagcctatcatcatttccgcgtggacgatatcgacgggcaagtcgatattggaatcggcccaggcagaattggcgttgaccacgaccgatgctgggcctgtgcggcctggcttcgtttggttaaaagcaatccatccgatgatgggatcaaagacgtgagcggccgagaaaggaacgatggtgttggcatcccgtgtgatcatcaatgtgaagcatgcgtgcattctgacattatttataatctgatgatgtgcgaacatcgatgggagcagagccgcggtttgggcagctggcgcggtcacgatgatccaatcgaacggcccctccaaaacatccccggcgcggatgtgccaacgagcgggctccccaataatttcgtctactctcagacccagccggatgtcgaggccggcggatatccatttcggcagggcggtcatggaaggaaccgcgacgtatcgcgtcgaactgggaaagacgcgccggacagggttgccttccgccaacgaaacaacatcgcccatccacggcttaacgagaccgatgctacaagcgtcattcacgaggttgccgaactcctcatccctcaccgtgaaatattgtgctccgtggtcgaatgcgacatctccgatccgacgcgttgccatccgaccgccgacgcctttgcttttttcaaaaattgttacgtcggcaactttcgcaagcgacttcgcaaccgtgaggcctgccatgcctgccccggcaatcccaactctcaatttggctgccacacataacctccactttaaatgcccgcccttccattttgcgatcgtgatccacgctgcaccgacaatctgcgctatagcctgcgcatgtgtccctgcgctatcagattttcaaccaagctgcgctcggtatcgaacggatgaccatcccatccttgatgtgagaaaccagcgagtaaaacctgatcgtcaggagcggagatctcaccaatgacataggcgatagcgagcaatcccgagctcggaaccacatagctggcaggcgtgaaagcctgaagctccaaatcgacgagttcgtgatatcggcgcggtatcaccgcgaagcgtttgtttgtttcaccggcgaagctggcgaactgttccgtgtagtcgtcacagaagtcgtcgagcgaagggtgttggatcgcaagcagcggctttagctcgacgaatttcgaaatatcgcgaacgcaccatatcgttgcggctcttttgacggcaggattgttgcgccaggtcgttgacccgatcatcactgccgctgggcgaccggtgttgcacacggcaacaatatcggttcgaacgccgccctcgccgaccgaccggcagtcattaaacctgatgacgagatcacagctatctatggcgctcgcgtcatcgttcgaaaatgtgccgttgccaacaatcgcgatggttttcgccattgatctccgctccgtaggacgaagtgtctacgacactctcacgaaacagatcaaaaatttggtgtccgcgtccgctggatttgatccggccacagacgctgatcgtaccatcggagcaaaaaaacagatgagaagttacaatggacgcaatcgttggcgagaccgattttcgagccacctcagaaatgccgacacgggaggaagccgaggccgcggtgcggaccttgatccgctgggccggcgacgatccctcgagagagggtcttatcgatacgccgaggcgcgtggccaaggcctacggtgagctcttttccggctacgacacagcccctgcagacatcctggcgaaaaccttttccgacgttgcgggatacagtgacatggtgattgtcaaggatatcgaattccattctcattgcgagcatcacatggtgccctttcacggcgttgcccacattgcctatttcccggatggcggcgtgcttggactgtcaaaaatggctcgccttgtcgatctcttcgcacgccggctgcagacgcaagaaacgatgacatctcagattgccaaggcgctggacgaaagtctgctgcccagaggcgtggctgtcatggtcgaagccgagcacatgtgcatggcgatgcgcggcattcgaaaacagggtgctagaaccataacgactacgtttaccgggcaattcgaaagttcggtagcggaccagtcgcgctttatgctgctcgtccgcggctgagctactgtcccgattcttaccatgaacaggagcatcgcatggccgacacattgatgaaatctctcgatgcgggatactcggctcttgttatcggggcaaccggcggcatcgggtcggcgatttcgggctgcctcgcatcggaccgaaactgttcaaaacttgttcaactttcgcgaagcattgacggaataaacatcacgaacgaggagacgatccgccttgcggcggatggattgaagtcaacggctttcgacatgatcatctgtgccaccggtgcactgacaatcaatggcataggccccgagaagtctatccggcaagtgtcgcaacaagccatgctcgaccagttcgccgtcaatgccgtcggacccgcactgatactgaaatacttcgtaccgctgcttgccaggaaaaagcgagtgatcttcgcgttcctgtcggcgcgtgttggttcgattggcgacaatcggctcggtggatggatttcctatcgatcgtcgaaagcggcgctcaaccagatcgttcacactgccgcaatcgaggtcaccaggacaaatcaggaatcggtcgtcgttgcagttcatccgggcagtgtcatgacatccttgtcggatccgttctccgccggccatgagagatcagagccagaaagcgcggcttctgcaatactacaggtgctcgacagtcttcagcccgtcaacagcggcggattcttcgcttatgacggcaaaccaatcgtatggtaacgctaagtgacatcaggaagcatggttcggatctagcatccgagaattggggcgactttggctcggcttcgtagcgatgcggcaattggcggtgcgatcggctttgggcagctgttggtgaccccgaaactatctacgagggacaatcagccttaatacagactgagcgaaaaaagccagtcaatggatggcaggtacaaccacatcctgactggattttcgtgcgcgagaccagcgtcgatgaagtgttctggaatgagaaaactagatgaggtattaacgccccatggtcggttgttcgaacggctatatagatgcctgaaaaatttacgacaatactttgaccacggtattcgttatcgcgtttaacggcgatggggaacttctatgtatacgccgcgcgcgcgctccgggcgtaggtctgttgggacttccaggcggataccagatgcgcggagaaacatggcaggaagccggaggaagggaagtgcttgaagagaccggctgtgttatcgaagcgacaggtttgcgactaatatcactttccaccgatcgctatcacaacaacctgatcattgctcgcaccgatgagcctgcagagatcacgacctcgcatgatgatgaaagcttggccgttctgttcctgcgctcggctggcgcacgacaggaatgggcacacccagacctttacgacgcagcggcgtcatccttggtggcaatcgagaccccttgaggccaggatccagccccgtgtccaactcatgcattcttcgtgatcaagtacggaccgaacgacggtagaccgcatacaaccgcaatagctccataggaaaaataagaggaacaaatgctaaaagttgcaccgaatgcgctcccggatgaaaatgggttctttggcaattttgggggtcggttcgtttcggagacactgatgcctttgcttctttccgtcactgaggagtggcaggcagccaaaacgagccaagacttctgggacgagctggaggacctgtcgcgacattatgttggcagaccgagcccgctctactttgccgaaagattgaccgagcggctacaaggcgcgcgcatttacctgaaacgcgatgaactgaaccacactggctctcataaagtaaataactgcctcggccagattctcattgcactgcgcatgggcaaaaagcgcattattgccgagacgggcgctggtcagcacggcgtggccacggcaacgatggcagcacgtttcggccttgagtgcatcatatacatgggtgcgacagatatcgcccgtcaggccccaaacgtcttccgcatgaagctcttaggcgctgaggttcgcgccgtcacctcaggcaatggcacgttgaaggatgccatgaacgaagccttacgggattgggtgtcaaacatcgaggacacctactatctgatcggaaccgcagccggccctcacccctaccccgagatggtcaggaccttgcaatccgtgattggtagggaaacccgaaagcagatcctggagtacgaagggcggctgcccgatctgctggtcgcagccgtcggtggcggctcgaacgcaatcggcttgttctacccttttctgggagatagcggcgtttccctgcgcggcgtagaaccggcgggcaaagggctcgatacgagggaacattgtgcatccctgacgaaaggctcgcccggagttctccacggcaatcgcacctatcttctgcaggatggcgacggacagatcatggagggtcattcgatctccgccggccttgattatccaggtgtcgggcctgagcattcgtggctcagggacgagggccgcgtgacctacgcatcagcgactgatgtcgaagcacttgaggcgtttcaactcctgtcgacggtggaaggcatcattcctgcgctggagccagcgcatgccattgctgaagtcatgaagatagcaccgaccatggaccgcgatgccttgatgatcgtcaatctctgcggccgcggcgataaggacatctttacggtatcaacgcttttgacgcttgagtaggttggcaagcggagtgccgggcgtcttcccatcaggcgtactgaacaggccgtgaacagcctagaaatcggattacagaccgcgaatttcggtttaccgacagggttcgccatgcagagatcgcggcctccaggatcgatgaaccgcaaaaccggtcccaggaacagcatgacgatgttgaagcctaccacccagatgaacatggtctctagtttccgggtcagcggttgatgccggggtcgaggtggcgtgtcgcggcgtgccctatattcgtaaagatccagaaacaccggcaccctccatatcgaagccttgacatcttacggtgaaatctgtccgtcagccaaggacagttggtcgcccccaaacagcggccacggccctgccgagacgtgctggtctgcccttaagtccgaaaagaaaagcgaagtcaggcctagcctaaaagcaacttttgcgtcgaaatgcactcatgacgaaggctgcggtcgccacagaaataggacaagcggtgatgccgaagatgatcaagaaatcggaattgccaaccaaaacctgcgcaacctgcggattgcccttcgcgcggagacgaaagtgggcgaaaaactggaacgatgtcaaattctgttctgaccgctgccgtcaggacaaaaacatgccgaagggcaactaatcaatccagacgtcagctcaccaagacgctcttcaaagccgcaatgctatcgagaatcagtcctaaacttgacagcatgcgggctcaaagagctatgccccttccgaatgccggacctaaatgtttgatccgcactctaagtttctacgtatttagagcatctcagctgctgggaactcaattggattgccggatctcaaaattggatcgaaatgcgttccctctcacacgcgaggcggcactcagccgaatggaagggtttttgcctctggccggtgaggcatacgcgcgcaagcgcaacgtcgatctcggcgcgaacagccatgtgcatgtctcgcgcctatcggcggcactgcggcgtcgactgatcagtgaagaggagttgcttgccgcggtcgtggcgaagcatggcccggatgtcgccgaaaagtttattagcgaggtgttttggcgcacctactggaaaggctggcttgagcaacgaccaggcgtttgggctggttacaaagaggcagtcgagcgcgggaagcaacgacttgaaggcgataggggtttggcaagccgctacaccgatgcttgcgacgggcgcacggggatcgactgctttgatgcgtggtcgcaagagttgcaagccacagaatatctccacaactgggcgcgaatgcagtttgcctcgatctggattttcaccctcggtttgccgtgggagcttggagctgacttcatgctggagcgtctggtcgacggcgatcaggcctccaatacgctgtcatggcgctgggtcgcgggactgcatacgagtggcaaaccttacctcgcaaatgccgaacgcgtacaagcgacgaccggcggccggttcgcgccgattggtctcgcaactcgtgcccttatcccacttgacaatgtttccatccccgatgcttcgccgccgagactgtttgccttaccggacccttcttgcccgacgaccctgttgctgaccgtcgaagatctgtcgttggaaaccttggcgggaatcaacgccctggatattcaagagattgcagtgatgccaggggaaaccgacgcggaccggttgtcactaggcgacgccctggtgcgagcacgacttcgttggcccaatgccgcggtgatagactgggttgatataacatcctggtctgacgttaaggcatcaggaagggtgcaaatcgtcaccggctttgcttcggtggggccaacagcggatcggcttgagaagctaaaaacagaattggcagcgcaaggtatagctcttgccgagcaccggcgggattgggatcggcgcacctggccacactgtcgaaagggtttctttcaccttcgggaaaagattccaagccttctcaatcggaggggtcgccgagtatgaccgaacgcgtgaccgtctggtttgatagcaactgcccgctgtgccgccgcgaaatcgctttgatacgacgtctcgatcgccgtggagcgatccgtttcctcgatgcctgtgaccctgcgaccgcatgccccttaaaccgagcagacattttggctcggttccatgcggaggaggccggcacgctgttgtcgggtgctgcagcttttgctgcaatgtggcgcgccattccggcgctacgcccgcttggcctgatcgccggttggccccccgtcacgccgctgttcgaaacagcctatctcggtttcctccgtcaccggccccgtcttcagaggatgcttcaatgaacgaccgtacccgtcccgtcccgcagggccggctcactcggctcgctggccttggaaaacttgccggtggtattgccgctggcgtccttggcgaaggcctggaaagactggcacggggagaccggccgcatttgtcggacttgcttttgaccccaacaaatgcccgcagggtgaccgatcagctctcaaggatgcgcggggctgccatgaaactcgggcagatgctgtcgctcgatgccggcgacctgttacctgctgagttaaccgtgatactttaccagttgcgggacgcggcccatatgatgccatcaagccagttgcagaagacgctgaattcggcttggggtgccgactggaggcgacatttcgccgaattcgatatcacacccattgccgcggcatcgatcggtcaagtccatcgcggcgttctcacgtctgggcggcaggtcgcggtcaaagtccaatatccaggagtttcggctagtatcgacgccgatatcgacaatgtcgccacgctactacggatgtcaggcctgcttccacgaggtctcgatgtggccccgcttttggctgaggcaaagcgtcagctccacgacgaggcggattatctgcgcgaagcagagcaaatgggtcgttttgggcatttgctggcgggagatagccgttttgtcgttcccgaacccatcgaagccctgcttcgcccgacgatcctgccgatggattttctggtgagcgttccgatcgagacgttggtaagcgccccagccaccgaaggaagaggtgcaacggaagctctttttgatctcgtattgaaagagttgttcgaattcggtctgatgcagacggatccgaactttgccaattatagatggcaaccagacagcggacggattgtgcttctcgatttcggagcaacacggcaagtaccagctcaaaccgtcgaacactatcgtatacttctgcgtgccgggttggcgggagataggacaactgtccgagaagcgcttgtttcgatgggctttgtctcaaaggcgcaggcttccaggcacgcccccgcactcgacgcggtcatcacaactggtctgcgtcacttgaacgcaagccgtgatggattgtttgactttgcggatcgacagtttgtcggaacggttcgcgaccaggccgcacctctcatcgccgatcgctcgagctgggggctgccgccgcctgacaaactcttcatccaaaggaagatcagcggcatggtgcttctgctgacgcggctagaggctcgaatgaatataatggaccgtctcgcggcctatacttgatgcattacgagcacagctgtcgagcaatactgatcgttcactttggtgcgaaaaacgcgtggccgagcaaagagtaagccaaacgcccctcgcatttgtctagcaatccccgctccacgattgaatcatcgtagcactagagaagatcatgcacccatcgtcatcgagaccttagcatccggccgtcccgaacgagaaccatagtgattgcagattcgaggagtttgcgtttggcaaaactgatattgatcctgggcgaccagctttgtccgcagatttcgtcgctggatggcgcgaacaagaatcaggccgtcgtcctaatgtgcgaggtgatggccgaggcggcttatgtcggccaccacaagaagaagatcgccttcattttttcggccatgcgccatttcgccgatgagctgcgggaggcagggtttgcggtccgctataccaaaatcgacgacgccgacaacgggggctctttcacaagcgagctgaagcgagccatcgagagtgtgacgccggaagcgatatgtgtcaccgaacctggcgaatggcgggtgctcgaggagatgaagcggtggtcaaaaagccttggcatgccagtcgagattcgtcccgacagccgctttatctgctctcacgaagaattcgagacctgggctgcgggtcggaaatcgttgacgatggaattcttctatcgcgacatgcgacgcaggaccggcctcttgatggaaggcgaagcgccggtcggtggccgctggaatttcgacgcggaaaaccgcaagtcggccgagcctgacctattgcgaccgcgccatcgccgttttgaagccgacgagatcacgaccgaggtcctcgcgaccgttgcgaagctgtttccggacaatttcggcaagcttgagcgctttggttttgccgtcacacgggcggaagcaaaagaggttctggacggttttatcgccgatttcctggccaacttcggcgaaacgcaggacgcgatgttacaggatgatccattcctcaatcactcgctcctgtccttctacatcaatatcggcttcctcgacgcgtttgccgtctgtcgcgccgcagagcgagcctatttcgacggagccgcgccgctcaacgccgtcgagggcttcatacgccagatcatcggctggcgcgaatatatgcgaggcgtctactggcatgcagggccaggctacgcagagagcaatttcttcgacaacgaaagtcccctaccctccttctactggtccggcaaaaccgacatgaactgcctggcgacggtcatcaacgagacgatcgagaatgcctacgcccaccatatccagcgtttgatgatcaccggcaatttcgcgctgcttgctgggatcgatccaaaggccgtgcatcgctggtatctcggagtttacgccgatgcctatgaatgggtcgagctgccgaatgtcgtcggcatgagccagtttgccgacggtggatttctcgggactaagccctatgcggcaagtggaaactacatcaaccggatgtccaactattgcgggacctgccgcttcgaccccaaaaagcgcattggcgaggatgcctgtccattcaacgcactctattgggatttcctcgcgcgccatcgcagcaagttacggtcaaaccgccggctggcgcagccctatgccacctgggaccggatggatagggcggttcagaacgagctacggcaacaagccagaatattcctggccaatctcaagtaaaattgccatccacttataatggaataacgcaatgaccgcacacccgacgccatccgccgcagcctgacagaatcttcgaaagcaaccatcgctgctacggctatcgcagactgcaggcgtcactggcaaggcagagcgtgacaatctcggaaaaggttgtgcagcgattgatgaaacaggagagtttggtcgtcgccagaccgcggcgactgcgttttggctcgcatatggaagaagttagtcctgcgccggagaacctgatcaaccgggaaaaacggaactgttttatcctggcgactggagaaccatcacgatcgagcagtttgtccgcgaggttgatgcctacatccgatggtacaatgaaaagtgcatcaaattatcattgggatcactcagtcccatctatcgccgatagtcttggcctcagcgtctagatcagtccaagtttttatccgcatccccaccggagatgccctgaatgtaagcctccctgataacagccgtcagcgccttcccggccatgcacgacagagcgcgacatggtgatcggataaaacagcacccaggacaccagctcatagagcagctgttcgagcgacttcggcggtttcatgaagtccaaattttctccccctttgctttctgccctaacgtccttttcttatcagcgacaggtcgtgacgtctcggctgtctttcgttcggcgcacgccatgcaccgaagcggcagccccgcagtccgctgcgacaatctgtccatagagcggacttgaaacataaacattatacgttatattaaactgtatattgtatcagactacggagccagccatgcctgtcatcaagatttgcgagaagctctcggtctcgccacagccgagcgtcgacgatatcaggtccctgcgtgaccagggatttgcgacgcttatcaacaaccgtcctgacgccgaggacgccgcccagccgggaacggaggccgaacgccaggcggccgaacattgcggcctctcctatttcttcgttcccgtcacgctcggcaccattaccgaagcggacgtgcgatcgttccagaaggcgctcgacgcgtccgacggccgggtgttcgcccattgcaagtccggcacgagatccctcagcctgtatctgatcggcgaggttctggacgggcggatggctgccgaagacgtcatcgagttcggccgtgcccacggcttcgacacgagcgcccccgcggcctggctcaagcagcacgcggcacggcgcccgcaagtgaagggcttcttcgacaagcgcacctggagcgtccagtatgtcgtgtccgatcccgataccggcaagtgcgccatcatcgatccggtgctggatttcgacgaaaaggccggagccacagcgaccatcaatgccgacgcgatcctcgactatatcagggagaatgatctgacggtcgagtgggtcctcgacacccacccgcatgccgaccatttctccgcggcccagtatctgaaggagaagaccggtgccagaaccgcgatcggcgaacgcgtcgtggatgtgcagcggctgtggaaggggatctacaactggccagagctcgtcaccgacggctcgcaatgggaccggctcttcgctcacggcgagacattcaaggtcggctgcatagacgccaaggtgatgttctcgccaggccatacgcttgcctcgatcacctatgtggtcggcgacgcggccttcgtccatgacacgctgttcatgcccgacagcggcacggcgcgcgccgactttccgggtggcgacgcccgcatcctttggacgtcgatccaggacatcctcaccctgccggacgagacccgcatcttcaccggacacgactaccagcgaggcggccgtgctccgcgctgggagagcactgtcgccgcgcagaagaagtccaacgcgcatcttgctggcgtgagcgaagaccagttcgtcgcgctgcggacgaaacgtgacaagacgctgccgatgccgaagctgatcctgcacgccctgcaggtgaatattcgcggcggacgtttgccggagcctgaagccaatggcaagcgctacctcaagtttccgctcgacgcattgcagggagccgcatgggaatgagtcccgtatcgaaagctgtagcgaaggcaggcctctcccttgccgagatggcaggccgggccggagaggttgccgatctcctgaagacgttgtcccaccaggcgcggctgatgatcgtgtgcacgctggtcgagggcgagttctcggtcagcgaactcgaggaaaaactcgacttccatcagccgcatctttctcaatatctgacggtgctgcggaactcgggcattgtcgaaacccggcgggagggaaagcagatattctaccgcctgacggaagagaaggcggcccggctcgtcggcgccctctacgatatcttctgtgcggaggaagagacatgaccccctatctccagtctttggcaggcggcatgctgattggcgcatccgcggccatgctcctgcttttgaacggccggattgccggcattagcggcatcgtcgggcgtctggcgcaaggcgtcggactgactaccaatctcgccttcgtgcttggcctcctgatcgggccgttggcgtacctgctggcattcggcgggtggccgatcgtcgagatcaccgcaacctggccgctgatcatcgttgccgggctgctcgttggcttcggctcgcgcatgggctctggttgcaccagcgggcacggcgttctcgggcttgcccgcctgtcgccgagatccatggtggccgtcgccacattcctgtcggccggcgtgatggccgtcgcagttcttcgaggacttggattatgagcagaaacagctaccaattcggcgccgccgttgcctcaggcatcgtcttcggcatcggcttgtcgctctccggcatgctgaaccctgttcgagtccagggcttcctcgacgtcttcggcaactgggatccaagtcttgccttcgtcctcggcggcgccgtcgccgtcgccttcgtcggcgtgcaggtgatgaagcggatgcggcacccggccttcgacgacagcttccatttgcccacgaaccgaaagatcgacgcgccgcttgtcattggttcggcgctcttcggtctcggctgggggattggcggcttgtgccccggtcctgctgtcgcctccctgtcggttggcatcccccagacggtccttttcgtcttggccatgctgatcggcatgaccctttacgaccgggtctggagcacaagaacatgactggttccgtctttgcggccgtcggttccggcgggatcgtcggcttcctgctcggccttctaggcggtggcgggtcgatcctggcgaccccgctcctcctctacgtcgtcggcgtcgcccagccgcatgtcgcgatcgggaccggcgcgctggcggtctcggtgaacgccttcgccaacttcgcgagccacgccatcaaggggcacgtctggtggcggtgcgcagccgtcttctccgcgctaggcgtcctcggcgcgcttgccggctccagcctcggaaaggcgatggacggagaccggctgatcttcctgttcggcatactgatggtcgtggtcggcgctcttatgctcaagcccaggaagccgacaccagtcgaaaatcggccggtcgatctcaggatgtgccttgtcactgcggccgtggcgcttgccgcgggagcggcttccggcttcttcgggatcggcggggggttcctgatcgtcccaggtctgatgcttgccaccggcatgccgatgattaacgcgatcggcacgtcgctcctctcagtcggcgcgttcgggctggcaaccgcgctgaactatgcagcgtccgagctggtggactggtggctagcagccgagttcatcggtggaggcgttgttggcggcctgcttggcatgatgctcgcgacgcggctgagcgcctacaagaacgtcctcaaccgcttgttcggggcgctcatattcatcgtcgccggctatatcttctaccggagcgggggcgccacgtcctcttgaggtcagccctgccaggcgccgggtatggttggcctgaacattcatcacccaacgttgtgatctaatggaccgagatgtgaaatcacgatgtcgtttccggaacagaggtggcggcatcaagtttgaggtcatcaacaatgaagtcatcatgaccttccttggtctcgaagccgaaatgctgggcgcggctgcagttcgcgttcaccaatgttgaaacgctcgaccagctgccttgcgatctccggccctgtcagcccatcggcgaggcgcacgtccagaatggcgatatcggcctcgggagccaactccagagatcgggatccctcagatcgcgcaagtcctgctccgtggtctccgccatgccgatggaggccatggccgatgcgaccgtaaccgtgcccacgaccgtggctattccaaacgcagcgcttgcgaggccgtggatgttcgcccgccgcaactcggcggcggcggtccaatcgggtcaggcggcacgggcagttgccgggccgccaaccgggctcgatcaattgatgacatggatcaccttgcgggccgaaggttcgataataacccgctcgttgttgacgatcgcgtagccatatctcgggttctcgggaaccggcgtgaccacgacagtctctggcaaggcatgaccgacgacgaccttttcctgcacgacgacaggcgctgccggagccggcgcttcgcgaacataagtaacaacctttgccggcggcggcagcgccggacaaacggctgtaattgctgcaggctccgatggcgcagccacgtaggtggcgctggaagtaatgatggcgaaaaagaaatgtacttatagtgattgatcgcaactccattacgaggtcacgttccaactgccagaagtgcggtggtacgctcaaagagctcctgcgccgcctgtggcttcccaaagagatagccttgccccgtttcgcatccgagccattgcagggtttcgacttcagacttgccctcgatcccctccgcgacgacggcgagcttcagcccatgcgccagcgaaacaacagctttgacaatttccagagcaccaccatcggcgttcatgacccgaacgaaagactggtcgattttcagcttatccaaaggaagcgaagccaggtaactcattgacgagtagcccgtgccgaaatcgtcaagtgctatggaaattcccacacctctcaatctgcgcattttctcgatagttggtccgccttgctccaaaaatgtggactcggtcaactcgaggcagagacgcgacgcggccaaaccggaagcggctattgcttcctgaacactcgcctcaacgtcggaccttgcgaactgaataggagacacgttgactgccaccgagatgtcgcctggccaattggctgcctctgtgcatgcttccatcagtgtccagcgccccatttcgcatataagcccggtggactccgcgatcgggatgaattcgagaggcgagataagaccgaattccggatgctgccacctgataagagcctcagcgccgatcagccggccactggcgagttcgatttgtggctggtacagcaagaagaattggctttgtacgagcgcctctcgcatgtcagcttccagacgccgcgctcgcgcttggcgaacggccgaagcgggatcatattgcgcccactggcggccaggcacagagcgtaccaaatccagtgcggactcggcctccctgacgcggctttcagcactggcatcggcgttctgcgcaataccaacccgaataccgacaggtaccgaggtgaacccgacggcgattggatccgtaaacagatcaagaagcctagaagcgacacgttccgcctcttgaaggtccggggaactcaaagcgactgcgaaaatatctcctgccaatctggcaatgaggatctcgcccaactctgaacgcaggtgggtggctatagccctcagcacgtcgtcgccggtatcccgaccgagggtcgcgcagacgccagaaaatcgctcgacgtcaagcaccgcgatttggcgggcctccttggacacatcaaggcgggctgcgaactcgcgacgattgagaagcccagtgagctcatcgtgttcggctaggtatcgcagccgttcatgatatagtcgacgagctgtcacgtctcttaaaatgaggcagccagcaaaaccgtcatcatgttgagtagcgtcagttcgctcgttcggtgagatcgttgtgacgacctcgagatgaacggtcctcgcaccgacctgcgtcgagaactccatggtcgtcgaatgaattttcgaagggtcggcgcaatgtttcgcgatgagcacctgcacggcttcgacaactgtaggatcggcatggttgaaaagatcgttaccgacctttgtattgaatagctgcttggcagactggctcgcttcgataattttgagacgaccgtcgaacgcaatgacaccgtcggaactgtcttgaatgatccgttccatcaaccggcgggtatttttcctctcgacgtttgcgacgacaaggagcatttgcccgaaatcaagccgttcattgagaaacatcagaaaagaaagcgacaggatcaaccacgggacggcggttccaatgatgaaaccgaactccttctgaagaagaaacgcgacgatttcgatcagcaaccccaaagatcccgtaagaattgccaagcttgcgatgccgatcgagcgccaggtcagagcgaccacaatcagcaccgcggaaaaaaacaactcaaggggtagttggttgaaggtgcgaaggtccctattctgcaacaaggtttcggctgcaagaacatggatcattggaccagccaacacgctataaattggaacggggaagatgtccttcagttcagtggccgaggctccaacaacaatcgatctccctctcagcgcatcggcgcccacatgaccgttgagcacgtcagacaaagagaacgtcggaacggtatccggacgtattgaaaaatcaatcaaagacgtcccggtatgcctgtctgatttcgccaaagaagccgcagcggattgcgtggagacggcatcagattcctctccaagcgagaagcgacgaacattgccatccagatccaatgcaacatttgcgaacactggccatgacttctcggccagcaagccaatcggcttggtgatagtggttttaaaacccttagctgtgacttgctggcgaaaaattgggagaaggacacttccaccagctcggtcgagacctgcggcaagcttatcatcctcagacttctgtgaaggtgtgctgaagtcgacgtcgatgaaaatgtcaccagcaccagcagcggaaatccggtcgatcagctcggcgtatacgccacgtggccaaggccagatacctatagcgtccaagctctttttatcgatggctatgaacgcgagcgtcccggtggcactgcggggagccatttgaaatcgcttcgcgacgaagttgtcgttccaattctgcaccgcaaacataccgggcgcgaccaacggcaatgctatcatgctggcaattagagcaagtcgaaggacaacagacccagatctactgcctagcgacctccagagagccttggatttggcaatcacttgttgttgcccctgccgccgttaccatttccactgtttccgtttccggttgcacccccattaccatttccgttcccgttatttccgtttccatttccaccaccactgttgccgttaccaccgttaccattgccgccgccgctgccgttcccgcttgcgccaccgttgccgtttccattcccgttatttcctttgccgtttccaccaccgttgtggccgctgttgccatttccactggtgttgccgccggaaccgccagcgtttccattactgctaccttctccacttgcgttgctgcttttgctatcggacgctcctttacctgcggaagcgcggccggcggttaccggtcctccgctgggcttcacttgcccgattgcaggaatgcgcgcagccgaacgcggaacactaataatggatggttctacttggcccgacactgtcattccttgcttgcgatcaacagccgctttctgacggggaccgatgttggaccgctgtccgctcgcaaatgaggtaacttcaaccagtccccgatccactgaaacggatgccttggacctgccgaccgtcacgtgaaagttggttcccttcacgacggcggcgagaaacggcgtctgaacagtcgtatgaggctggcttctcctttcgatctcgaggtcaatcgaaccaacctgctgaaggatctcagtcttgcgggcgaagaagccagacgttgtgatggaagcgagtgtgtctggttgcaatgagattgcttcgacgcctcgcgtaagctgcagtcgcccgcgaggcccagtcgatagccatgccttgtttggaattacatctccaacatggacgtcggaccaggtcgattgatcgaccgttaccttaacccgacttgtggtcttaacgacaacccagtcatcgctggcagcctgggctggaccggaaaagaaaacaaccaccagaaaaacccaacgaaaaacaaacgacatgcactgccccctagattgataatggtataagggcacgcttcagttaagaatgattatagagaagcagcagtagccctcgtccgctggcgtacagaaccggtcgctgccgcaaccgtggcggcgttgacctacaaccgttgccaggcgagaaactgatagtcgtgcacctttaaatagactgcatttgagttaattgcctcgcagttcttgggggcacgtttgacgattgatgaattgattgacctacaggaggcgggtgggagagctcggttgttaggcctacccatgcatgacaatccctatgttcgtccacagcagctagctaagtcagatcccgatttggttggagaccgcgcgatcaggcaggatgcttggaagttcggttgggaagtggaagatgcagctttaaggatacacatctcacgtcgtttcaacgaggatgccgacgattacgccgatgcgcattcgtttcgggccaggaaaggggcagcgcttgcatttgcaagcagcaacgccttccccccaggtcacgcgctttgcggcgggcttctccgagacctttcacggcgagctctggcggatctattcgctgtcgagcccaaataaacggtcacgattgaggtcaccgaaaagatcgatctcagacaaggtcttgtcgagaatatcctcctcaatctcgcctttccgcctctcgttctcgtgccagtcatcgccatcatcatctgggcttgcgatcaaaacggccttggaagtatctggggactggtttcgcagatcaggacaatgacgtcggacgatttatcgattatcgccaccaggacgttgctgcgggatctcaccccgcttgtgcacccactcaacaatctcctgcgcaagctcggccgctcgctgaccatggagcggcgtttctccgatcttgccgcccatcggctccgtaggccacaggccggcatcaagctgctgctgcagcatcgtcgctccataaatcgaggcgcactgcacccatcgcatccgtgaatgtcagctcggttttcctgtcctatccggcggcataaaggcccatgttttggccgaggacgtcgcccgcccacaacgtcacgagactataaatagcgaggagcgaaggtgtcgtgcgaaggatagcgttacctctccactggcgctgcgtctccacacccagatgagcgcgtgtttctgcgaaggtcacctcgatttgccagcgacggacaaagtaggcaatgatttggcttggctcgagatcagtgtcggtgctcatgcgcgcttgaggttcgcggcggcctaattcgagatgcgcttgccaacatgattcctctcggccgtgtgggcagacctgatcaggtggcagcggcagccctcttccttgccagcgacgagagcagtttcacgacaggtgcggaactagcggtcgactgggggtatggctcaggtctgatccaatattaaaagtgtggagcaggctggccaagttgtcacttactcatgtaggctgccagttcatcgggggttgcgttgggaaaagtctgcttcaagtattccaggaatgccgagacacgggcgctgagcagtcgccgcgatggataaagcgcccatagagcgatctccgaaccctcgacatctccccaatgttgcaaggtcccgtctgccagatcgtggtctaccagcgagatcggcagacgtgcagcgccaacgccggctcgcacagcatcccgaaccataatgagggacgacagcgagaggaccggttcgatccttatctttgcagggcccttagacgtcatgaagttccaggtctcaggactgctggatccacgcacgacggccggggccggtagttcgccgcgagggcgggtaagatcagggctcgccacaacgaccagccggtcacgcaggaaagctcgaccgacaagagtttcgtccggatctggattaacccggatcaccaggtcatatccctcctcgatcatgtcgacggcccggtcttccgcggtgatctccaaccgcacctccggatgtcttaacgcaaagcccgcggcaatcttgcccatggcagtttgcgacagaagaagcggcgcactgatccgcaatcggccgcgcggcgtctcagcgcccgaagcaatcgctgccgccgtttcgtccacttcggtcagcagcgcggctgttcgctcgtaaagagcccgcccttcctcggtaagcttgaggttacgcgcgccacgttcgaacaaacgtagtgacagggaagcctctggctcggttacgcgccgcgacagggtcgccttaggccggccggtggcccgcgcagctctcccgaaccctccatggcgggcaaccaggttaaagtcagcaagagcaatcaggtccatcgtcgttccatctgtgagacggcaagtctaaaatatcggactatcgagccatcagtgaaccatccatattcggcgtgtcaagcatccaaacccggagattcttccatgaccgttctcgttaccggcgccaccggtaatattggcagccaagtcatccagcaccttgtcaatcacggcgctgaagttcgcgccctcgtccgccatccctccaaggcaaatttccctgcaggcgttgacgtcgtgaaaggtgactttctcgacgtcggttcgctgcacagcgcctttgacggagtttccaccctgttcttgctcaacgctgtagcaccggacgaattcacccaggctctgatcgcgcttaatgtggctcgcgcagctggcattgaacgcatcgtctatctgtcggtcattcaccccgatgtttacgtgaacgtgccgcactttgccggcaagttcggcgtcgagcggatgatcgagcagatgagccttcatgccaccatcctacgcccggcctacttcatccaaaacgatctgacgatcaaggacgtcatcacaggctacggcgtctacccgatgcccgtcggcgacaagggactcgccatgattgatacgcgagatatcgcggagatcgccgcccttgagctgttgcgtcgcgagcaggccgcacagccactcccgttcacgcggatcaatctggtcgggcccgcggcgcttaccggaacggaaatcgccgccatctggacggacgtaattggccgtcagatccactacggcggcgatgataccgcggcattcgaggagaacctcaagcagttcatgccagcctggatggcttacgacatgcgcatgatgggcgagcgcttcctgactgacggaatgctgcctgaggacggtgatgtcgagcgcctgacgacgctcctcggccgtccactccgttcttatcgcgcctttgcctcggagaccacggcctctctctgaggaaggccgtcccacatctcgaacgaggaacatcatcatgatttattcgacgcaaccgttacggtgaaccccgaaggcgaaacaaaacctacccgggagcaggtctggaagggcctggagctgaaggtgcgcgatgcgcgcctgtttctcccgcccggtctctgcacacgctgcgatgtcgtggaaacggcttactgaagcttggattccactgctatcgcggtttgcgcgacaaacagcctggcggcccggaagagcgggccgagcaggcgcagttcgacagcgacgagggctgcagatcggcgctgctgtcgacgctgaagcgggcgcgcgaactgctcgcagaaggcaagctctgatcacgcactggctttcaagcggatcctgcgttatgcagactccgcccgtgtcgtgaacgatgcccggcagcacaaggacgaaaccgccaaggttgcgtcgatggtgcgtgaaaatgtcatcgctcagctcgccaacatccagacccacccgtcggtacggttcgccctcgcagaagggcgcgtgaccctccattgctggatttacgacatcgcagcgggcttatcgaagctttcgatggcagcaggggcgccttcgtttcccttgcggacaatcccgaggtccaagccatcaattatcaagccaggcgcgttgcaacgatgaagtttctagggcggaaactgtctcatgccgtaattcaacccatacatgccggcgccgatcactcgtccatcgggaacgcaaaaccagctttcactcgatccatcacgaccatggtcttgaaccctttgatatcgtggttctcatagaagaacctgcgcgtgaaggcttcgtagtcctccatgtccttcgccgttatcaccaagatgaaatcggcatcgcccgtcacgtaatagccgatcatcacttctcgggtggcgcggatcgccgccttgaaacgatcgacgatatcggcccgttcgcgctcaagcgagacaagcacgatcattgtaatcccacgaccggccgccttgggtgagacgatcgatacgtccgcctcgatcaccccttcctcacgcaatcgcttcagacggcgctgacaagccgtcggcgagagattgatgatctttgccaactcttccgaggtcaagcggttgttcttctggacggcatcgaggagtgccctgtcggctcgatcaagcgttagcatgcggaaatcctgcgatcagcaccaatataagcatgattcctgcatccgggctgacatcaatgcaggcaatcgatcatggcgagaggttaggctctttgtaaacatcttattggagcttcgcatgaaaggccttgccaataccgcgctgaaaaacctgaaacgacccgatctgatcgaacgccgggcctttctgaacggcgcgtgggctgcgcgtggagagaccctgtacgtcattgatccggcaaccggtgagcagttcgcagaagtcgcggcttgctcgctcgaagatgccgatgccgccgtcgatgctgcgagaaacgcctttgtcgactggcgtgacaaactccccgttgcacgcggtcggatcctacgcacgtggggcgggctgatgcgcgacaacgcccaggatctcgccatcatcatgacgaccgaacagggcaagccgctggcggagtcactcggcgaaatttcctatgccgcaagtttcctcgaatggtttgccggcgaagccgagcgtgcctatggcgaaacgtttccgagccacctgccaggcagccggctttcggtccagatgcagccgatcggcgttaccgtggcgatcacgccatggaactttccctgcgccatgatcacgcgcaaggcgggcgccgcgctggcggctggctgcaccatgatcgtcaagcctgctcccgaaacgccgctttcagcgctcgccttggcaaaacttgcccaagaggctggaatgccggccggcgtctttcaggttatcacaggcgaagccgcgccgcttgcccgccgcctgctggaacacacggatgtgcgggcgttttccttcaccggttcgacggaagtcgggcgcatcctgctcagccagtcgtcggccaccgtgaagaaagcctcgttggaacttggcggccatgcaccgttcatcctgtttgacgacgccgaattttccaaagccgtaaagggctgtatcggcgccaaattcgccacgtcgggacaggattgcctcgccgccaacaggatatacgtccagcgcggcaaccacgatcggtttgtggatgcctttgcgaaggcgacccgagagcttaaggtcggccacggtcttgaacccgccaccaagatcgggccgatgacgcggccgactgttgcagagaaatgccgtcagcagatcgcccaggcgctctcggccggtgcacgtctcgtgtgcggcgggcaggacagtccactcggtggcaatttcgtaatgccaaccgtgcttgccgacgtcacggacgaaatgctgattgcccgcgaggagaccttcggcccggtcgcagccatactgccgttcgatgacgaagaggaggtactctcccgtgccaatgccaccgaaatggggctggcggcctatctctacaccaacgatcttggcagggcgatgcgcctcaccgatcgacttgaatacggcatgattgccgtcaacacgccgaaattcaccggcgccccgatacccttcggtggctggaagcaatccggccttggtcgcgaaggctcgcgccacggcctcctagaatatctcgaagcaaaatatgtctgcttcggcaatctcgccgcatgaaaggacccgccgttatgaccaccaacgttaaccagatcgccacgatggaccgcaactcggtcctgcatcccttcacgcagctcaaggatttcgcaagcggcaagctcggcgatccgacgatcgtcgaaaccggcaagggcatccggatccaggatgccaacggcacgcagctgatcgacggtttcgccggcctctactgcgtcaatgtcggctatggccgcaccgaggtcgccgaagccatctcgcgccaagcctatcgcctcgcctattaccatacttacgccgctcacacgacggatgagctcgcgatcctctccgatagactggtgagaatggcgccgggcaagatgagcaaggtgttctacggcatgtcgggttccgatgccaacgaaacgcaggcaaagcttgtctggtactacaacaacctgcgcggtaaaccgaacaagaagaagatcatctcccgcgaacgcggctatcacggttgcagcgtggtttccggctcgatgaccggcatgagtttttaccatgaccacatggacctaccgcgtgcgggcattctccacaccggcgtgccgcatcactattggggcgcggaagccggcgagacggaaatcgaattttccaagcgccgtgccgatgagctcgaagccttgatcctgcgcgaagatcccgacacgatcggtgccttcatcgccgagccggtgcttggcaccggcggcatcactcccccgccgcagggctattgggacgaagtgcagaaggtcctgcggaaatacgatatcctgctgatcgcagacgaagtcatcaccggttttgggcgaaccgggtcaatgttcggatcacagcactacggtatcgaacccgatttgatcaccatcgccaaaggcctcacctcggcctacttcccgctatcgggggccatcgtcggcgagaaggtctacaaggtgatggaagaaggggccgaccgcgtcggcgctttctcgcatggttacacctattccggccatccgattggcgcagcagcggccaatgccgttctcgacatcgtggagaaagaggatctaccgggcaatgcgcgcacggtcggcacctatttccaagcgcaactaaaggccagattcgctcaacttccgatcgtcggtgaagtccgcggtgtcggcttgatgggcgccatcgaatttgtggccgaccgggaaaagaaaatacgttttgcacccggccttactgttggcgcgcgaatctcgaaggccgcgcgcagtcgcgggctcattgcccgtgccatgccgcatggcgacatcttgggtttcgcaccaccgcttgtcacgaccaaagaagaagtcgatgagatcgttgccatcgccgaatccgccgtccgctccgtcatggacgaattggttcgtgcaggcgagacgatctgaggaaagcatgattgccggcgagacgaacttcgcccggcaacagcgtctttggattattcccgaggcaatggcggctcgcgatgcataaggcttcaactttctagaggaagcatgcataatgtcatgaaattatcgcctcaaaaacgagacaattcatgcgccgccaagccaatcccttcgctaccgatccgactcccgcgacaaaaccggttatctggcggccgagcgtggcgaagcagaagggcgagaagaagcacgcggctctgaccgaacggatcatcgccgatatcgattccggcattctcaaaccaatggatcggatgccgacgcatcgcgatctggcgcgcgaactcggcctttccgtgcagaccgtcagcctctcttacaaggaggcggaaaggctcggctatctcagcggcgagatcggccgcgggaccttcgtcaaggcgcgcgtgacggaccgcgcgggccggatgatgctcgaccacagccagaacgagatactcgacctttcaatcatccgcgccgtctatctcgatgcgcatgaggacgcttcgcgcgagatttttcgcgagcttgccgagagcgatatcgcgagcttcatgcgcccttgccggccgatcgctgggctcgaccggcatcgcgaaaccgcacggctctggctgcagccgatgggtgtcagcgccggcgtcgagcgcattatcgtgacaaacggggcggcgcacagcatctttctcgcactgagctgcgtcatccgctccggcgatgtcgtgctgtgcgaaaacctcaccgatcacggcatcatagggctctccaatatcctcggcttcagcctgaaaggattgccgaccgatgccgagggtattttgcccgacgcgctggaagccgcctgcgccgtgggaagcgtgagggcgctggtgctcattcccacgctcaacaacccgaccagccatgtcgccggtaccgagcgccggcgcgcgatcgccgaaatcgcgcaacgatacagcatcttcgtcatcgaggatgaggtttacagaccgatgatggaggaggatctgccctcgatcaccgagctgctgcccgatctcggtttcttcgccacaagcttcaccaagaccgtgctgaccggcctgcgggtcggctacctcgtcgtcccgccggcctattccatccgcgccgcctcaatcctgcgtgtatccagctggagcggcacttatctgaccgccgagatcgccacgcgctgggtcgagaatggcacggcgcaggaattgctggcgatacagcgcgatgaggcgcgcgcgcgccaaggcatcgccgccgagatcctcggcgaccatttcgcctccagccacccgctttcgctctgcgcctggctgaaagtgccgcaacactggaccgaagacggcctagtgcgctcgctagccaaccagaatgtcgcggtcacgccgtcggagcctttcatcgccggccccggccatggcggcggcatccgaatttgtctcggcgggcgaatgagccacacgaccctccggaaagcgctaacaacggtgcgccgggccttcgagcaattaccgcccgtctacgacgtcggttccatcgggtgatgtccggttcagtacaatcattgaatcattacaatataataattgacatgattttacttcgctctcaacatgacaatcatgaagagcgagcctagatcaatagagaacaagacgctgccagtcagcctggctgagatctcgcgcgctgccgatcgcatccgtggccgagtgacacgcacgccacttgttcactccgcttctctctccaggcgggctcgccagcccgttcatctgaagctcgagacccaccagccgatcggcgcctttaagctgcgcggcgcgacgaatgccgttctcgcgctcaaccctgcggcccgcgcgcgcggccttgtcaccgcttcgaccggcaatcacggccgcgccgtcgcctatgcggcacgcgcgctcggtatccccgcaacagtctgcatgtcatcgctggtgccggccaacaaggtcgatgccatcagggcgctcggcgccgaaatccttatcgtcggcgtgtcgcaggatgatgcgcaagatgaggtcgagcggctggtcgaaagccgcggcctgacgccgatcccgccgtttgatcatgctgatgtcgttgctggtcagggcacgatcggcctcgaaatcgtcgaggacctgcccgatctcgcaaccgtgcttatccccctttccggcggcggattggcgggcggcatcgcagtcgcggtcaaagcgcttaagccgcgggcgcggatcatcggtatatcgatggaacgtggcgcggcgatgcacgcatcaatcgccgccagcaggcccgttgcggtgcgcgaggaggaaacgctggcggattcgcttggtggcggcatcggcctttcgaaccgggtgaccttcccgctctgccgcgatctgctcgacgacatcgtcctgctgaccgaagacgagatcgccgcaggcattcgccacgcttcgcgcgaagagggcgagatcgtcgagggcgccggagcggtcggcattgccgccattctcgcaggcaaagtggaactcaccggccccactgtcgtcgtcctctcgggtagcaatatcgacgccagggttcaccgggatatcatcgagggaggtgctacatgagccgcattcgcatcctgacggaacgggacctgcgcgccgtcgtcagccttgatatctcggccatcaactacatcgagcaggccttcctggcgctcgcgacgcagccggtcgcgatgccgccgatcctgcggctcgacattcccgaattccgtggtgaagtcgacgtcaagatggcctatgtgccgggttttgattgcttcgcgatcaaggtcagccccggtttcttcgacaaccccaagctcggtctgccgagcctcaacgggttgatgatcctgttcagcgttaacacgggcttggttgaagccctgcttctcgacaacggttacctcactgacgtgcgcaccgccgcagccggtgcggtcgccgcccggcatctgtcgcgcgaggacgcctcagtcgccacgatcttcggtgccggcatgcaggcccggctgcagctccaggcgctgatgctggtgcgcccgatcaaatcagcgcgcatctgggcgcgtgatcaagccaaggcggcgaagctcgcggccgaatgcgcgaggcaattcggcatcgccgttgccgccctccccgatccgcgcgaggcgacacgcggcagcgacatcgtcgtcaccaccacaccgaccgaaaagcccatcctgatggccgattggctggaacccggccagcatctgacggcgatgggttcggattccgaacacaagaacgagattgatcccgccgtcttcgtccgcgccacctacattgccgaccgcctgtcgcagacccgcatcgttggcgagttgcaccacgcgatcgaggcgggctccgcgacgccacaacagcaattcgccgagctcggtgcggttatcgccggcacggcgaagggccgcgtcagcgccggggacataacctttgccgacctgaccgggaccggcgttcaggacaccgcgatcgccaatctggccgtaagtcgtgcagcagcggcgggcagcggtcaggtaatcgagaacaagagagaaatgggagatgccgcatgagcgtgacgctgaactttacgcgtgaggaatatgccgagcgcctgtccaaaacccgtcacgccatggaaaaggccgggatcgatctgctcgtcgtcaccgacccgtccaacatgcactggctcaccggctacgatggctggtccttctatgtgcatcaatgcgtgctggtgccgccatccggcgagccgatctggtatggccgcaagcaggatgccaacggcgccaggcgcaccgcttacctgaaccacgacaatatcatcggctacccggacaactatgtgcaatcgaccgagcgacacccgatggatttgctctcgcagatcttcgacgagcacaaatggtcgggcctcactttcggcgtcgagatggacaactactacttctcggcggcagcctacgcctcgctgcagaagaacctgccgaatgcccgcttcaaggacgcagccggcctcgtgaactggcagcgtgctgtcaagagcccgaccgaactcgactatatgcgcaaggccggcaggatcgtcgaactgatgcacaagcgcatcgtcgatgtcgtcgaacccggcatgcgcaaatgcgatctcgtcgccgagatctatgacgcgggcatcaggggaacgccggatttcggcggcgactatccggcaatcgtgccgcttcttccgtcgggcgccgatgcttccgcgccccacctcacctgggacgacaaaccgatgcgcatcggcgagggcacgttcttcgagatcgccggcgcctacaagcgttatcactgcccgctgtcgcgcaccgtctttctcggcaagccgacgaaggcctttctcgatgccgaaaaggcgaccctcgaaggcatggaagccggtcttgccgcggccaaaccgggcaacaggtgcgaggacatcgcaaacgccttctttgcggtgcttaagaaatacgggatcatcaaggacaaccgcaccggttacccgatcgggctctcctatccaccggactggggcgagcgcaccatgagcctgcgccccggcgaccggacggaactgaagaccggcatgaccttccacttcatgaccggtctctggcttgaggatatggggctggagatcaccgagagcatcgcgatcacagaaaccggcgtcgaatgcctgtcgaatgtgcctcgacagcttttcgtgaaggggtgatgcaatgctgaccagcgccgcgctccgtccctcgccgatcaacccttccgtcgatttcgacgccaagggtgtgcagcacggacatctgcgcctgccctatagccgcgatgacagcgcctggggctcggtgatgatcccgatatgcgtcattgccaatggcgaaggcccgaccgcgctcctgaccggggccaatcacggcgacgagtatgaggggccggcggcactcttcgaactggcacagacgcttgatcccgccgagattaacggacgcgtcatcatcgtcccggcgctcaattatcccgcgtttcgtgctggaacccggacctcgccgatcgatcggggaaacctgaaccgcagctttccgggccgtccggatggcacggtgacggagaagatcgccgactacgtcacgcgccatgtgataccactcgccgatatcgtgctcgacttccattccggcggcaggacactggatttcctgccctatgcagcggcccacgagctaccggacaaagaccaggaagcgcgctgcttcgacgccgtcgccgccttcgcggcaccgttttcgatgaagatgctggagatcgatgctgtcggcatgctcgatacgaccgtcgaggaaatgggcaaggtcttcgtcaccaccgaacttggcggtgccgggacggccacggcgcggtcgatcgagattgcccgcaagggcagcctcaacttgctgcggcatgccgggattctttcgggtgaaccgaatgccgcgcccactcgttggttggatatgccatcgagcgactgcttcacctttgcccaggatgagggactgatcgccttcgccgccgatctcggcgacccggtcaggagaggcgaggtcatcgcccgcgtctaccctgtcggcaaaaccggcattgcgccaatcgagtaccgcgccgcgatggatggcgtgctcgcggctcgccacgtacccggcctgatcaaggccggcgactgcctttccgtgatcgcgacgttcacggaggagacctaaccgaagagaccccgcgagatccgaaaacggacagcaaaaccctaaccagaggagaattcgcatgccaatcaagacaatcgccggcctttccgcccttgcactgatgatgggcgtaacgtctgccagcgcactgacactcgaggaggtcaagcagcagggttacatccgcgccgcgaccgccaatgaagtgccctattcctacatgcagcccgacggcacctctgccggcatcggtcccgatgtcgctagcgcggtgctgaaatccatggggatcgaggagatcaactggacggtgacgccgttcggcacgctgatcccaggcctcaaggcaaagcgtttcgactttgccgcggccgagcagaacatctcgccggagcgctgcaagcaggtcgccttcacggagccgaactcgtcctatggcgaaggcctgctcgttaagaagggcaatccgaagggcttgaagacctatgccgacatcgccaaggaccagtcgctgacggtggccgtagtctccggtgccaacaatgtcgacttcctgcgcgccgtcggtgtcaaggatgagcagatcgtcttcattccggccaatgccgatgctatcccgaccgtgcagagccgcaccgacgcctatgccgcgaccgaattgactgtcgcggcgctcgccaagggccaggcccaggtcgagcaggtcgcgccgttcacggacccgatcgtcaaggatgcgccggttcgcaattatggtggctttgccttccgcccggaagacaaggaactgcgcgacgccttcaacgccgccctcgtcaagttccgcaagacggatgagtacaaggcgatcctcaccaaatacggcctgtccgaacagagtatcgctgctgccgccgacaagaaggtcgatgacctctgcgccggcaagtaacggcagaaggcgcccgatcccatcggtcgggcgccgctcctaacgatcaggagacttccgtatgaactggacagcctacctgccgatgctctggcatggcgcattcatcacgatgacgatcacgctggcgtccattgccgtcggcgcgatgctcgcttttatcttcggcatcctgcgcgtcgagggaggaccgatcctctcggctgtcgcgctgtgttacacagaggtgttccgcgggacctcgctcttcgttcagcttttctggttttactacgcgctgccgctcgtcggcctgagcttcgatccgatcaccaccggcatcttggtgctggcggcccacgccggcggatatggcgccgagatcgtgcgcggggcgctgtcatccgtttccgtgcagcagctggaggccgcccgcgccttgaatttcagccgcttccagacgctgtttcgcatctcgctgccgcaggcgatcgtggagatgatgccggccttcggcaatctggcgatcgagaccctcaagctctcctcgctcgtgtcgctgatatcgattgccgatctcactttcgcggcccagtcgatccgcaacatcacgctggatagcgcgagcatctattcgatcacgctcctctgctacttcgccatgtcgctggtgctgacggtggcgatccggctgatcgagcgtttcgcgcggcgaggacatgccttcccgcagatgccccgttcgtgaggatatgaccacatgatgtatggatacgaatgggatacgacgacctggctcacctatacaagctcgatcctgccgatcatcctgatcggcttgaccgtgacgttgaaggcagcggcggcaggctttgccatcgcgctcgtgctcggcctcgtcttcgcgctgctgcgccgcagccgcgtgatcgcgatctcctggaccaccgccttcatcgttgagttcctgcgcgacacgccgcttctggtgcagctgttctttctctattacgtgctgcccgacttcggcgtcgtgcttccggccttcctgacgggcgccatcgcccttggcctgcaatatgccgcctacacatccgaggtctatcgcggcggcatcgaggccgtggcccgcggccagtgggaagcggcaacggcgctcaatctgagccgcatgcaggcctaccgcgacattatcattccgcaggccatcccgcggatcgtccccgccatgggcaattatctcgtcgccatgatcaaggaaacgccggtcctttccgttgtcaccgtcatggaaatgatgggccttgccaacatgatcggcgaacgcaccttcgaatatctcgtgccgctgacgcttgtcggcctgatcttcctcctcctgacgctgatctgctcggccggtctccaccggctgcagaaagctcttccgaaagcaggaatccccttgcgatgactgagaacaacaatccgcccatcatcgaattttccaacgtcgccaagcgcttcggccacctgacggtgctcgacgacttcaatttcattgtccggaagggcgaaaaggtgacgctgatcggaccgtccgggtcgggaaaatcgaccgtcctgcgcatcctgatgacgctcgaaccgtttcaggatgggaagctgacgttacagaacatgtcttatcatgaaccgaatggcaaaggccctttcaaggccacggaaagccatctgcgccagatccgcaaccatgttgggatggtgttccagagcttcaaccttttccctcacatgacagtcctgcgcaatgtcgtcgaggcgccgctgcgggtgctcggtattgcccgcgcagaagcggaggcgcgcgcgctacaacttcttgacatggtgggtcttgccgacaagaaggacttttatccctcgcagctctccggcggtcagcagcagcgcgtggcgatcgcccgtgcgctggcgatgcgcccgcgggtgcttctcttcgatgagccgacatcggcgctcgatccgcaactcgttggcgaagtgctctcggtgatccgcggccttgcccatgagcacgacctaacgatgctgctcgtcacccatgaaatgcgttttgctcgggaagtttcggatcgggtctgctttttcgacaagggccggatctgcgaacagggagcgcccgaggagatattcggcgcgccccaaagggagcggacgcgcgaatttctgtcatcggttctaggataacacggaaacccaacgggcggagggcagaagcgaattttcggcatgacaacctaacttgtctgcctgacaatgtcccgttgaagatgactaggtaccgcgcagcccaaggcaattatcagacgtctgtgcacaggcagatgatggccgacggtggcgggagaacaggttcatgtagggcggatcgtcttgatgtgacgctacagtacgtgggcaaaaatttggttgcttagaggatggcgcgcgtagcgttgacggttcataaccggtacaggtgaaggctggcgtcgccacggccgctttgcgctttcattcggtcggttgactggcacatgagatgatcaagagccgagcgcatactggcaccttcgggagcgcaagcgcggcggtcagacctccacggcgcttccaatgtcaggcggtgcgcccagggctgaagcaccacctttccagtggtctggcgaccttcaagcaggcggtgcgcttcagcggcccgcgacaatgggagtaccgtgccgacctggatcttgacctgaccgctcgccacgaagccaatcagttcaccaatggccgccatcagcaagtcagcatttgccaggtcggcaccaatgtagaagccgaccacgctatggttcatcgacgtaagccgccaggggtcaaccagcgcggtctttccactggaccggccggaaaaatcttgaggccgaacgatgccattacatcaagtgcctggttcagggtgtcgccctccgccgtctcgagaccgatgtcgacgcctcgcccatcgctgatcaggcgaacatcgtcagcctagtctggcttggtgtaatcgaccgagacatccgcaaccagtgcttcggccttcgcgcgcttctccaagtgaaggcgacgaggtccgcgcggtgaagcgtaccggtcgcaactccattttcgcccatgagctccgcagtaatttccttcgtctcgtggtggtcgagacgatgccggagtggggtatattcagcgccgagacattgaaatctgtcggcaacaccatgaccttgccgccgacttttcagggtcatcggcgagcagttcgagaatggccttggttttcgcgtcagccttgatctcccagcgccaggaaacgggtttacccgcgctgttagttccgcgctcgaaaccgagcttaaaattatcttcaagcgtgtgataggcgtcggtatccgctagcatgtggagctgtatgacgacatcgacatcgccggtacctgcgtgtgcgagaatctccggcggcttcttctcgatcagataacgcggcgtgagcccgccaatcaagaagatcgagacacgccatggccgaggtccccgtataagcgtgaccaggacgcgttcacagtcctccgatgggaagaattcggcggtgacggcttgctacgttgaccccaccatgacgtccccgcgtaaaacgtggaggtgattggcagcgatgttctcatatagaaccggtcccaagctcctgggtgcctgtgagatcaatgcctagcttcccggaactcagcccggcgctttcggtagcgcgacggtcgccgacaggcctcctccggaccgggtcttgagcgtgacgcggccgccataaagcttcgaaacctcattggctatcgacaagccaaaaccgtctcccggtacagtctcatctaggcgcacacctgccttcccaacttcagtgatgtcctccctttcgatgccaggaccatcatcctcgatcacaatagcaatctcgccgttttcggccttgccaaggatccagacagacgatctcgcccacttgaatgcattgtcaacaattgctccaacgatctcgtcaacgtcctccggcgcacacgcaacgctcagagtctgctccacgtcgatcgtggtcgcgagcttcctgtccacgtagagcttttgcatcatggctacgatatcatcgatattctggcggagctgagtggtgggagccaagcccgctgccgacactcctgctctggctctccccaggtggtgcttgatctgacggtcgatccggtccacctgtagccgtgcctcgccagtcgcgtcggcgttatcgttcagtgcgaggtagagacttgctacaggtgtctttaggccatgtgccatgttcgcgaactgaagcctcgtctccgcgagccgcttttggttctgatcgaccaaacgattgatttccccgacgagtggccgcagctcttccgcctggggctgatcgagccctcctgcctggccggaggaaacgtcggcaaccttctcggccagtgttctgagcggcgcgagaccgtaacgcacctgaagcaggataccagcgataagaagacctccaaggacaaacatcgccggaacgagaagcaacagcgatcgcataattggcctgataagagccgagcgcggcgcggtggcaatgatctcgacctgctctccgtctgcgaacgactgcgaggtgaggaaatgcagcgcttgccctcggttgccccgcccgtctccagcgcgtggggttgcagtcatcaggctccgccattcgaatggtttaggagggttcgacaggcttgctccggcaagggaacgagatgtcacccgctttccagcagcagtcacctgccaataccacccggagccggggcgatcgaatggagggccgtcgagattgccgtcgacgccaagcgaaccgtctgcgccgatcttcatggcgttcctgacagcttcgatttggacacttagccgctggtcgacctgatccctcactacattggcaacgatcagcccaaggacagcggacgcaacaaccaacgctgcagtggcatagaccagggagaaggcgatgagacgccccgcgatcgtcgttggctttcgtatccgcgacgaaatcatttcgcgcctgccgtcagcatgtagccacgtccacgttccgtctcgatcctgtcggtgccaatcttccgtcgaagccgcgcaatgatgacttcgatcgagttggaatcaacctcggcgtcgccctcgtatacccgttcaatcagttctctccggtcaacgatgacctccttgcggagcatcaggcaagaaagcaccctccactcgaacgcggtcagcttcaacggtagtcctgcgagttcgaatgttccgagttgggcatcgaacgataagtcgccgcaggtgatgacggacgccgcatggcctgccgagcgtcgaacgagcgcgcgcagtcgaaggacgagttcctcgatccggaacggcttcgtcaggaaatcgtccgcccctgccttgaacgccgccaccttgtccggccagccgtcacgggctgtcagcacgagcacagggagtgtacgcccggcatcgcgccacgatttcaaaaccgtgaccccgtcaatcttcggaaggccaagatccaagacggacgcgtcgaatatttccgtgagcccggcatgctctccgtcttcgccgtttcgggccacatcaacgacgaagttctccaatcgcaggctggctgcaattcggtgggaaagatcagcatcatcctcgacaagaagtattctcataggcacccgagtgttctgtgtgatctgactatgaactagggcgcactcgcttaactgaaactgaaccgcgccattcagtctgtgtgtggaccgacggtcgtatcgtcagcctgtcgaaaccaacaggagacaccgcgatgtccatcgaagacaacactccggaagctcaccccgaccacaagccccgcccccgcaaacggcctacgaaacactttgccgcgttcgccatctcggctttcgccgtcctggcagtcggcgcggcaggcggtgcaacagcgatgaaactcaccagaccaagcatcgaaatggcgccacttgcccccgtcgtaatcaccagcctcaaagatggtcgcagcatcgtaacgatcaagggcaatgttgcagaagtctatggcaacaagttcatcgtgcaggacgacagcggccgagcgctgatcgagaccggatctgccggggatgatgggaagctcgtcgcggtcggcgaacccgtcagcgtccagggcaggtttgaagacggatttgtacacgcgagctatatcgtgcatggagatgggaagaccgacgcgctacgccccccgcccggccctcggccgcatggtggccccatggaagaggccttgcgtcatatgaagccgtagtcggctctcgtgctcagcactgccttaattaacaagtttgggggagccggagaggacgtttcttttaacgtggtctccagcttccacattgagggccgttagcctgtcaatcgttgtctctggtaggccgtcgccttcctacagtcacatggcgggaccgaacgctgacgcgctcgataaattgcatcggtggctcaggtctaagggagtagcgcgtatgattgaaactaaagtcgatggcgcgcgttactcggcaactttcacggagaagcgggcatgatcaagcatctggttcaaccgcttgccgcgacgggcaagctcacctctgcccagtcggacgactatttcgcgaattcgctttgacgctgacgattgccataatcatatccgcgctattttcgcttgcgctgacgccgatgctggcctcgaaattcattcgcccgatcgagcgatcgcaacaaggatggttctaccgcgcgggcgagctgtttttcgagagactgacggcggcctatatcagatcactaattcccttcatccgtcatcgcctgctgacgcttgccttgttcatcgccacccttgccacgacagcgtatctatttttcatcgttcccaagggctttttccccgaacaggataccggtttcatcggcggattgtctcaggcttcgcccgacatttcttttgccgaaatggcaaagctggaggagcgcgtcagcgccatcatcatgaaagatcccgcggtctattcggtcttcatggatatcggcggcggcaatggtggcaatgctctcaaccagggccacgtcaacattactctgaaaccgcttgtagagcgcgatgcgagcgccaagcaagtcattgaccggcctgggaccgcgctcaacgcccagcagggcatcaagctcttcatgcaatccgcccaggatatcaatatcggcgcgcggccggccaagacccaataccagttcaccctgcaggacggcgatatcgccgagcttggcgaatgggcgtcgaaaataacgagccgacttcaaagccccgaggaatcgcacgacgtcggcagtgatcagcaggcgaaggcgcccaacctatcgatcaaaatcgatcgcgcggccgccaccctttacggcgtgcttccctcaacgatcgacgacacgctttatgacgcctttgggcaacgtcaggtggcgtcttattcgacccagaccgacacgttccgggtcatcctcgaggtccttccgagcctgcagcgcgacatcgcgacatcgcgacattggaccggctctcagttcgagcaagcaacggcacgccggtaccgctttccgtcgtcgctaaatggtcgacagatggcgcttcacccgtctccatctctcaccaggatcagtccccatccgtcacgatctcgttcaatcttgcttccaatgtcgctctgggagaggccacaaaggcaatcgaagccgcggtggccgaaatgcatccgccggcctcgttacagacgagttcttcgggaagcgccaaagcattcaaggattccctcggaaccgtgccgctcctgatccttgcatcactcatcgtcgtctacatcattcttggcgttctctatgaaagcctgatccacccgctcaccatcctctccacactcccatccgctggtctcggagctttgctcgctctgaatgtggcggggtttgattttgggctggttgcgatgattggagtcattctgctgatcgggatcgtcaaaaagaatggcatcatgctcgttgattttcccatacagtccgagcgggatgactttaggagtgaggaggcaattgtccaagcggcggaaatgcgttttcgaccgatcctcatgaccacgatggcggccctgcttggggggcggccgcttgccattgggcatggagcgggatctgaactgaggcagccgctcggatacgcaattgtcggcggcctgctggtcagccaattgcttaccctttatacgaccccggtcatttacctcttgcttgacggcctccgccgaacgaacaagccccaccccgaccagacccccgtccagaaagcggcctgaaactcgaatcggaaacaagatgaacccatcagtctatacgtttgcaatcgcggccgcgacggcagctggtgtcgtcgtgcgccctttccggcttcccgaggcgatatgggctgtcgcaggcgcaggcttgatccttgcgcttggaattcttacgcctgaggaggtttggacgggcgtcgcgaaggggaccgacgtctatcttttcctgatcgggatgatgttgctctcagaacttgcgcgcaaggaaggcctgttcggttgggttgcggctatcgccacttcttgcgcggacggttctccaaaaaagctgttcttcctagtttacggagttggcatcatcgtcacggcactgttgtctaatgacgcgacggcggtagtgctgacgcccgcagtgtacgccgcctgccgtgcggccaaggtcgacaaccctctcccctatctgctgatctgcgcgtttatcgccaacgtcgcaagcttcgtcttgccgatctcgaatccggcgaacctggttattttcgccggcggcgagatgccatcgctgggtcgctggatgacaacgttccttgcgccttcgatcggagcgatcatcacgacatttgtggccctttaccttacccagcgtaaggcgctctcttgcgagacgttggccatcgacattccccgccccgatctttcgctaccggctctcgtcgccggcgcagggctggtcattaccgccatcgtccttctgggggcgtcctgcgcccatctggacttgggcattcccaccttcattgccggcacaatcacaacgctgattgttctttccgttgtccggcaaagtccaattcacatcatccgtgagattagttggagtgttataccactggtcgcgggtctgtttgttgtcgtggaggccatcaaccagacaggcgtaacagcgatgctcgcacagacgttacaaaccctgagtgctcattccgaaacacgagcaattgcagtcgcaggggttagcgtggcgttgttatcgaatgtcgtcaacaaccttcccgcggggctgttcgccggtagtgccgttggc

SEQ ID NO: 29 - DNA, 56187 bp, Rhizobium matallidurans
  source 1..56187: mol_type = genomic DNA
ccgcgtgtcgcgataggcggtccaccaggcaaccgtcgagacgtcgccatcaggcttggccgcgccctcattgaacttcgccggaagaggcatctccgggggaacatggtccgggccactcacacagcccgtgaggacggctaatccggcaagaattgctaaacggcgcatgaaatctccctcggcgaagaccgcagggcggttcgctaacaaactattgtcgcttatggttaatttttgctttccatggcgtgccgcaacttcgcatggcaaacttcgcgaggaaggggtttggcgcgcccggaaggagtttgcaaagcgcttggcggcaagagttcgccaactatcgaatggcagctatgcaccaatatcattgaattcaaatcaataggatgttatctaattccatgacaacgaacatgaagaaaagctggaccgagttcgcaccgttgctgatgatctgcgggcgtggatggcgccgtgcgctgaacgccgctttgaccgaccacaagctttccgacgccagcgccgcgccgctcatcgcgctgatacgccacggcgaccggattccgcagaacgtgctggccgaacgggtcggggtggaaggcccgacgctggtgcgcgtgctcgacagtctggagaatgacggcctgatctgccgggtcgccgacgaggcggaccgcaggatcaagctggtgcagcttaccggggagggcacagcggtcgccgagcgcgccgagcgttgcgcggcacagttgcgagagcagatccttggcgatctcgaccccgaccaggtcgatgccgcgctcgaggttttgcgcgcggtcgcggatagaaccgcggcgataaccggaacgcaggataatgacgactagccataatacgatcgccccaagcatctgggatgtcgttttctccatcaagaccttcatcgcggcgatgctggcgcttctgatcgcgctctgcttcgatctgacgaacccgtactgggcggtcggcacggtctatatcgtggcgcacccactgtcgggcgcgagcacgtcgaaggcgatctatcgcctgatcggcaccgctgtcggtggcgcgatgaccatcatccttgtgcccaatctcgtcgacgcgcccgagctcttgacgctggcgatcgccttgtggatggccttctgtctcggcgtcagcctgctcgaccgcacaccgcgcagctattccttcatgctggccggctacacgaccgcgctcaccggttttccgatcgtcgcgagcccggagacggcctttacctatcccgtcgcccggatcgaggaaatcgcgctcggcatcatctgcgcggcgctcgtcagccgcctggtctttccgcgccatgccgggccggtgctcgcggcgcgcatcgacagctgggttcgcgatgtggctgcccttgccatcagcacgctcaacagcaacgacaagggcgacgcgctgcaggccgccgcccgcaagcttgcggccgacgccgtcgatctgcacagcttcaccacgcatgtcgcctacgacacatcggggctgcgcgacatggtcggacgcacgcgaacgctgcagcagcgcatggtcgccatgctgcccgtcgtctccggcctcgccgatcttctgaatgccttccgcaaggcgaccgacggcaagctcaccgcatcggccaacgaactgatcggccgcgtgaccgaacttctgtccaacgaggcctcctatggcgagaccgagcggcaggaaatcctggcgctgatggaaaagaccgagaaggagggtcgcgagcagcaggaatggaacggcctcctcgcccataatttcacctcccgcctgcgcgacctcctgcaaatctggagcgactgcctggcgctgcgcgaagacattgaaaccggcggccgtcgcgagttgcgctggcagcggttcggcacactcttcgaccgcgcgccgatccaccgcgactacggcatggcgatccattcgggtcttgccgtgatgctggcgaccttcgtcgcgtcggcactctggatactcaccggctggtcgcagggcggtgccgccgccatgatggcgggcgtgctctgctgcatcttcgcgacgatggacgatccggcgccgatgatgctgaagttcgtctatgtgtcgatcttcacggtcgccgtggccttcgtcttccagttcgggctgatgccgctcgttcacggctacctgtcgctcgccgcggccctgggcctggtgctcattccggccggcatgctgatgtcgaagccttcgctgatgatctatggcctgggtttcggcgtcaactttccgaacatgcttgccctgcaggaccgcttgaacctcgacctgagctcgttcctcaattccaacatagcgatggtggtcggcctggccattgcctgcggcaccacggtgctggtgcgctcggtcggtgccgagtggacggcctatcgcgtgctgcgcgccggctgggcggatatcgtcgccgttgcgcgcaagtcggatgcgcccgatttcgcaaggctgctctaccggatggtggatcgcttcggtctggtcgctccgcggctggcgcaggtccccgtcgaatccgccgtcgcccagaacgatctattgggcgatctgcgcaatggcctgaacacgatggagctgcagcgccaccggcagctgctgacccgggacagccgcgccgatgtcgacgaggttctgtcgggaattgccggcttctatcggcaaaagcagaaacatggccacgcccagccgggcgaaggcctgttgaaggcaatcgatacgtcgctggtcgaccttatcaaccaaagcccgtcatcggccgtcgagggcgcacgccgggccatcacgtcgcttcgctacaatctgtatccggatgcgcgcttcgtgatgcccgacacgaccattcaggccggcgtacaacaagcaaaggagaacgcggcatgagaccggaactcgatctttacggcgtcttcatacccacgctggcggcaatcgccgttgcggccttcttcctcaactccatcctgcggcggatcctggctttcatcggattctatcgtctcgtgtggcatcggccactcttcgatacggccatgtatttctgcctgctcggcgcgctggcgctgtctttgaacaaggtgtcattatgaaatcgcttcttgcttattccggccgtttcctgctgaccggcgtcgtcgtggcgctggcgggcgtgctgggctggcagctctgggactactatatgaacgatccatggacgcgtgacggcaaggtccgcgccgatgtcgttcatctggcttccgacgtgtccggcatcgtcagcgaagtcgacgcggtcgacaaccagacggtcaagaagggcgacgtgatcttccgtatcgaccaggcgcggttcgcgctggcgctgcgccaggccgaagcgcagatggagagcagcaaggccgcgctggacatggcccgcagcgacctcgatctctaccgcaggctcggcgacaactcggttacccgccagaaaatccagcaggcgcagaccacggtccagcaggacgaggcgacctacaatcaggccgtcatcagccgcgacaccgcgcagctcaatctcgaccgctcggtcgtgcgcgcacccgtcaacggcgtgctcaccaacttctcgatgcgtcccggcaattacgtgacggctggaagtgccgtgacggcgctgatcgataccgattcctattacatttccggctatttcgaggaaaacaagctcgatcgcatcaaggtcggcgatgaggcgctggtctatctgatgggcagcgaaaagccgctcaagggtcgcgtcagcggcgtcgccagcggcatagaggaccgcgaacgcagcgataccggcgcgcagcttgccaatgtcacgccgaccttcacctgggttcgtctggcgcagcgcgtgccggtgcgggtgacgctcgacggaacgcccggcggaacggcgctggtggccggacgcacggcgagcgtgacgatcatcgagtgaataacccagcaatcgcgtgaggcagccggttcggcgcctccgtcgcgatccaacacgttacggcccacgggtccttcaagggccgtgacgaggcatgcgcggattagcccgtccgcgcatgcctgaccttttcatgcttcttccgcacgctatgccggcgccgtcgtcgttgaaattagacctcgcaaagcaattcgccagacactaaaacagcggatcaatgaagcggctctcccttcgaggcgaggcaagccggtttatgtcgacaatggggagttttcgatggatctttcagactggaagggcgtggagcgccctcagcgtgtcgctctcgagggacgctatgtcaggctcgagccgctcgacgccggccgccacgggcgcgacctgcttgcttcggcgcagcagcccggcgccgacgaccgcttccgctatctcttcgaggacacccccgccgacatggcagcgttcaccgcatggctggagaaggccgaggcatcgcccgatccgatgttcttcgccgtcatcgacaagcgtaccggccgggccgagggtcgccaggcgctgatgcgcatcgatgcggcgcatggcgtgatcgagatcggcaacatattgtggggaccggcgatcgcgcgctcacgggtcaccaccgaggcgctctttctcttcgcgaaactggccttcgacacgctcggctaccgccgtttcgagtggaagtgcaacaatctgaacgaaccgtcgaagaaggccgccgaacgtttcggcttcaccttcgagggcgtgttccgccagcatatggtcgccaagggcaagaaccgcgatacggcttggttcgcgatgatcgatgccgactggccaaggctgaaacagggctacgaggcatggctcgatcccgacaatttcgacgatgccgggcagcagaagcgcaagctgcgcttcgattgagctcctgctgatgacttcgagcgcttgttgaacgatcttccgacgtgattccgcaagtcgcggcaatgcattgatattatgaagctattttcgaggtatgcggcggccgggcatgctggccgccgcacccctatcagacggcgatgcgccgcgcggccttgtcggaggccttgcgatcgtcgccgtgctcttcgatgatttgctgggcgtcctcgaccgaaatgcggtgcttcttggcaagcgtgaccgcatcatagggtccttcggacgcagccgtgtgtttggcttgagccatcctttgtctccaatcgattgtgtgggtttgcgcggaaggcggatcgcgatcggtcgcgaggtctgctccgtggtccagacatatatggggattgggaagcctgcgttccagagagggctacttggagcgaatttgattgacctgtcatggaacccatcgagtcccgcaggtgtttcctgccaaaggagactttgcatggaaaaaaagactggcgtgaaaaagaagtcgaagccgcccatcgtcgaagtcgcggtcacatccgaggaagggcgcgtggccgtcggtatcatgaatgccgagcaggcgcttgagcttgccgatagcgtcgatgtcgaggtgtcgcatcccgatcacgaggcgggggagaccgatgtcttcatcccggctgaaaagctgcgcgagcatcccgccgtcgccgccgcgtcggccccgtcgatgaagacgagcggggccacgggggccaggaaaggcaagccggaagggctcgagacggaagccgcgttgcgggagcacctggccgccctggaggccgacgcgcccgccgaagacgacccgcagaggccgccggccgactatgtgctcgacaatgacggtgtgaacgccgatgacatgctcgacgaggagggatcgctacgacgacttcaggaagaggtcgacaatctgcgcgcccggcttcacgtcatccgcgagcaggcgggaaccgtcgtcagcgccaatgccagatgggcggatgcgagcgcgcatgaacagctcggcgcctatccatgggcaaagcttgccggcgccatggccttgaccttcgtggcgaccagactgcttcggcgcttgccgctcggcgcggtggccaccgcggccctgccgctggcggcggccgagatgcgccggcgctacgaccggtagtgatgccgcttcgcgatcctgaccagcgtgccggtcagggtcgaagcagcggaacatgcggggcggcggtttcggggatgtggccggagaggcgtggatcgtcgaccacctcgaccaggaagccatagggcttgaagcccgccttctggtagaaggagatggcggaggggtgatcgaagtggcaggtgtgcagccagaagcggttgatcggtcgcgcccatgcgcgggccaccgcctgcgtgatcaaaagcttgccggcgccctggccgatcgcatcggcaacgaggccgcagaaaaccagctcgcattcgccgggctggcgaaagtcgagttccagcagcccgatgcggcggccttcctctgacaggatcacgtaaatctcgacatccggatgatggatgattgccctgagttcctcgtcgtccatgatcagccgcgacagccagagccagttctcgcccacctcgcgaaacagccggcgatagtcgtcgagcgcggccgcccgccagcgttcgaaacgcagggcgcccgatgcgggcacgttcacctccggcctttcacgcatttccaggcaggtcacgacattggcgagcttgcctcgagggagttcggaatagcccatcggcagcggcggattggtcttcataaaagcgtccttggtcttcgtcggtcgatgcctgccggcgccggtggggccacgaaatacggcccaggcgacctggcccggacgatgcggcccaggcggtgcggcccgggcggtgcggtccggctctggccatgcgatccgatcccggctcaaacgatctcgcattgccgccgggcggttggcaatactattttcagcgatccacttcccttcctcgggctttcggccttacactcttttccatctcccgctggatgaatgctcatgctgtgcaacaggacagtatcgctcacatcattcgtggtcgccgccacggtcgccagccaggcgctcccgctattggcgcaggagaagggagcgcgcctcacgccgccgggcccgatggtttccgtccgcgatgtcatcaagcccaacccgcacgacggcgcgctcgcagcgcccgtattatccgatacctggtggatgcggatggcggaaggccaagagcgcgtgcggccgaccacgcgcggcggcggcgatggccgcgcggcagcggatggcaagacgccgtgaagggactgaaagcttggggactgtttttgagagaaagtggcgcacccgacaggattcgaacctgtgacctttggaatcggaatccaacactctatccagctgagctacgggtgcatgcctaaggcggtttgaatcgcctgtccgatgcgaggttcttagcctagctcagcgcgtccttcaatctctctctgtcgaatttcttcggcatgtcgcgctgcggcggtttctttttttcggtgccggcttaaagcttctctattcattcatgtttctttgggggatctgatgagtgaggtgagggatttggcgcgccgggcgcgcatggcggggctttccggcaattttctgcagggacacgagattctagaccaggcacaggcgttggtgagcgacgatcctgttgggcaggcgtcgattgcgatcgagcgggggcggctgcacaactccgcgggatcgcggcaggacgcgcttccttactttctcaaagcctgggaactggcggagggcgccggcgatcataaccttgccgtcgacgcagcccacatgatggcgatcgcatccgatctggcggaagccgagcattggacgcaggtggggcttgcgcgcgttgccgccggcgacgcgagtgcgcattgggccggcatgctgcaccacaatctcggctggacatatttcgaggccgagcgtttcgatgacgcgcttgcctgctttcgtcgtgacgaggcggtgcgtgaggcggcgggcacggcccagacgctgaaggttgcgcggtacgcggtgatccgcacccttcgcgccttgcgccgctacgcagaggcaatcgcgcttggcgagcaggtggtcgcgcttgccgatgccgccaacgatcaggcgcccttcgtctgcgaggagcttgccgagtgccatgccgcgagcggcaatgccgaggcgagcagggcgtttgccaggcgtgcccatgcccttcttgccggcaatcccgctatgtctcgcgacgagccggcaaggcttgagcggttggcggctttggccggtattgcgccgccctgaaagtaaaagcccgccggactttcggtcgacgggccttctgttgctacttttctggcgatcagacctgcatggcgccggggccggggatggccttgggcgggaccttgccgaggatgatcatgccgagcacttcgtccttggtcacgtcctcggtgcgggcgtggcccaccacctggccgttcttcatgacggagacgcggtcggcgaggtcgaagacgtcgtggatgtcgtggctgatcaggaagatgccgatgccttccttcttcagctgcttgatcagctcgccgacctgcgccgtctcctgcggaccgagcgccgccgtcggctcgtccatgatcaggatgcgggcgttgaagaggatggcgcgggcgatcgccaccgattgccgctggccgcccgagagcgccttcaccggctccttgaagcggcggaagttggggttgaggcggcccatcacctcgcgcgccgaggcctccatggcgacgtcgtcgagcgtgccccacttggtgcggatctcgcggccgagatagaggttggcggcggcgtcgacgttgtcggcgaccgcgagcgtctggtagatcgtctcgatgccgtatttcttggcgtcgcgcgggttcctgatatcggcgggttcgccctcgatcaggatctcgccgctatcgcgcttgtaggcgcccgacaggatcttgatgagcgtcgactttcccgcgccgttgtggccgagaagggcgacgacttcgccggggtagagatcgaccgaggcattgtccacggcgtggatgccgccaaacgagatcgagatgttcttcagttccacgagaggagtgttcgggcttggggaagtgcgttgatcagtcatatccaggctcctcttacttcgaccgcgagcgatagacggtgtcgagccagacggccacgacgagaaccgcgcccacgacgacgttctgtatgggggtatcgacgtttgcgagacccatgcccgactgcagcgactgcatgacgagcgcgccgagcatggcgccggcgatcgtgccggtgccgccggcaagcgacgtgccgccgatgacggccgccgcgatggtgtagagttcgtaggtcgtcccttgcgagttggcggcggcgttgaggcgggccgtcgagatcgccgcggccacggctgccaaaaagcccatcaacgcgaagatgcgcaccgcgacccagcgggtcttgatgccggcgagttcggccgcttccgggttgccgccgatcgcgaagacatagcggccgaagcgcaggcgggtggcgatgaaggtcatgacgatgccgacgagaacggcgatcagcaccggcacggcgatgccgtaggagatgaagagaccggtctccggccaggcgatgccgttggcttcggcgtatttcctggcgatcgccaccggccagtaatagatggtcgagacccagatggcgccgagcaccagggcgcagccgaggacggccaggaagtattcggcccagagcggccggcgcgggaagttgaagcgcttgcgctggtggcgcgagccgatgatgccgacgatgatcagcacgcaggcgaccagcccgatgatccagctccaggtggcgccgacggagccttcggcgccgccgcccatgatgcggaaggtggtgtcgaggggggcgaccgtctggcctgaggtgacgtaccaggcaaggccgcgccaggcgaggaagccgccgagcgtgacgatgaacgaggggacacccatgaaggcgatgatgacgccctggaagaggccgatcagcgttccggcgatcaggccgcagacgagcgtgatcagccaggtccaggaattgtcgaagccgagatattgcggcaggaacttcgcctggacgacgcccatgatcatggcgacgaggccgagcatcgagccgatcgacagatcgatgttgcgggtgacgatgacgagaaccatgccggtcgcgaggaccgcgatctcggtggtctgcaccgagaggttccagaggttgcgcggcgtgagaaacagcccgccggtgtagagatggaagccgatccagatgaccagcagcgccgcgaccatgccgagcaggcgcgtgtcgatctcggtggcgcgcaggaagcgcgtgaaagcgttaccctccgccgagcgcggatggctcgatgaggattgcatgatgtttgccatgggtttgccgtttcccccattgtttgggctctggcgcgggcgcccgaaagcccttgccgaggtgccctgttcttcaaatcgaccaccgagagacttccgaagcggccgcgcaaggggcggcactggtccggcagggaatcaaagcgttcgcggtgcgttgcgaggcggggagcgcttcaggagggctccagccgcatccggcgccgcggcgagatcgccacggcgccggtgtgtcggttcagctggcgaggatcagtcgcaagccttgacgctgccggccttcacgccctggcaagcttcggccttggtgatccagcccgcgtcgatgacgacgttcaggttgtccttggtgatggcctgcggcttcaggaagatcgactgcatcttcaccttcttcggaccgccttcgaaggacgcgacgccttcgatcttgtccatggtcgtgccgccggcgaggtcgagcgcgatttcagcggcgcgcttgccgagttcgcggctatccttccagacggaaaccgtctgtgtgccgagcgcgatgcggttgagtgccgccttgtcggcgtcctggccggagaccggaacggtgcctgccatgccctgcgcgtcgagagcagcaaccgcgccaccggccgtgccatcgttggaagcaacaacggcgtcgaccttgttgttgttggcggtcaggaactgttccatgttgcgctgggcattctgcggcagccagccgtcggtgtaggcttccccgacgttcttgatcttgcccgcgtcaacggcagccttcaggacttccatctggccggcgaacaggaagtccgcgttcggatcggaagacgagcccttgatgaagacgtagttgccttcgggcttgaccttgaatacgccttcagcctgcaggcggccgacttccttgttgtcgaaggtgatgtagaaggcagccgggttttcgatcaggcggtcgtagccgacaacaggaatgccttcagcggcggccttttcgatggccgggccgatggcgtccgaatcctgagcgagaacgatgagggcgttggcgccctgcgagatcagcgattcaacgtcggtcagctgctttgcggcggacgactgggcgtcggcggagatgtacttggcgcccttggcttcgagtgccttcttgatggcggcttcgtcggtcttccaacgttcttcctggaagttcgaccacgacacgccgaccacgaggtcggctgccattgcggcggtatgcaccgatacgaggatggcagcacctgccatcagcttcaaaacatgcttcataatatcctcccgaatagaatgcggccagccccagccagtggttcctccggccgccgcgatgtgctgtcgggaaaggttttcattattttctcgacagtcgagaaattaagtgtcagagattttttcaactgtcaacaccgcactacttgtgaatgatctctcacgtggaggttgttggagatacggtgtgaacgaggggtggaatgcacgcgggaatagggcggccttcatgctgaccagatcgagcacggaactggtgcgacagcgcaacagcgtgctggtgcttgccgcgttgaggcgtcatggcgcgctttcccataccgaaatagctgatttcaccggactttcctccgccacgatttcggcgatcacggccgatctggagaagggcgaggtgatcgagaaatccgagcagcaggcggcgagcggcagggggcggccgcgcgtgcagtttcgcccgaggcgcgactgcggctatctgatcgtcgtcatcatctcgtccgatggcgtacaatattccctggtggattacgccggcacgctgatcgaccggttcagcgaggagcgatcgcacgaccctcatggcgcggcacgattcgcggatgctgtcggcgaggggctggagcggctgctatcgcgctcgcgcctgtcgcggaccaagatcaagctgatctcgatcagcagcaaggggctggtgagctccgacgatgccgtgctcctgtggtcgccgatcttcggcagcgagcggatcgatttcgaggcggcgttgagggcctcatggcaggccaaaatcattctcgacaacgagacgctgctggtcgccgcggcgcttggcgcgcgcgaggatgcgggcaatccggaggggctgcggtcgctggcggcgctgtcgctcgggcacagcatcgggctcgggatcgtccgcaacgcggggccggcggagcgggagatctcggcgccgaatttcgggcacatgctgcatgtggccaatggcgggctttgccgatgcgggagcagggggtgcatcgaagcctatgccggtttctacgcgatcctgcgcatggccttcgaggtgcccgacgatacgatcccggcgaagttcgtgcccgttggcgagctggacaaaatcgcggcgcgggcgcgccagggtcaccggatgtcggccttcgccttccggcaggcgggcgtggccctcggcaacgggctgtcgcggcttctcagcctcaccgagaggatgccggtcgcgatcaccgggcccggcacccgctattacgatctgctcaggcccggcatcgaggaggggcttgcccagtcgcacatggtcaggatgcagggcatgcccgagctgcgcgtcgtgttcgacgagccgctcttggtgttcgagggtcaccttaaccgggcgctgtcggtcatcgacggcgatatcgtccaggccgggttccacatctaagccgcggtcgcccggcgccgggtgagcatcttgccgatcttctgtccctgcatctcgatgcatctgtggcctatcgccgacagcgcgtagacgatcggcacggtgatggcgagtgagagcagaaatctctggaagtcgctgatatcgttgccaaaggtcttgatgaggtaggcgatgaccggctgcatgatcagcaggtggagaagataagcgccgaaggagagttcgccgagctcgtggaagaagcggttgcccatgaaatcggaaatccggttgagcggccttgccagcaggcgcggcaggtgcgcgtggaagatcagcgcgaagaaggcgacgaccagcccgacccgcacgacctcgcgcggcaccgtcatgccgccaccgatcggtagggccacgaagaccaccgccaggaggaagtggacgaaggctctcctgctcgaaacattgagcgcgccggcaagcagcatgccggcgatgaagatgtgcatcttcagcggcaggaaggacggcatcgggaaattgatgccggcaaggcgcagcccgatcgagatcgcgacgcctgtcgcgacgatgccgatactgccgcgcagccatcccagcctgtggatgaagagcatcaggaacggcagaacggcatagaactgcatttccaggctgatgctccagtccggcagcggtgttcggaaggcgtgcgccggcgacaggccgaacaggaagctcacatgcatcatcacattctcgaagctgccgtcgaggtagcgctcgggcagctgcggcgtgacctggaggaagcggtcgatcaccatgcggctgtcgaacatgacggggccgagcgcgatggcgatcgccagcatcacgtaatagagcggggcgatgcgaaagaaccggcgcgtccagaaattcgaccatgtcgagatctccgaccagggctccttctcctggcgcagctgatagtgaaacaccatcagaaagccggagagcatgatgaagagatcgacaccgagatcggggtcgccgatcagcggcacacgccagccggtcagcagcattgcgtggccgaccagcacccataacgcggcgatgccgcgcaagccatcgagactgccaattcgcccggaagcgcccgaaatatccgccatctattgatcacccggttcgtcgaaggtgccatgaatggcgcgaaaattgaggtaatccaatggtgattcagatactgcgagcgttgtaacacacgtcagacgtgcggaaaatctgctaataagcaaacgcgccaacgcacttgcgcggttcgcggcaaggaccgctttgtgatcgaagcaggcaaatgttacaggcgaattcgaagggttggggtcgcagcggcgatgttgccggaggcaaaaacgagaaatggccgggtcgggccccggccatctcatgcacggctttcggtcgggagaaaaccgtcagccgatcttgatcagcttgccttccttgacggactggacggccgcgtcggcgagcaccagggccgcgaggccatcggcgcccgagggggagatcctggcgcccttctcgatggcggcgatgaagctcgagatctcgttggcataggcttcggtgtagcgggtcatgaagaaatcgtgcagcggcgggcgggtgtagccttcgccattggcgacttcgatcgacacggcgcgctggttttcggccgagaccatgcccttggagccgtgcacctcgatgcgctggtcgtagccgtaggtggcgcggcgggagttggagatgatcgcctgcttgcccgacctagtctgcaggatgaccgagacgctgtcgtaatcgcccgcttcgccgatcgccttgtcgacgaggacggcggccgttgccgtgacggcgaccggctcttcgccgagcaggaagcgggccatgtcgaagtcatggatcgtcatgtcgcggaagatgccgccggaacgcttgatgtagtcgaccggcggggcacccggatcgcgcgaggtgatcgtcaccatctcgacgtcgccgatacgaccgtcgtcgatcgcgccgcgcacggccatgaagtgcgggtcgaagcggcggttgaagccgaccatcagcttgcccttggtctcttccaccaccttgatgcaggccttgacgcgctcgacggagagatcgacgggcttttcgcagaagatcgccttgcctgatcgggcgaagcgctcgatcaggtcggcatgggtgtcggtcggcgtgcagatgacgacggcgtcgatatcgctggcggcttcgatcgcctcgatggtgcggacgtcgcagccataggccgatgcgatggcgttggcggcttcgggaaaggcgtcggcgacggcaaccagccttgcattggcgttggcgctgaccgccttggcgtgaaccttgccgatacgaccggcaccaagaagaccaaatctgactgtcatgacttcctcccttgaattcggctcgcccggatgcggaatgaatggaccgaatttatctcattgtggaattttcattccatcttatcaccgtttcgtcaagtccgcggctctttcacatttgaagaaaccatcttaaagacgtgtaacaatttatatgtgggaatgagatgcaactgatcgatccaagccacccggcctaccgcgctttgtgggtgcgcgttctcatcgtcgtggtctgccttagctggacagggatcgaggccatatggggcgatcccttctgggcggttctggcagccggcgccggcgtctatgcggcctacatgcttctgtggcgctacaaggcgccggaccctgcggcggaaaaggcgccagagcccgtggcgacgcgggacgatcgcgagaacgacgcgtaatcagcgcctggcgcttcgcgtcttgcgacggatcgcttcgtcgatcaggagattggcgatcgtcatgcgcttggtggcgttgtcgcgaaaaagcgggtggacgcgatcggggtgattcgtcttggcgaagctccgccgcttgtcgctcaggccctggatgctgtcctgcgccgaaatggcgagttccccggcgatgtccgatagcgcggtgcgggcgagatgcggcggcatgaccggctccggctccggctcgatttcggggaccggggcggcggcttgctcgggtggttgctcgggcggcggcgtgtcgcaggtcgcctcgcggaaggtttcgaattccagattgtcgaaataggcctggccgggccgcgccgacgggacggacacgccctgcatgacgtcgaaggcgaggccggtcgtgaagcccggcacgcggtgcgagacggaaacggcttcgcgggcggtgtcgccatcctcttccttcaggcgatcgaggaccgactggaacaccgattgtccgaacagcatgaagcctcccttgcgcgaaagggcatatgacgcgaccaacatggcgcggggcttgcgaggcctcattggtcaggccggcggcgaggggcagccgccagcgatcaggcgccggctttcctgctctcggccagcaccaggtcgtagagcatccgggcgctggggggcaaggcgcgctccctcgcggtgatcaggctgtagggcctgacgttgatctcgaaatcgatcggcaatatccgcacatcggaggcgcgcgagcgctgcgtcgccaggaagttggcgacgtcgacggcaatcggagcgatggcgttcgtctcgcagatgatggcgcaggtgagcagcagcgacgaggtgttgacgacattgtcgggcacggcgacgccgcgcgacaggaagagatcctcgatcgtgcgtcgcagcaacgtgccgggcggctggaagacccagtcgtaacccgtcaggtcggtcaggctggccacgcccttctgaaggagcggatggccgctgcgcacgatcaggcaggcgcgctcgacgccgatctcctgaacctcgaagagcctggggttgaggtcgtcggggatacggctgatgacgaagtcgtggcgggcggccagaagctcgcgggccagcacgttgctggtctcgacctggatggtgacctcgatgccgggaagcgccgtgcggatttccttgatggcgggtacgacgaggctcatggcgggcgccgtcaccgcgccgatgaagaccgatccgcccttgccggatttcagctccgcgatctcgcggtttgcctccctgagttccagcatgatcttgcgcgcacgtcttgcgagtgcctcgccgaaggtggtgagcaccacgccgcgggcgacgcgctcatagagggctgtcttaacgatcgtctccatttccgacagcattcgcgacgcggcgggctgagaaatgttaagagcctcggcggcggccgaaatctgcccgctatcttcgattgcgacgagcatccgcaggtgattcagcttgaggcccgcccgcagaaggccgtcatccccaaaaatgtccgtctgtatatccacgttttctaatgccacatgccctgaattgctcgacatggttgcagcctccccactgctctccatcaaaagtaatactttttaacgatataccaaatttgttatgccttttgccagttattctatttgacagttataggaatccataccagtttgccgccgtgtgctggttggcactcaacacgtgtgagagcgtggaggagacctacttcgtttctcgctatctgaagtattatccaatacgaaacccgccacagttcggggtgggcgaggagtcgcccgcgcatttattaacttagggagagagagatgaaatccattatctcgttgatggcagcggccgctttcggcgttgcttcgttcgtcatgccggctgtcgccgctgacaagggtctcgttggcatcgccatgccgaccaagtcgtccgctcgctggatcgacgacggcaacaacatcgtcaagcagctccaggaagccggttacacgaccgacctgcagtatgccgacgacgacattccgaaccagctttcgcagatcgaaaacatggtcacgaagggcgccaaggttctcgtcatcgcttcgatcgacggcacaacgctttcggacgtgctgcagaaggccgccgatgcaggcatcaaggtcatcgcatatgaccgcctgatccgcgattcgggcaatgtcagctactacgcaaccttcgacaacttccaggtcggcgttcttcaggccggcacgatcgtcgacaagctcggcctcaaggacggcaagggcccgttcaacatcgaactgttcggcggttcgcctgacgacaacaacgccttcttcttctacgatggcgcaatgtcggtcctgcagccttacatcgacagcggcaagctcgtcgtgaagtccggccagaccggcatggacaaggtcggcacgctgcgttgggacccggcaacggcccaggcccgcatggacaacctgctctcggctaactacaccgacgcaaaggtcgacgccgttctgtcgccttacgatggtctgtccatcggcatcatctcctcgctcaagggcgtaggctatggttccggcgaccagccgctcccggtcgtttccggccaggactcggaagttccttccgtcaagtcgatcatcgcaggcgagcagtattccacgatcttcaaggatacccgcgaactggcgaaggttaccgttgccatggtcgatgccgtcatgtccggcaaggagcctgaggtcaacgacaccaagacctacgacaacggcgtaaaggtcgttccgtcctacctgctgaagccggttgccgtcaccaaggacaactacaagaccgtcctcgtcgacagcggctactacaaagaagaccagctgaagtaatctgacgaacgccggaatccgctcgcgcggattccggtttccgatttttgaacgcctggccgatcttgcggccacggcgctggattatgatcatggaaaatacactcctcgaaatgcggaacatcaccaagacgttcccgggtgtgaaggcgctcgagaacgtgaacctgaaggttcgccaaggtgagattcacgcagttgtgggggaaaacggggccggcaagtccaccctgatgaaggttctttccggtgtctatccctcgggcacctatgacggggaaatcttctacgacggcaacgtccgcaacttcaaagtcctgaaggactccgaagagatcggcatcgtcatcattcaccaggaactggcgctcgtaccgctgctgtcgatcggggaaaacatcttcctcggcaacgagaatgcgaagagcggcgtcatcagctgggaaaccaccttcaaccgcacgaagcagctgctcgccaaggtgggcctgcgcgaatctccgaacacgctcgtgaccgacatcggcgtcggcaagcagcagctcgtcgaaatcgccaaggccctgtccaagagcgtcaagctgctcattctcgacgagccgacggcttcgctgaacgaaagcgattccgatgcgctgctgaacctcctgatggagttccgcaagcagggcatcacgtcgatcatcatctcgcacaagctcaacgagatccgcaaggtcgccgaccagatcacggttctgcgcgacggcatgaccgtcaagacgatggactgtcataaggaagagatcagcgaggacaccatcatccgaaacatggtgggccgcgatctcgaggaccgctatccgccgcgttcggtgccgatcggcgaaaccatcttcgaagtgaagaactggaacgtcttccaccagcagcatcgcgaccgtcaggtcctgcacgatatcaacgtcaacgtccgcaagggcgaggtcgtcggcatcgccggtctcatgggagccgggcgcacggaattcgcgatgagcgtgttcggcaaggcctatggccacaagatcagcggcgaggtctatgtcgacggcaagcaggtggacaccaccaccgtgcgcaaggcgatcgatgccggccttgcctatgtgacggaagaccgcaagcatctcggtctcgtgctcgccgacaacatcatgcacaacacgtcgctggccaatctggcgggcatttcgagcggtaccgtcatcgacggcatcaaggagagcaaggtcgcgaccgactaccggtcgaagctgcgcatccgctcttcgggcatctaccaggagacggtcaatctctcgggcggcaaccagcagaaggtggttctgtccaagtggctgttctccgatcccgacgtgcttatcctcgacgagccgacccgcggcatcgacgtgggtgcaaaatatgaaatttatactatcatcaaccagcttgctgccgatggaaaaggcgttctgatgatctcgtcggaaatgccggaactgcttggcaactgcgaccgcatctatgtgatgaacgaaggtcgcatcgtcgctgaactgccgaagggcgaagcgagccaagaaaccatcatgcgcgccatcatgcgctctggggagaagaaacaatgactcctgtcaacccgaccagtcacgaggaaagcaacgtcgtttccgtcgtcgattacatccgcggcaacattcgtgaatacggcatgctcatcgcgctcgtcgcgatcatggtgttcttccagttctacaccggcggcatcctgttcagaccggtcaacctgaccaacctcgttctccagaactcgttcatcgtcatcatggcgctcggcatgctgctggtcatcgtggcggggcatatcgatctgtcggtcggctccatcgtcgcctttgtcggcgcgctggcggcgattttcaccgtctcctggggtatgaacttctggctcgcggcctttctctgcctcgtcatcggcggcatgatcggcgccgcgcagggctatttcatcgcctatcaccggattccgtcgttcatcgtgacgctggccggcatgctggtgtttcgcggcctgacgctgaccgttctcggcggcaagaacatcggtccgttcccgagggaattccaggtcatgtccaccggcttcctgccgggcggcatggtcgatctcttcggcgtgccgacgcagctcacctcgctggtgctcagcgtcatcctgccggtcatcctgttctacctcgcctggcgccgccgcaaggtgaacgagagccatggcatcgacgtcgagccgatgggcttcttcatcgcccagaacgtcatcatttcgctggcgatcgtggccctcggctacctgctgtcgacctatcgcggcctgccgaacgttctcatcgtcatgctggtgctgatcgctgcatacagcttcgtcacccgtcgcacgacgatcggccgccgcatctacgcgatgggcggtaacgagaaggccaccaagctttcgggtatcaacaccgaacgcctgagcttcttcaccttcgtcaacatgggcgttctcgccggtctcgccggcatgatcgtggcgctccgcctgaactcggcgactccgaaggccggcgtcggcttcgagctcgacgtcatcgcggcgtgcttcatcggcggtgcctcggcatccggcggcgttggcaagatcaccggtgccgtcatcggcgcgttcatcatgggcgtcatgaacaacggcatgtcgatcgtcggtctcggcatcgatttccagcagatggtcaagggtctcgtgctgctcgcagccgtcttcttcgacgtctacaacaagaacaagggctaagcgcttcggcgctgcccacctattcgcagtgacttgaattcgcagtgacatgaacgtgtcatccggctccctcgggagccggaacggcggagcacattccgcgcaatcgaaaaaaggatgaagaccgtgcttatttcgcagatcaagggttcgaacggagagatcgtcgtcgccgtgcgcgagccgggcggtaccgcgaaagccgtcaagaacgccggcagcgtctacgcgctcgccatggaagccgcgaatggcggcaagtcgctggcatcggtgatcgaggcgcatggcctgggcgatgccgtcgatctcgagaaggcttacgcggaaggccgctttctgccgccgatgacgcatccggatgccgcgcacctgcatctgacgggcaccggcctgacgcatctcggctcggccgcgacgcgtgacagcatgcacaagaagacctccgaggccgccgaagagacgctgacggactcgatgaagatgttcaagatgggcctcgagaacggcaagccgaaggccggcgaaaagggcgtccagcccgagtggttctacaagggcaacggccatggcgcggcagctcccggcgccgcactcgtctccccgtccttcgcgctcgacggcggcgaagagcccgagatggccggcatctacgtgatttcagaggacggcacgccgttccgcatcggtttcgcgctctccaacgagttttccgaccacgtcaccgagcgccagaactatctctacctcgcgcactccaagctgcgtccggcaagcttcggtcccgagatccgcatcggtgcggcgccggacgatatccgcggtacctcgcgcatcaagcgcggcgataaggtgatcttcgaaaagcccttcctttcgggcgaggcgaacatgtcgcacaccttcgccaacctcgaataccaccacttcaagtacggcctgttccgcgcgcccggcgacgtgcacgtgcacatgttcggcacggcgacgctgtcgttcgccgaaggcatcaagacggaagagggcgacgtgttcgagatcgaggtcgccgacttcggcctgccgctgcgcaatccgctgaagatcgacgccgaagaagagatcgtcgtcaagcagctctgatttctcatggcccggcgcattggcggtcgggccactctttcataagcggtaaaggaggcttgcagggcccatgaccatttatcagaacctgatcgccggcgaatggatcggctcggacgcaaccaagaacatcaacccgtcggatacgaacgaagtcgtcggcctctatgccgatggttcggcggaagacacgaagaacgcgatcgccgccgccaagtccgcattcccggcctggtcgcgctccggcatctgggaacgccacgtcatcctgaagaaggccggcgacgagatcatggcccgcaaggacgagctcggcgcgctgcttgcccgcgaagagggcaagacgcttcccgaagccatcggcgagaccatccgcgcctcgcagatcttcgaattcttcgcgggcgaagcgctgcgccttgccggcgaaaccatcccctcggtgcgtccgaacatcggcgttgagatcacccgtgacccgctcggcgtcatcggcatcatcacgccctggaacttcccgatcgccatcccggcctggaagatcgcgccggcgctctgctacggcaacaccatcgtgttcaagccggccgagctggttccggcctgctcctgggcgatcgtcgatattctccaccgtgccggcttgccgaagggcgtcctgaacctcgtcatgggcaagggctcggtcgtcggccaggccatgctcgacagcccggatgtcgccggcatcaccttcaccggctccaccggcactggcaagcgcgtcgccgccgcttcgctcgagcataaccgcaagttccagctggaaatgggcggcaagaacccgatggtcgtcctcgacgatgccgacctcaacgtcgccgtcgaagctgccgccaattccggcttcttctccaccggccagcgctgcacggcctcgtcgcgcctgatcgtcaccgagggcatccacgacaagttcgtggcggcgctgacggccaagctcgaaacgctcgtggtcgacaacgccatgaaatcgggtacgcatatcggccccgtggtcgacgagaagcagctcaagaccgacaccgactatatcgagatcggcaaaaaggaaggcgccaagctcgccttcggcggcgagcttctgaagcgcgacacgcccggcttctacctgcagccgacgctgtttaccgaagccaccaaccagatgcgcatctcccgcgaggagatcttcggtccggtcgtctcggtcatccgcgtcaaggattacgaagaggcgctggcgaccgccaacgacacgccgttcggcctgtcctccggcatcgcgacgaccagcctcaagcatgcgacgcacttcaagcgcaacgccgaagccggcatggtgatggtcaacctgccgacggcgggtgtcgatttccacgttccgttcggcggccgcaagggctcgtcctacggtccgcgcgagcagggcaagtacgccgccgaattctacacatccgtcaagaccagctacacgctggcctgacgtcaaaatagcgatacgggccgtcgcgagaacggctcggcatccctcagaaggcagaagacaatgtttaaaaaagcggaatggccgcgcaagcttcgatcgcaggaatggtacggcggcaccagccgtgacgtcatctatcaccgtggctggatgaagaaccagggttacccgcacgacctgttcgacggacgcccggtgatcggcattctcaacacctggtcggacatgacgccgtgcaacggccatctgcgcgaactggcggagaaggtgaaggcgggcatctgggaggccggcggcttcccgatggaagtgccggtgttctcggcttccgaaaacaccttccgcccgaccgccatgatgtaccgcaacctcgcggcactggcgatcgaggaaaccattcgcggccagccgatggacggctgcgtgctgatggtcggctgcgacaagaccacgccgtcgctgataatggcggccgcctccgtcgacctgccgtcgatcgtcgtcaccggcggcccgatgctgaacggctacttccgtggcgagcgcgtcggttccggcacgcatctgtggaagttctccgaaatggtgaaggccggcgagatgacgcaggccgaattcctcgaggccgaggcctcgatgagccggtcgtccggcacctgcaacaccatgggcaccgcgtccaccatggcgtcgatggccgaagcgctcggcatggcgctttcgggcaatgccgcgatccccggtgtcgatagccgccgcaaggtgatggcgcagctgaccggccgccgcatcgtgcagatggtcaaggacgacctgaagccctccgatatcatgaccaagcaggccttcgaaaacgccatccgcaccaatgcggcgatcggcggttcgaccaatgccgtcatccatctgctggccatggccggccgtgtcggcatcgacctgacgctcgatgactgggaccgttgcggccgcgacgtgccgactatcgtcaacctgatgccatcgggcaagtacctcatggaagagttcttctatgccggcggcctgcctgttgtcatcaagcgcctcggcgaagccggcctgctgcacaaggacgcgctgacggtttcgggcgaaaccatgtgggacgaggtcaaggacgtcgtcaactggaacgaagaggtcatcctgccggccgagaaggcgctgacgcagtcgggcggcatcgtcgtgctccgcggcaacctggcgccgaagggcgctgtcctgaagccatccgccgcttcgccgcacctgctcacgcatcgcggccgcgccgtggtgttcgaggatatcgacgactacaaggccaagatcaacgacgacaatctcgacatcgacgagacctgcgtcatggtcatgaagaactgtggtccgaagggctatcccggcatggccgaagtcggcaacatgggtctgcctccgaaggttctgaagaagggcatcaccgacatggtgcgcatctcggatgcccgcatgtccggcaccgcctatggcaccgtcgttctgcacacctcgccggaagccgccgtcggcggtccgctcgccgtcatcaagaacggcgacatgatcgagctcgacgtgccgaaccgccgtctgcacgtcgatatctccgacgaagagatggcgcgccgcctggccgagtggaagccgcagcacgagctgccgacctctggctacgccttcctgcaccagaaccacgtcgaaggtgccgacaccggcgccgacctcgacttcctcaagggatgtcgcggcagcgcggtgggcaaggacagccactgatcggtcgtttcgatcgggtgaatcgacgaggaggcggggcgaaagctccgcctttttcgtatcgggaggccgacgtgcaccggactgcccgatcgcgcacttatagttaaagatttaataaaatcgtgctaggttgtgattgcactgcaatgacgacgaggccagacatgcgcaagcccgcgccgaagaccattcatcacgacgccgacgggaccgagacggaagacaatcgccagctggtgaaccgtctgctcgagaacgcgcagcgtgaggtgaggggcgaggtgcagaccgttgccgacgacacgcccaaggcgcgtcattccgtgctcgaaatcgccgtcctcgtctgcttcatccccttctactggctctattcgttggcgacccgccgcaccgcggaagaatacgaaagcctctgatcccgccgccattttggacgcgccgaaaacagcgttgcgctggtcaaccgtgatctccgccttatgtgtcccgacataggcaacgaaggcgggaggagcgcgcgatggccaagaacacgatctgcgtatggtacgacaaggacgcggaggaggcggcgcgcttctacgcgaagacgtttcccgacagctccgtcggggcgatcacgcgggcgccgggcgattatccctcgggcaagcagggcgaggtgctcgtcgtcgagttcaccgtcgccggcgttgcctgcatcggcctcaatggcggccccgtcttcaagcacaacgaggccttctcgtttcagatttccaccgaggaccaggaggaaaccgaccgctactggaacgccatcgtcggtaatggcggcaaggaaagcgactgcggctggtgcaaggacaaatggggcgtctcctggcagatcacgccgcgcgtgctgacggaggcgatgaacgccggcggcgccgaggccaagcgcgcattcgatgcgatgatggacatgggcaagatcgacgtcgcggcgatcgaggctgcccgcaggggctagtccaggacttcgctcatttctccttcgcaccactcgtcaccgggaacgaaatcggccgtcctgccgttatcgccgcgggagaacgttcattccaggagtgcggaaattgattgtattgagcgcgttcaacatcgacggcagcggcgctctggtgcacgcgttcgagccacgccggatgaagcgcgaggacaccgctgtctatgtcgccgaaacgatggtcaatgattatgccggtgtggttgtctggtgccgcgaggctaatgtcgcggttggagaagaggggccgtcggtcattctgttccagtcgggcaaggttctggaattcgattgatctggcagccgcacggttgcggccgccgatgctcttcagctctgcgactgactctgggattgcccctggtccgcgaccttgacgatcacctgcagcttttcgcccggcgtgccgatgcgcatgcctgatacgggtgaggcatccttgtagcaaagaccgctggcgatgcggacatagcgctcgtcggggcagatcttgtttgcggggtcgaagccgacccagccgagaccggggatatgggcttccgcccaggcatgggtcgccgcctgctcgatcttttcttccatcatcagatagcccgagacatagcgcgcgggaacgccgagcgcatgggcggcggcgacgaagatgtgggcgtgatcctggcagacacccgtcttcttctccagagcctgctcggccgtggtttcgacgtcgctggtgccgggctggtagtctaccgtctcgtggatggtgttcatcagcgcatgcatgcggccaagctcgttgtcgccgctgacgcccttgatcagttccttcaccagcttgccgggcttggtgcgcggcgtatcgcgcaggaacagccagagcgggcagaagccggtatgcgggccggtgacaccgttcagatcctcggtctcgacctcgccctcggcgacgatgcgcgtcacctgctgctcgccttccagcgagacgagattgacgtggttgccgaactggtcgtcatactcgacctccggcttggcgccctcgacatgcagcgaccagttcagcaccttttggccggggcctgatggcggggtcagccgcaggcgctgcagcgagaaggcggagggttcgtcgtagcggtattcggtgacgtggctaatcttcagtttcatgtcgcgacccgcctatgcgtagaaccggtaaccgtcggaaatttcctgtccgagctggttgttgcgtgagacgaagtcctcgaggaattcgtgcaggccctgatccatgatgtccttgatcgcctgcttcttcagcgactggcggatggcgtcggcggtgtcgtgcgccttcagccgctcgccgtaatcggtggcgaggtggccgagttcgctggtgatcttctcgtagcaataggcgagcgaacgcggcatctggccgttgaggatcaggaagtcggcgatgttggtggcgcggtattcgccgtcataggcccagctgtaggagcggtgggcggagacagagcgcaggatcgattcccactggacgttgtcgatcgaggttccgacggcggaaacggccggcagcagcacgtaatacttcacgtcgaggatgcggctggtgttgtcggcgcgctcgatgaaggtgccgatgcgggcgaagttgtagagctcgttgcgcagcatcgagccgtgcagcgcgccgcggatcaggccggcacggtgcttgatgacgtcgatcgcctgcggcaggtcggccggcttcagccgcttcgacaggagctccttgagctcgatccagaactcgttggtcgcttcccaggtctcgcgcgtcagcgccgtgcgcaccatgcgggcattgttgcggccgaaatcgacgcaggacatcacgctcgacaggttggtgcgatcgcgcagcaggtagtcgatggcatcagggccggtcagcttcgaatggccctcgtcataggcttcgcggacgccggcgctctgcagcacgccgtcccaattgtcgtcgctgccgctgcttcgggtcagcgacatgcggatgccggcgtcgatcaggcgcgcgatattctcggcgcgctcgaagtagcggaacatccagtagaggccgtttgcggttcttccgagcatcagatcaatcctccaatacccaggtgtccttggtgccgccgccctggctggaattgaccaccagcgagccctgcttcagggcaacgcgggtgagcccgccgggaatgatctgcaccttgtcggagacgagcacataagggcgcaggtcgacgtggcggggcgcgatccccttgttgacgagaatggggacggtcgagagcgagagcgtcggctgggcgatgtagttgctcggcttggcgcgcagcttctcggcgaaatcggcgcgctccttcttcgaggcggtcgggccgaccagcatgccatagccgccggagccgtgcacttccttgacgacgagctcttccaggtgctccagcacatatttcaggctggaggcctccgaacagcgccatgtcggcacgttttcgagaagcgccttgcggccggtgtagaactcgacgatctccggcatgtaggaatagatcgccttgtcgtcgcagatgccggtacccggcgcgttggcgatggtgatgttgccggagcggtagacatccatgatcccggggatgccgagggcggaatccgggcggaaggtgaggggatcgagaaaatcgtcgtcgacgcggcgatagagcacgtcgatcgcctcgtagccgcgcgtggtgcgcatcttcaccttgccgtcgatgacgcgaaggtccgagccttcgaccagctcgacgcccatggtgtcggccaggaaggagtgctcataataggcggaattgtagatgcctggcgtcaggaccgccacacgcggcttgcccttgcagccgggaggggcgagcgaggcgagcgactggcgcagcagatagggataatcctcgaccgggcgcaccttgttctcgtggaacagctccgggaacatgtgcatcatcgtctcgcggttttccagcatgtagctgacaccggacggcgtgcgggcattgtcttccagaacgtagaactggtcctcgccggtgcgcacgatatcggtgccgacgatgtgagtgtagacgccgccgggcgggcggaagccgatcatctcgggcaggaaggcgtcgttcttctcgatcagctcgcgcggaatgcggccggcgcggatgatctcctgcttgtgatagatgtcgtcgagaaaggcgttgagcgcgatgacgcgctgctcgatgccctgcgccagcttgcgccattcgcggccggagatgacgcgggggatgatgtcgaagggaatgagcttttcggaactgtcggcgtggccatagacggcgaaggtgatgccggtcttgcggaagatgttttccgcatcgcgggatttggcgatcagatgagcgcgatcctgattattgtaccactcaaagtatttctcatatggctgtcgcggactttcgtccccggtgatcatttcatcaaatgccaaaggtgtggctccccttttttcttcatttgagtacaacggacaaagcaatgcaagaagcatgctcagttcggacggaagattcataaaatcatgagtttcggcgaaaacagccgaaaaactgagcattttcgggaaggtagcgccgcgatgtcgaagggcaatcgggtcctgccgctcaaaacatgagcatgtgattattttcgacgcgcggcgcgattcattttcgggcgatggtggccggcgcttcaatgaaacttgaaataagcatcaacgcttcgcctttgaccttggcagtcgatcccggttatccccgctgccttcgctctcgaaagtgtcaaatgtcgctcgatcgtctcgcacccgccatcttcgttctcctgtggtccaccggctgggtggtggcgaaatacgcggccattcattccgagcccttcacctttctcgccatccgcttcgcgctgtcggcgctggcgttcctggcgctgtgtctcgtgctcagggttcagtggccggagagggcagtgatgtggagggcgatctattcggggctcttcctgcacggcttttatctcggcggcctgtggtgggcgatcgccaatggggtgccggccggcatctccggcatcatcgcggcgctacagccgcttctgacggcgatggcggcgccactgctgatcggcgaacgattgcagccgaagcagaaggccgggctgctgctcggcttcgtcggcatcgcgatcgccatctcgccgaagctgttcgatcccgccaacgccaatctcgcgcatgccatcgtgccgctcgccatcaacctcttggcgatggcttcggtcacctatggaacgctctaccagaagaagcacctgcaggccggcaacctgcctgccatcgcgacgctgcaatatgtcggcgcgctcgtcgtcagcgtccccttgatgctcggtttcgagcgcatgcagttcgacgggtcggcaacggcgatcgcggccctcgtgtggtcggtcttcgggctgtcgatgggcggggtggggttgctgctttatctgatccggcgcggacaggtgtcgcgcgcggcatcgctgatctacctgatgccgccgacggtggcgctggaggccttcatcgccttcggcgaaccgctgaccgtgccgctcgtcatcggcacgatcgtggtcgtcaccggcgtctatctgaccaaccggcagtcggccgcgccgctgcgcgagcaggcgcagtaagctcagcgagcaggcacaatagaaaacggcgggatctctcccgccgtttcttgttcaaaggctttcaaggcttacgcgcgttcgcgacgctggccgccattgccgccgcgcgaggggccgccacggcggttgccgccgttgccttcgcgacgttcaccgcgttcgccaccggcattctgctgcgcgccacggtcttcaccatgcttgcgggccggacggccctggccgttgcggggcgcattgcgggcaccgccgccgggctggtgacggtttgcgtcgccatgggcgtggttgccgtgctgtgggcgctgctgcttgcgggcctggcctgcgccacggaaatccgaggtcgaggcgagatcgttgtcagggcctgccgtgaccggcgcgacttcgccgcgacgctggccacggaaatcctcgttgcgctgcgtctggcgttccggacgggggcgacgctcgcggcgctcctcgttggcgcggacctcgtcgccggcttcggggcgcggacggcgctcggggcgaccggcgcgggcgttgccacggccttcgccacccctgccttcaccattgcgaccttcaccgccacgaccctggccctggccacgatggccattgccgttgccgcgcttcggcgccgcgttcatgttggccggggcttcgccagaggcaaccgcgatcgagatgttcatcaggcgctcgatatcgcgcagcagacgggtttcatccggtgcgcagaaagcgatcgcgataccatcgcggccggcacgcgccgtacggccgatgcggtggacgtaggcgtcgggcacttcaggcaggtcgtagttgtagacgtggctgacagccgggatatcgatgccgcgcgccgcgacgtcggtggcgatcagcgtcttgatgtcgccgtccttgaaggccttcagcgcgcgctcgcgctgaccctggctcttgttgccgtggatcgaggcgacggagtagccgacgtgctcgagatgcttcatcagcttctcggcgccgtgcttggtgcgcaggaacacgatggcgcggccatcggggttttcggagagcgacttcttgagaagatcggtcttgtcgttcttgccgttgacgaagtgaacatactgctcgaccttgtcggcagccttgcccggaggcgtcacttcgaccttgaccggatcggtcaggaagtcggcggcgagatccgcgatcgccttcggcatggtggcggagaagagcatcgtctggcgacgcttcggcaccatcttggagatcttgcgcagatcatgaacgaagccgaggtcgagcatctggtcggcttcgtcgagcacgaggtagcgcacggcggtcaggccgatggcacgacgggcgacgagatcgagcaggcggccgggggtggcgaccaggatgtcggtgcccttttcaagctgcagctgctgcttgttgatcgacacgccgccgacgacgacgttgatgcgcagatgcgacttgcgcaggaagttcttcaggttctgggcgatctggttcaccagttcgcgggtcggcgccaggatcaacgtacgggtggtacggttgtcggggcggcgttcttccgggatcagcttttcgatcagcggcaggccgaaagcggccgtcttgccggtgccggtctgggcgaggccgatcaggtcgcggccttcgagaagaagcgggatcgccttttcctggatgggggtcggcgtttcgatgccgagctggaacagtgtggcgacgatcggcttggagacaccaagcgattcaaaattggtcaagtcataaccttttcaggggcgccaaaacaataccgccggaacgcgggtttgcggtccggtgttactctggcgtcaagaaccccgcgtgaagtgggaacttgtcttgttggaaaaagctttccagcgcttctgccgcgtcccttgggatgcggtccattcgaaatgcgctttgtccttcttcctgcatcctatttgctggcaggggcacgctcacgcggcggccggaaggtgaaagctggcctgcatttggtctagttccgccgcaaagtcaaggggagggccgcaaaaggccgcgccgggactgaccgcgcagggtgcgtcgcggacaaggcgcaccgcgcgcggtcgccgaagcaggccgccggtatcaataagggcagacgcggacgcggtaggcctcgccccatccgttgcgccgccactcgagatggcaacggcggtagggctgggaatagtagctgcggtaaaccggataggcgccgtatggccggtaagccctgtagggatatctataggggtatccgtagcgatagccgtaggcatagggatagccgtagccgtcggggtagccgtatgtgtaggggtagggacgaagcgcctgcgacagcagcatgccgccgacgaagcccgccgccgcgccgccccagatgtaatcgtggttcgccatcgcgggcgaggttaatgtcagcgtcgcggttgtgagcgtgagaaggatagagccggttgccatgcttttacgaagtacggacatgttcgcctcctgtgacggacgagttcttcttggggccaccagcagaacatcgggccggtgctcaagaaatggctgcgattttagcacgatttccggggttttgcttgacgacgacatggggtcaggagatgcaaccgggcatccgctcgctttaaacttctcaatccgaagcgttatttttgttcggcgggatcatggttaatgcgttgttaaacgcctctcggctatggtcgatgacgtcgcaatttgcctagtgttttcatggtggagcaggtgtttttgggagcgaacggggacattctcgaactggcatgccgccggatcgcggatctggacaaccctgcctatgtcaagaacagcgaactgcgctatgtcgcggtcaaccaggcctatgcggatttcttcggcaaggagatttccgatttcatcggccggcgcagccgcgagctgttcgaccggccggaagagcaggatcgcgaggacaaggagcgccgcgcgctggttttcggcagcgaggaaagcgcgctctgcttcgacgccacaggcgatgcccatgaccgcgtgcggatcgagagtttcgcgctctcggaagagcggatctatgtgctcggcatgttcgaggaggcgcgcaaggcgtcgcggccgacatggccggcgacgcgggcctccagcgcaaaccgtaccgacatcgacttcctgcgtgacgtgatcgaagcgcttccggtcgccgccttcgtgcgcgacgaggatcatcggctcgtctatgccaacgcctcttacgaacagctgacggggctgccgcgcgccgaggcgctgggcaagaccgagcgcgagatgttcggcacggcgtccggcgacatggtgagccgggggcacgtgcaggcgctggccaagggggaggcccgcgatatcgagagcctcgtgccaggggccagcggcggggtctatccgatcctcgcgcagatcaaccggatcagtggcggcgacggccggcactataccgtcgggtcgttctcggacgtgtcgctgctgaaggaacgcgagagcgcgctcatcgcggcgcaggcccataccgaaattctccatcgcgacatggccagggtgctgaattcgctgcccgtcggcgtgcttatcctggagagcgatctcacgatcctctacggcaaccaggcgttctacacgatctcggacctgcccgagggatacttcgacggcaagagcttcgccgagctcgtcgaatacaatcatatgctcgggcgctatccgcccggcgtggccgccgaggagatcctggcgcggcgcaccgatcagttccgctcggaccacccggcggcggcagagatcaactggggcgacaggtttctcctggtcgacagccgcaagatctccacggaccgcattctcctgacctacgccgatgtctcggccgtgcgcctgcatgaacgggcaatccacgccgcccgcgaggaactcgagaacctcggcgagctgatgggcgacgcgacgcatgcgatgtcgcaggggctgctcgtgctgcaggacggcgagatcctgctcagcaacgatgcgctggccggcatgctcgaccttgccggcgaccgtgtcgccgtcggccgcgactggcgcgagatgctgtcgttctgcgccgccaggggcgatttcccggaagatgccggtcacctgctcaacgatatcggccaggcgcttgccgatgaccagccggcgtcgcatctgtttcgcgtgcccgatggccgctgggtgcagatggacgtcatggtcagcgcccgccggcattgggtggtgctgttcaccgacatttcgacgatgaagatccgcgaaggcgatctggagagcctgctcgagcgcgccgaagtcgccgatcgggtgaaatcggagtttctggccaatatgagccatgaaatccgcacgcccatgaacggcgtgctcggcatggccgaactgctgtcgaagaccaatctcgatacgcgccagaagaccttcgtcgatatcatcaccaagtcgggcaatgcgctgatgaccatcatcaacgacattctcgatttctccaagatcgattccgggcagatgaccctgcgccgcatcaccttcgatccggtcgaggccgtcgaggacgtggtgacgcttttgtcgtcgctggcggcggaaaagagcatcgagcttctggtccgcgtcacgcctgacatgccggccgccatcatcggcgatgccgggcgcttccgccagatcgtcaccaatctggtaggcaacgccgtcaagttcaccgagcggggacatgtgctggtcgagctcggctatgtcgcgggcgcggccgacgagatcatggcgacgctgcgcatcgaggataccggcatcggcatgccgaaggaccggctcgaccagatattcggcaagttctcgcagatcgattcctcctcgacgcggcgtcacgagggcaccgggctggggctggcgatcacggcgggtctcgtcgacctgttcggcggctacatcgaggtcgatagcgctgtcggcgaggggtcggtcttcaccgtcaccctgccgttcaccatcggcgccaagcgggcggagccaaggccgctgcccatcaacgtgcgtggcgcacgcgtgcttgtcatcgacgacaacgccgtcaaccgccagatcctgaccgagcagctcacgcaatggggcttcgacggcgcggcggccgaagacggcgtcgaggggctcgccattctcgaggaagccttcgcgctcggtgtttccatcgatgcgctggtactcgactaccagatccccggcatgaatggcgccgatatcgcccacctgctgcgcgccgacgaacgcttcgccgacctgccgatcgtcttcctgacctcgatggatatctcgggcaccgagaaggaattcgcggcgctgaacggccaggcgcatctgatgaagccggcacgcgccaacgtgctgcgcaacaccatcgtcgatgtcgtgcgcaccaaccggatcaggctggcgccgacgctgcggcccgtcatcgaggcaccgccgctcgagcccgagcttttgccggaacccctcagcgaaagagcgccgccgtcctttatcgacgtgctcgtcgccgaggacaacgaggtcaaccagatcgtcttcacgcagatcctgcaggcgacggggctgaacttcctcgtcgtcaagaacggcgaggaggctgtcgaggcctgggaggcccatacaccgcgcatcatcatgatggacgtgtcgatgcccgtgatgaacggccacgacgcggcacggcgcatccgcgagctcgagcgcgggcaggggcaccgggtgccgatcatcggcgtcacggcgcacgcgctcgacgccgaccgcgatctctgcctcgacgccggcatggacgactacatggccaagccgatcagcccggagctgctggaagagaagatcgcgctgtggctcggcaaggaaggccgcgcgagcggggtttcgctgagctgatcaggacccgggtccagctctgcgaccggccgttgctgctgtttcggagtgcctagagcctttcctgcttagattgaagcattctgccggagcaggttttcgtcagggcaaaggcgattggcgaagggcataccccaggtacggtcgagccgatcgcctttgatcctggcgcaaagatgcccggccccagccggtttgcgaagcaaaccagcgggggttggctgaaacgggccgcctgatcgtccggccggcttggccgtatgcgttggctacgacgcgcgccggccggacgaccatccgactccgtttgagccaacagaatgtttcaatctagccaggaaaggctctagctctcggcgcgcttgacgccgcacagcatttcgcgcttgccggcgaagccaggacgacgctcgaccacaaagccggcggcgccgagattgcggcggacgaagccggcggcggcgtaggtcgcgaaggtgccgcccgcgatcgtcttttcgcaaaccagcgtcatcagttcctgtgaccacatatcggcgtttctcgacggcgcgaagccatccagataccaggcatcgaaacccgcctcggcggccgtcacgccatcgagcgcccggccgcagacgacgctgagcgtggtctgctcgtcgagtgtcaacgagacggttccctccggtacatccggccaggccgagaccagtgcgatacgctcggcgccgatctccggccagtgcgacagcgcgcggtcgatctcgtgtcgctgcatcgggtagagctcgaaggacatgaagtgcagttgctggccttccgcgcgcctcagcttccagttccggaaggtctcggcgaagttcaggccggtgccgaagccgagctcgccgatcaggaagtctcgcgcccctgcccagcgctcgggcaggccgtttccggccaggaagacatggccgcattcgaggcggccgtcggtctggcaataaaaatggtcgccaaaggccggcgaatagggcatatcgccgtcgcgccattccagcggccggttcgccatctcagcctgtgccaagttaatctgatcgggatcgatgtctgtcatgtcaacagccgatagtccggccttgcccccgggtcaatcgtccaccgatctgttgatcgtcggcggcggcatcatgggtctctgggcggcggttcacgccgagcgcatggggatcgacgcggtgctgatcgatgctggatcgttcggcggcggggcgagcggcgggttgctcggcgcgctgatgccgcacatgccggataaatggaacccgaagaagcagtttcagttcgatgcgctggtggcgctggaggccgaggtggcgcggctggaagacgagaccggcctcacggccggctatcgccgctcgggtcgcctgatcccgctgcccaagccgcatctgcgcgatatcgcgcttgggcattcggccgatgccgacagccactggcatgcaggcgagcgtcgcttccattggcatgtgatcgatacgcctgatgtatccggctggccggacgcttctcaaatggagggcggcttcgtgcatgacacgctggccggccgggtggcgccgcgatcgctgacggctgtgctttcagcttttctccgcggtgccagacacgtccgcatcatcgagaattcggccgttcacagtatcgatgccgcgcgcggggtcgccgaaaccgatgccggggcgatcgccttcgggcattgcgtcatcgcggccggctaccagtcgttttcgcttctggcgcgcgacacggcagggctgacgcagccgctcgggcagccggtgaaggggcagtcggcgcttttgaaggccgatatcgatcccgagctgccgaccatctttcgcgacgggctctatgtcgtggcgcacgagggcgggcatgtcgcgatcggcagcaccagcgagaaccgtttcgacgcagcgtttacgacagacgggcagctggatgtgctggtcgagaaggcgcgggcgctggtgcccttgctgcgcgacgcgcccgttgtcgagcgctgggcggggctgcgccccaaggcgatcgaccgcgatccgatgatcggcccgcatcccgcgcatgagagagtgctggcgctgaccgggggcttcaaggtcagcttcggcctcgcgcaccggctggccgaagctgtggtgcacatggccgctggcaacgtggttccgttcccggtgcccgagagttttcacctgatcaatcatattcacgtcgcttcacgctaaagtgcctcgcgctcgcttgaattttctcgtttcgcttacgcttttccgtttttcgccgtctttatcctgaaatcggcggccactttcgcgagatatttcgaaattcacgttaaacgtgaattagcactcgctgtgtttcgtcaatctgtcatgcaaatcgcctatctgcttgcaaaacggcggcgcgcttacgagtcgcgcctggtgccgacggagataattgcatgcgatacgccatctgcttcacgcccgccgcgaatgacccgctgtcgcatgcggctgccaattggctaggccgaaacgtgttttccggcgagatggtggagccgacggccatccccgggctcagccttcacgaggtcgcctttcacacggctgtgccgcggcgctacggctttcatggcgcgctgaaggcacccttccggcttgcggcggaccagtcggagccgcaactattgcgggaattgatgcgtttctgtggcacactcacgccgttttcggtttcgcggctcgaggtcgcgcgcaccggcagcatcttcagcctggtgccgtcgctgccctgcgacaacgtgcagtatctggcctcctccatcgtggcgcagttcgaccagttccgggcgccgctcagcgatgccgatatcgagcgcagcgatccggatgggctttcggcggcgcagttcgccaatctgcatcgctggggatccccctatgtgatggacgagttccgcttccacatgccgctcaccggtccggtcagcctgatcgacatgccgcgcatcgagcgctcgctgcgcagcgtcttcgagccggtgctggtcgatccggtgaagatttcgaacgtggcactgatggtcgaggagggcaatggcgggccgttcagggtgcattcgctgcatccgatgggcaaggtcagcgcacggcgcgagcgggttcccgttccggcctaagcgtttgtgcgataagcgcaaaacgccgctgcgcagtttccgtctcgacattcgcccttgaggtgttaccgttcgccgactttctggaaggtgatttcatggtatccgagacctacccgcgcaatctcgtcggctatggccgcaatccacccgacccgaaatggcccggcggcgccaatatcgccgtgcagttcgtcatcaactacgaagagggcggcgagagctgcgtcctcgatggcgacgcggcgtccgaaaacctgctgtcggagatcgtcggcgcggcggcatggcccggccagcgcaatctcaacatggaatccatctacgaatacggctcgcgggccggtttctggcggctgtggcggctgttcaccgagctcaaggtgcaggcgacggtctatggcgtgacgctcgccatggcgcgcaatcccgaggcggtggcggcgatgaaggaagccggctgggaaatcgccagccacggctaccgctggttggaatacaaggatttccaggaggacctggagcgcaagcatattctggaagccgtgcggctgcacaccgaactaacaggcgagcggccctacggcatgtaccagggcaagccatccgacaacacgctgaggctggtgcaggaggagggcggcttcctctactcgtcggacagctatgccgacgatctgcctttctgggtgaagggcatggacgacaagccgttcctgatcattccgtatacgcttgagaccaacgacatgcgcttcgccacgccgcagggcttcaattcgggcgaccagttcttcacctatctcaaggatgccttcgacacgctctatgaagagggcaaggcgggcagcccgaagatgatgtcgatcggcctgcattgccgtctcgtcggccgtccgggccgcgcggcggcgctgaaacgcttcatgcaatatgtgctggagcacgagaaggtgtggatcccgcgccgtatcgagatcgccgagcattggcataagcaccacaagccggagaccatccgatgatcgcacgcgacgagttcatttcccgcttcggcggcgtgttcgagcactcgccctttatcgccgagcgggccttcgacgacggtttcgtcggcgagacgctcgatgtcgaccgggtgcacaccgcgctggtggccatcttccgcgccgcgagcccggaggagcgtctcggcgttctgcgcgcccaccccgacctcgccggccgcctggcgatcgccggcgagctgaccgaggacagcaaaaaggaacaggccggcgccggcctcgatcggctgagccctgaggagcaccagcgcttcaccgaactcaaccgcgcctatgttgaaaaattcggctttcccttcatcatcgcggtgaagggtctcgacaagcaggcgatcctttcggccttcgaaaagcgcatcgacaacagccgcgacgcggaattcgaaacggcgacggcgcaggtggagcgcatcgcgcttctcaggctcgaggcgctcctgccgacacgctgagcgacaccacttttctcttgtccgtccgccgcttatagtcgtcgggagggagtgaagacgatgagaccatccgaggtgctggagaagaacaggcaggcgatccgcgaggcgaccaagcgcttcaacgcggccaacccgcgtgtcttcggctcggtggcgcgcggcgaagatcgggcggatagcgatctcgatattctggtcgatacgttgccggggacgtctctattcgatctcggtggattgctcgaggagttgaaggacctcatgcaggggacagatattcatctcatggtccccggagattttcctgaaagagtgcgcgcgcgcgttctcagcgaggccaagccgatatgaattcggactggctgcgatcctatctcgaccagatggaacaggtttccctggagatcggcgatttcgtgaagggaacgtccaaggaggcgtttcttcaagacgtgctgaagcagcgtgccgtcggcatgaacctgctgatgatcggcgaggtcgtcacgcggctgtccgacgagtttcccgatgtcgtcgcggcccatccggaagttccatggaccaagatgcgcggcatgcgaaaccggatcgcgcacggctatttcaatatcgaccttgagacggtctgggacacggcgacgaacaatatccccgagttgatcgatagcctccacatgctgcgccactggcgcatacaaggcgaatgacgtgacagacttcctcgatatccagccgctgaccaaagccgccttcgcgccttttggcgaggtcatcgaagccgatccggcgacgatgcgctatatcaacaacggcaccacggagcggtttcatgcgctggctgccgctgacgtggtgggcgagggcgcgcgcgtgatcatcaatctgtttcgtggccagccgcgcgattttccctatcaggtcgggatgatggagcggcaccctctcggcagccagagcttctcgccgatcttcggccggccgtttctggtcgtggtgtccgaagatgagggtggaaagcccggacgtccgcaggtgtttctggcgcacggcgatcagggcgtgaattatgggcgcaatgtctggcaccatcccctgatgtcgctcggcgcggtcagcgatttcctggttgtcgatcgcgacgggccgggcaacaatctggaagaatattttttcgacactccctttgtcatcagcgagccaatttcatgaccggattgaccacgcacgtcctcgacaccgcctccggcaagcccgccgaggggctgaagatcgagctcttccatatcgaggccgaggtccggcggcatgtgaagaccgtcgtcaccaatgccgatggccgtgtcgatggcgggccgatccttgttggagagagtttcaaggtcgggacctacgagctcctgtttcatgccggcgattatctgcgcggcattggtgccgcgctgccgcatccggccttcctcgacctcgtgccgatccgcttcggcatcgccgacgagagcgcgcattatcacgtgccgctcttaatctcgccctacggctattccacctatcgcgggagctgagcgatgcgtttcgccgcgatcgccgatgtgcatggcaaccatctggcgctcgaggcggtgctggccgatatcgccgcgcttgggatttccgagatcgtcaatctcggcgattgcctgagcgggccgctcgaggcaggcaaggcggcggacaggctgatgtcgctcgatgcgctgacggtgcgcggcaatcacgatcgctacctggtcgagagccccgccgacgccatgccctcctgggagcagcatgcctacgggcaactgtcggccgcgcatctcggctggctgcggagcttgccgttcagcgccgtctatcgcgacgaggtctatctctgccacgccacacccgggcatgacgaaacctactggctcgaatccgtctcgcctgatggtcatgtcttcctgaagcctctcgaagagatcgaggcgctggccgaggggatcgagcagaagctgatcctctgcggccacagccatgtgccgcgcatgcttcgtctcagcgacgggcgcctgatcgtcaatcccggcagcgtcggctgccccggctatagcgacgacacgccctatgagcacaaggtcgaggccggacatccgctggcctgctactgcatcatcgaaaagaccgcgtccggcttcgcgccgcagttccggaccgttgcctatgaccatatgtcgatgtcgcggctggcgttgaaaaacgggcggccggattgggcgggcgcgctggcgacggggtgggtgcgttaatctaagccgccgcgttgcgttcgatctcgtgcttcgcggccttggcgagaaaggccgagcgcgacaggccggctgctgcggcgacggcgtcgatgcgggccagaacatcctccggcagcgtgacattgatgcgcacggccctgctggacgctgctttcagcgagacgaggatggcaacgccgtccttgttctccgggttggccatgacggtatcgagcgaagagggttgcggaagcgtctctccgtcctcgatcaaaccctcgacgtgaaaagccagggcttcctcggccatttcgcgcgcctcgtccagcgtcgagccggccgtgatggcgccgggaaaatccggaaaggagacgccgtagtcgctctcggcgtccttgtggatcagtccgatatagttgcgcatgatcacctcaactccaggcccgactgtttctcgatgctgcgcaacgtcccgatcggaatgtcccgcttgggatgcggcacggtcacgcggcccggcttgtccgcatgtttgaactgggcgtgactgcccttccggccgacctcgaaccagccggctttcagtagcaggacaatgacgtcggcgctcttcatcgggctgaattatacacaatgatgtgtacaattcaaatcgcacctactgccgtcccgcgatgatcgatgagttcacgtccttgatgtcgcgcttgccgcaaagggccatggtcacgtccatctccttgcggagaatgctcagcgccagcgatacgccttccttgcccatggcgccgaggccatagaggaaggggcggccgatgtaggtgcccttggcgccgagcgccacggccttcagcacgtcctggccggagcggataccgccgtcgaggtgcacttcgatcctgtcgccgacggcgtcgacgatcgagggaagcacgctgatcgaggagggggcgccgtcgagctggcggccgccgtggttggagacgatgatggcgtcggcgccggtctcggcggccgccttcgcgtcctcgacgtcgcagatgcccttgatgatcagcgggccgccccactgctccttgatccatgaaacatcggcccaggaaagctgcgggtcgaactgctccgccgtccaggaagacagcgaggagaggtcggagacgttcttggcgtggccgacgatgttgccgaaggagcggcgcttggtctgcaacatgtcgaggcaccagaagggccgcgtcgccatctgccagatgtgcttgggggtgaacttcggcggcgcggagaggccgttgcgcaggtccttgtgacgctgcccgaggatctgcaggtcggcggtcaggaccagcgcggagcacctggcggccttggcgcggttgatcaggttcagcacgaagtccttgtccctcatgacataaagctggaaccagaagggcttggtggtaaccgaggcgacgtcctcgatcgagcagatgctcatggtcgacagcgtgaagggaacgccggcctcctcggccgcctgcgccgccagcatctcgccgtcggcgtgctgcatgccggtaagaccggtcggcgcaagagcgacgggcatcgataccttctggcccaccatcgtcgtctccagcgtgcggttcgtcatgtcgacgagcacgcgctggcgcaggccgatcttggcgaaatcgctctcgttggcccggtaggtctgttccgtccaggcgccggaatcggcgtagtcgaagaacatcttggggacgcggcgctgggcgagagatttcagatcggcaatggtgagaggtttggccatggataagactttcacatctgaataatgcaacggccatatcacatataatttacatccgaaacggtatctttctcgcccacgcggaagccggttacgggatgagcaacaggctgccgctgctcagtccggcctccagttcggtgtgggctgcggcggcatcggaaagggcgaattcgcgggtgggaagcgtgagaatgccgagccttatagcctcgatcgccgccgtggccgcctccaggtagaaggccggatcgccgctcgccgccatgatgctcgggtgcgacagagacttgttcgggcgcagcgcctcgatcgtcaccggcggtatcggccccgccgcctggccgaagctcgcggccatgccgaaggggcggatgcagtggatggtcttcgccagcatcgcgccgccgatgccgtcatagccgacatcgacgccgcgccctgatgtcagcgccatgacgtctgcgaccagatcggcatcgcggccgatcaccagatggtcggcgccgttggcggtcgcgagtgccgccttctccgcgttgctgacggtgccgatcacggtggcgccgaggtgcttggcccagcgcaccagaagcgtgccgaggccgccggcggcggcgtgcaccaggatggtgctttcaggcgtgactgtgtggatgcggtggagcagcatataggccgtcatgcccttgagcatcatggcggcggcatggcttgaactgacatcatcgggcagacggatggcgcggtgcgccggtagcaggcgggtcgaggcataggcgccgacgggtgcgcccatatagacgacgcggtcgccgggagagaccgtcgtcacctcggagccgaccgcctcgatcacgccagcaccttcggcgccgatgacggcggggtaggcgggcaacggatagaggcccttgcgatgatagatatccaggaagttcacgccgatggcgtcgtgtcggatgcggatctcgttcggtcccggcgcctgcggttctcgcggggtaatcttcaactgttcgatgccgccgggggcggcgagggtgattgcgatatccattgtccggtctcctgattgcttgcggccgaagatggaggatggttgcgtgattgaaaattccctatgctttcacaggcaatgggaaaaaatgatcaatgctggactgggaggatctgcgccatctgctggcgctgtcgcaactcggaagcttgtcgggtgcggcgcgggcgctcggggtcgagcacgcgacggtatcgcggcgggtagcgcatctggagcgcgagatcggcgcgaagctggtcgatcggcgcgggcggcgaatccttttgacggcagagggcgtgcgggttgccgcgatcgccgagcgcatgagcgccgatgccatgacgatcgggcggggcggtatcggcgccgatcagacgcatgtcggcgaggtccgcatcagcgcgccgccggcctatgcgggcgcggttctggcgccgccgctggtgcggctaagacagcgccatcccggtatccgcgtcacgctcatcggcgaaacgcgctatgcctcgctcgggcggcgggaagccgatatcgccgtgcggctcaatcggcctgagagtggcgacctgaccgtctcgaagatcggcgaggtgggtttccatgcctatgcggcatcaggttacgccgagacggtcgatcagcgtgactggacgttcatcggttatgacgaggggatggcgtcgtcaccgcaggaggagcggctggcggagatcgccgccggtcggccgatcgcgatccgcgcctcgacgctggagttccagctggcggcggtcaaggccggcggcggcgtggcgctgctgcccgatttcatcgcggagggccaagggctggcgcggcttgatcttgagggcgccgatatcacgcgtgatttgtggcttgtcgtccatagcgacatcaaggatgtgccgctggtgcgggcggtgatgggtgcgttgcgcgagcgttgatggcgatcgttggctgacgatgtatttccggttcggcggatgtcggaataggtcgggccaccgcgtccttgaagagaacataaaaggaggaagcgatgcgagagttgatcctggccatggcgatgacgctcgacgggtttgtcagcggccccgagggggagaccgagtggattttcaccggcgacgaggaggcgatcgcctggaaggtcgagaacgcctcgaacgccagcctgcacatcatgggcagccgcacattcgaagggatggcgcgcttctggccgacatcgaccaacgtcttcgcaccggcgatgaatgagatccccaaggcggtgttctcgaaaaagggcgcggcgatcctgccgcgggagatcgaggcagctgtagcgggcgagccgcagcccggcgccgacagctggcgcaaggcctatgtagcgagcggcgatctgaccgaggaaatcgccagattgaaggctcaggacggcaagccgatcatcgcccatggcggcgccagcttcgcgcgcagcctcatcgcccatgatcttgtcgatcagtacatgctgatggtctatccgctggcgctcgggcgcggccagccgatcttttccgatctcgcgcagccgaggaagctgcaactgatcagcacgcgggtgtttcccaagggcgccatcgcgcaggtctatcggcgcggctaaagcgcacccttcgccgccgcgcccgcgacataggtctcgacgatggcgcggtcgtcgcccatggtctgcagcaggaagagctcttcgggaagcgttttcaccacttccatcttcagcgccatggctggtgtcgcggcggcgtcgagcacgaccacgtcggcgtctgtgcctttgtcgagcgtgccgatgtggtcggcgagcgagagcgagagcgcgttgccaagcgtcatcaggtagtagctttccagcgggttcaggcgttccgcgagcagttgctggatcttgtaggcctcgtccatggtgcgcagcatcgagtagctcgagccgccgccgatgtcggtggcgacgccgatcctgaccggcttgtcgcggcgcatcagcgccttcagcgggaagaggcccgagccgaggaagaggttggaggtcgggcagtggacggcgatggcgccggcttcgctcatcgcgtccgcctcgcgctcagacaggtggatgcagtggccgaagagcgtcttgtccccgagcaggccgtagcgggcgtagatgtcggtgtagtcgatcgcgtcgggatagagctcgcaggtgaacttgatctcgtcgtggttctcggagagatgcgtctggatgtgcaggtcgggaaattcgcgggcgagcgcctgcgtcgcttccatctgctcaggggtcgaggtgatggcgaagcgcggggtgatggcgacgtggttgcggcccttgccgtgccagtcggcgatgatctctcgggtctcgtcgtagcccatctggggcgtgtcgagcaggccctgcggggcgttgcggtccatcatcaccttgccgccgaccatgcgcatgttgcgcctcatggcttccgcgaagaacgcgtcggcggaggtcttgtggacggagcagtaggcgaccgccgtcgtcgtgccgtggcggatgagctcgtcgtagaaatgcgtggcgatacgttgggcatgtgcgctttcgacgaagcggcattcctcgggaaaggtgtaggtgttcagccactcgagaagattggcggcgtaggaggcgatcacctgcatctgcgggaagtgcaggtgcatgtcgatgaaccccggcatgatcagatgcgggcggtgatcgatctcgaccacgcctgcctcggccttcgccttgacctcggaataggggccgctttcgacgatcaggcccttgtccatcaacaggccgccatcagtctcgtagcgatagctttcgctgtcggtcaggctctggggtgtcctgacgaaggagagcaagcggccgcggaggagggtctgggtcatgggcgttcgcctctatcgattgcgtgtcgtggtcagagtgggctcagggcgccggcttggcggggatggcagccaccgacgcggcgcagccgtataatgtccttccctgaaataccagctttgccgcgagatcgtaacgcttcgcggatgcgccgtcgacgcaggcctgcctggtcagcgtcagcgtgtagcgcgaaggcgcgtggttgatggtccatgtcgcgctgttttcagtcgtcgccgtcggaccgggattgacggtgatgacgtcgttcttgccagcgcggctgaaggtaatctgatcctcgcggatgcgcagcgcccagaaggggccggtgccgagcgcattgacctcgccccagaggccggcgggggcacccggcggctgatcggcggggatatctttcggcacggtgcccgtcgtcctcacgtcctcctgtttggcgatggcctcctccgccacggcttccgtccacgtctgccccgggagggcgagaaggctggccagaagcagggggcggaggcctctcgtcattcgcgcttgccctggacagcgctctcgaaccaggcgacgaggagcttgcgctcgtccggcgtgatagcggtgacgttgcccggcggcatggcgtggctgcggccggcctggatgtagatgtcgcgggcccgggcggcgatctcggcgtcgttttcgaggatcacgttcttcggcggccgcgccagcccctcatagacgggcgtggcggtatggcacatggaacagcgggtgccgatcagctgcttgacggcggggaagcgcggatcgccggcgaattgctggaaggccggagcgaccggcctggcggccgcgtccttctcgccggtcagcaccttgggaacggtggaaagccacatgatcaggatgaacaggatgacggtggcaagccaggtccaggtggggcggcccttgcgcgcatgcgtggtgttgaaccagtggcggatggtgacgcccatcaggaagaccagcgccgcgatcacccagttataggcggtgccgaaggccagcggatagtggttcgacagcatgaagaagatgacgggtagggtcaggtagttgttgtgcagcgagcgctgcttggcgatggcgccatatttcgcatccggcgtgcggccggcgatcaagtcggcgacgacgatcttctggttggggatgatgatcatgaagacgttggccgacatgatggtggcggtaaacgcaccaagatgcaggaaggcggcgcggccggtgaagagctgcgtatagccccaggccatgaacaccaggacggcatagagcaccagcatgaggccccaggtgttcttgccgatcggcgacttgcagagcaggtcgtagacgagccagccgccggccagcgaggcgagcgagatggcgatggcgacgggcgcgctgatatcgagaacatcgcgatcgatcaggaacagatcggcgccgccgtaatagacgatggcgagcatcaggaagccggaaagccaggtgaaatagctctcgtatttgaaccaggtcaggtgctcgggcatctgcgccggcgccaccagatatttctggatatggtagaagccgccgccatgcacctgccactcctcgccataggcgccgacgggaagatgcgggcgcttcaccaggccgagatcgagcgcgatgaaatagaaggacgagccgatccaggcaatcgcggtgatgacgtggaaccagcgggcggcgaaggccagccattcccacgctatggcgtattcatacattcagttcccctgtgctctctccgattcagcagtgtgcagaatgttgggccgggagaaaagggggattaggagacaccgccacgttgtcggcgcggaaatcatggctttcttacgtagagcgggtcttcgggcagcggatcgggcactttcgactttccctgctcgttcacgccggctgcgatctcgatgatcgtccagatatcggtcgcgttctcaacaccgaactcggtttccagcatggcgatgaaagatctggtcgagaggatgtccagattgaggttttcggtctgtctcagcgccgcccgcgccctgcggtcatcgaccagcaggacgacggcctcgctgtcttcgacaacggtttcggcggccgcgagaacgtcgagaaggctgtagtcgccgcgtcccgtccagctgggtttcaggtccggagtgccgcctcccatgcgccagttcgccatggccttttcgtattcgcggccgacggcggtctccatgaccttgacccggtggcggttgtctctaaaccacgcggcgagcagctttcgctgttcggtacgggggtcgtcgtcaggatcgggatcgcgcgttgcctcgatcgctaccatatccgtgatccagacctcgatccgcggcacgaacaggtaatccagcgcatcgcggccggccatcgacagcagggagaggggcgacgtatcggggatgagcaggcgaggcgcgcgcgcgatgtccccgtccatcagcgcagtctccatcggcgcatcgccttgtcgatttctcgggcgatctcgtcggcatgctttccgtcaagggcgtcgctcgccgtctgttcgacgtagccgggatcgcgtgtgtcgtagcccagcgggtcggcgatccggcgatgcagcgtcgggctggatttgcgcacctcgttcggcaccggctcgccggccgccgtcttcagccgaatgaactcctccgccgacatgacgacggcgcgcggctgatccctgttggttaccagaaccgtttccacatcggccgttctcaagacgtcgccgagatttttctgcaggttgatcgagcgaatggtctgcatcggggcgctttcgttgttttacgtaaatttacataatatcgggttcgggcgcaaatatttcgcggcgtcacagggcgcgcgcgccgccgaccttcggccttcccatcccgccaggccgcccgccattgacatgccgggacttgattacagttttattcaaggccgccgggacgagtggaaaccgcatcggcgcggcggcgcattcatcgacggagaagatgccgatgcgcagtattcttgtggttgtgatgattgccttcgcgtcctgtgtcctggtctcgcgtgccgtcgcccatgacgcgccttccgggtggagctacgagccctattgctgcaacggcgacaacgagacgggtgattgccagatgatcccgccgaagagcgtcacgatcacgccgaacggctatcgggtgacgcttctgccgggtgaccatcggctcgtcacccgcgcccatgtgttcctgctgccgatgggccgcgcgatgaaatcgggtgacggcgagtatcatctctgcctgtttcccaacgaggatacgccgcgctgcttctacgcgcccgaaatgggctactgagcgctttccctgtcgcgggcgatctcctccaggatccagttgcggaaggccttgatcttcgggacgttgcggcggttttcggcatagaccagccagtagctgcgatggtcgcggcaggtcatctcgaagggctggtagaggcgcccctgggcgatctcgtcgccgtagaaggcgggcgtcaggatggcgacgccctggccggccatcgccgcgctcgcctcgaagctctgcgcgccgtactggctgcgcgggcgcgattccagcccaagatcgctcaggcccgatgccgtgaaccagatccgccaccaggggtcggtggggctgatgatcggcagtttcatcagatcctcgggcttgtgaatgccgccgacgctctcggcgagcttcgggctcagcatcgggctgaaatccgcctggatgagcttgtccgacatcagcccgcgccagttgccggcgccggagcggatggcgacatcgacgggctcgcgggtgaagtcgatcagcgtatccgaagccgacagccgcacggcgatcgacggatgcctgagctggaaggctcccaggcgccgcgccagccagtgcgaggcgaaggtggcgatggtgttgatcagaagcgtcgattcgatctcgccgcgcgcctcggccatcgcctcgttcaggagcacgaaggcgtccgacactttcggcagcacccgttcgccggtatcggtgaggctgatctggcgcggacggcgcaaaaacagcggctcgccgatattctcttccagcagcttcacctgatagctgaccgccgtctgcgtcatgccgagctcctcgccggccttggtgaaactgccgagcctcgccacggcctcgaagacgcgcagcgcattcagcggaacctgcctggacagcttcatggataagttctctttatgcatgcagacgtttgttcgattggaatttcagcattaatcgacgcaatctgcaagtcacgggatcaaattatcgaggtgatgtcatgactagcgcaacgcgcgaacagaccgtcggacagctgggcaagcaaagctccagatcgacccgcacgagcgctttcgagtggctggcggctctgttgagagggcttgccgttcgtcttgcgcggccggaccggctggatctcgagggcatgccggatcgcgtcaagcgcgacctcggcttcatggacggccgcgagccctatcgcgaggatgcgcgggcgccgtaggcggcaagcgcggtcaggatttcggccgtcgtcatggcggcgatcatctccggccgcttgtcgcgcacggcgtggccgccgatcggcaacgtcagccgctccatccaggccttgtcgccaccggcctcgcgctgcagccagctcgcgaaggtggcgcgcttggtggccgagccgatcatgccggtataggcgagatcggtgcgggcgagcgcctcgcgggcgatcaggaaatcgagcgcgtgatcatgggtcagaatgacgacggcggcgccctcgcgcatctcctgcaccagcgcttcgggcatggcgacgagccgggcggtgatgccctcgggcagatgcgcgagttcctcttcgcgggtctcgatcacggtcacgtcgagcggcagcggcgacagtgcgacggcgagcgcgcggccgacatggccggcgccgaacagccagatctccggccgccgcgcggc

SEQ ID NO: 30 - DNA, 52987 bp, Rhizobium matallidurans
  source 1..52987: mol_type = genomic DNA
cgcataatgaaattatgcgctttccttcggcgtcagaacctgacggccgcggtacataccggtcttcagatcgatatggtgcgggcgacgcagttcgccggagttcttgtcttcaacgtaggtcggtgccttcagcgcgtcagcagagcggcgcataccgcgcttggacgggcttgtttttctcttcggtacagccatttttcttactccacttcacaggcgaacacatccaacggccagactggcggccgaaacgacgtatcgcgatttcggaaattttgcgcgcttatacatgccttggaggggcttgaccagtccccagctttattttttgagattcacttgaatctctcatcagacctcgtcttcctcgacgatccagggctccgcgcgcgccgcgtcctcccacgccttccaggccggatgggccgtcatcgccgccatataggtcaacgtgtcggccgacgccaccagatcgtagatctcgaagcgattgacgacgggcgcgaacatcgcgtcggcgcccgagaattcaccgaacaggaagggaccgccggaatgggcgcgcagatcccgccagatcgtctcgatacgcgcaacatcggccatgacgccgtcggcgagcgcgatgcggcccttcgggcggcgcatgttcatcggacaggcgttgcgcagagccctgaagcccgagagcatctccatcgacacggcgcgcgccacggcccgctcgtcccgcgccttcggccacagccccgcttcgggataaagttcggcggcgtattcgataattgcaagcgactgccagacacgggtggcgccatgctgcagcaccggcacctgcccggtcggtgaaaacgcccggaaatgcggattgccggcagccatgtcgaagggaacaacgacctcctcgaacggaattccggccgccgtgagcgcgatccaggggcgaaacgaccatgaggaatagttcttgttgccgatatagagcttcagccggtccaaggatatctccctttgagccggcgcgggggtccgtgcacggcatccttcatacgtaggatcacgcatgccagatgatgtcggcggtcaccagcgacatcttctgatgtcagttataaatgcacctgatgtaatcgcccgaaccccgcgcccggcgctcgatgacggcggcgaggctgcgcagtcccctgccgggtttgccggcgttgcggtcgatcggattgggcagcgacacggcaagcagcgccgcctgccggctggtgagcttcgaggccggcaccttgaagtgatagcgcgccgccgcctcgatgccgtagatacccggcccccattcggcgacattgagatagatctccatcaagcgccgtttcgaccagacgaaatcggcggttaccgccagcggcagttccaatgccttgcgcacgaaggaacggctgttccacaaaaacaggttcttcgcagtctgcatcggaatggtgctgccgccacgcgtcgcttcgccgcgcagcgtatcggtgaccagcatccgcatctcgccccagtcgacgccgccatggaagcagtattgcccgtcttccgacatcatcaccgactgcaccaggacaggcgagatatcgtcgatcgacacccattgccggtcatagccacgcagcagcgccaggtcgcgcagcatcagcgtcgagaccggatggatgaagggcagcaggtagaggaagatcagcgcatagggcaggacgaggagtgccacgatcgccagaacgatacgcatcataagcgaacgacccttcagccaaaacagggcgcgccgatggatcggcatggccatgctgtcgtctgtctccggcgtgatgtccaatgcccctgacccagtctcgttcccctatcctccttaccgcctgcaaactggcatggccagacacaaaggaaatcttggttgctctgtcgacaattccgttgcaagcccaagcccgcccgtgccaaacaacgccgcatgaacgcgcacctgaagacattcgaaagccggctcgccgccaacgcccgtgagatcgaaggcgtgctcgacgcgctgctctcgcaacaggtattggacgacgagatcgcgcgcccggaaaacctgcgctcggccatgcactacgcggtgctgaacggcggcaagcggctgcgcccgtttctggtcgtcgagacggcgacgatgctgggtggcgatcgcgacgccgcattgcggatcggcgcggcgctggaatgcgttcactgttattcgctcgtccacgacgacctgccggcgatggacgacgacgatctgcgccgcggcaagccgaccgtccacatcgcctatgacgaggcgaccgcgattctggccggcgacagcctgctcacctacgccttcgacatcattgcctcgacatcgggtatcgacgagacgagcaaggtcgcgctgatcctggcgctgtcgcgcgcatccggcctcggcggcatggccggcgggcaggcgctcgatctggccgccgaaaagcgcgcgccgaacgaacagggcatcatcatgctgcaggcgatgaagacgggtgcgctcatccgtttcgcctgcgaggcgggcgccatcgttgccggcagcccggccgaggaccgtgcggcgttgcgccgcttcggcgaacggatcggcctcgccttccagctcgccgacgacatcctcgacctgaccgccgacagcgccaccatgggcaaggcgaccggcaaggacgccggccgaggcaagggcacgctggttggcctgcacggtatggcctgggcggaagcgacgctgtcggcccatgtgaacgaggccgaagcgctgcttcagccctatggcgagcgcgccgcagttctcgtcgaagcagcccgcttcatcgccgaacgcaagagctgaggcggacaagcgccgcaatcgccgaaaaagcgtcaccgcgacaagattccggcacgctcccaagccccgctctcttgccgaacgcagagcagcgcgcctagaacggctggacgcgccgcgccaccgcgcggccgaccgggaacagcgccatgcacgagaccctcagctaccttccgcagatcctgcccgcctacatcgcctatatcgtcgccgtcatcagccccggcccggccatcatggcgatcgtctcgacatccatggtccatggccgcaaggccggcatgacgatctcgctcggcattttcgccggctccttgacctgggcctgcgcggcagcactcgggttcgccaccatcctcaacacctacgcggtcgcgctcgagatcctgaagatcttcggcggcctctatctgctctatctcgcctacaaggccttcaaggccgtgcgcgccaaccccgatatccagcaggcaacaacgcctaggaacatgtcgacgcgtgcattgctgttgcgcggctacggcatccacgtcaccaatccgaaggcgatcttcgcatggctggcgatcatcgcgctcggcatgccgcagggcgcgccggcatcggttgcaggcctgatcgtcggcatctgcctgacgactggcttcatcgtcttcatgggctatgccgcgctcttctcgacgccacgggcgctgaagatctacgtcagcctgcgccgctggatcgaaggcgccatggcggccttctactgcttcgcggggttgaagctgctcaccagccggatctgattttgggtaaggaaaacgacggcgcggattactccgcagccgtcctgttctggccgaagcgcttttcgatgtaatcggcgaccagcgcctcgaaatcggatgcgatattcgggccgcgcagcgtcatcgccttctgtccgtcgatatagacgggcgcggaagggctctcgcccgtgcccggcagcgaaatgccgatatcggcatgcttgctttcacccgggccgttgacgatgcaacccatgaccgcgacgttgagcgcctcgacacccggatacttgtcgcgccacacgggcatgttcttgcgcagatcgttctggatgttctgcgccagttcctggaagaccgtggacgtggtgcgcccacagccgggacaagccgcgacgacggggacgaactggcggaagcccatgacctgcaggatttcctgcgctacctgcacttcgcgcgtccggtcgccattcggctccggcgtcagcgaaacgcggatcgtgtcgccgatcccgtgctgcagcacatagcccatggccgccgacgaggcgacgatacccttggtgcccatgccggcttcggtaagaccgagatgcagcgcatggtcggagcgctccgacagcatggaatagacggcgatcaggtcctgcacctggctgaccttggccgagagaatgatgcggttgcgcggcaggccgatctcttcggcgagattggccgagatcagcgccgactgcacgatcgcctcccgggtcacctggcgcgccgaaagcggcgagcctgcctcggcgttctggtccatcagcgcggtcagcagttcctggtcgagcgaaccccagttgacgccgatgcgcacgggcttgtcgtagcggatcgccatctcgatgatgtcgccgaactgcttgtccttcttgtccttgaagccgacattcccgggattgatccggtacttcgccagcgcctcggcgcaatcgggatgatcggcaagcagcttgtggccgatatagtggaagtcgccgaccaaaggcacgtccatgccgagacgcagaagccggtcgcggatgcgcggcacggcggcggaactttcatcgcggtcgacggtgatacggacgagctccgagccggccttgtagagcgcggccacctgggcgaccgtggcgtcgatatcggccgtatcggtgttggtcatggactggacgacgacgggcgcgccgccgccgacgatgacgccgccgacatcgacggcgacggatgcgcggcgcggtttcggatcaaaatccgtagctgaagacatggatagagctcttgaacccttaaatttcgtgcctttcaggtggatcatgaccgcccgcttgtcaacccgcgggatcgatcactttgtgcggcggcggcctcaatggccaccaccggaaatgccgtcggcgtagcgcgccagattggaaagcgccagcacgacgaggagaagcgccggcagcgcgatgaacacgacggagaagccgacatgctccgccacgaagccgatggccgacggtgccaccagcatgccggaatagcccatggtggtgacgacggagaggccgatccccgccttcagatgcggaatgttgcccgccgccgagaaggcgatcggcaccatgttggagatgccgatgccgcagaaggcaaaaccgaggatggcgatttccgcattcggcgcgaaacctgcgagaagcatgccggcgatggcgaacagggtgcagatcctgagcgtcctgacgccgccaaggcgatcacgaacgaggtcgccggcaaagcgcatcgccgccatcgtcagcgagaaggccgcgaagccgaagcccgagagcgcaaccgaagcaccgagttcctcgcgcaggtagagagcgccccaatcgagaaccgcaccttcaggcatcatggaaaacaaagcgacgagaccgagcagccagggcagcggcaccatcggcaaccgcgtcttctctttcttcgtgtcgggatgcggctggtcggcaaggatcatgttccaggcaaccgcaagcgtaatggcggcaagagccgtggcgaccacggcatgcgagaacacgccgaaattggcgatcagcagcccgcccaggccagcgccgatcaagccaccgaggctccagaaggcgtggcaggacgacatgatcgcccgccgcatcgattgctcgacggccacggcattggcgttcatggcgacgtccatggcgcccatgaacccgccgaacaggaagatcgcgattgctgccgtcacgacattgggcgccagcgtcagcgccagcaggccgggcagcaggcagaccgccatggcgagcgacacgacccgcgatccatgccgggcgatctgcgcgccggcgatcggcatcagcgtcagcgaaccgatcccaagcaccaggatcatcagcccgagctgaaacttgctgagctccagccgctcggcgaattcgggaatcttcggcgcccaggagccgacggtgaagccgttgatcaaaaacagcagcgacaccgccgtcctgttcctggtgatgtagccgcttcttgccggaagcgttgcgttgacgtgattatccatgtctcttcccatatgcactggtgccggcactcctcgtccggcatgtcattgaacgatatctatacggcttcgccggcaaccagcgtcttgcacccaaggtcgcgatagcgggcgagcatcgcggcatcggcatcgcgctcgaccacgaggcaaccgcagtcggcggcggcaagcacgccatgcggcgcggccgtgccgaacttgtccgaggtgaccgcgaccagcacctgccggcttttgctggcgacgaagcgcttgaactccgcatcctcgaaaccgaagacggtgacgccggccgcgatatcgaggccgcatgcgccgagaatgcacagatccggcgatagcggctccatgtcgcgcatcgccttcgcccctagcgcgccgcccacctgccggtcgatcaatccgccgatcaggatgacgttgacgagcggcttgtcgatcagcgccgtggcgatcgacggcgcgtttgtcaccgccgtcaacggcagatccatcggtagcgccatggcgatcgccaggttggtgctgccggcatcgaagaacacggtcgtatcggacgcgatctgcgaaacggcagcagccgccagcgcctccttgcggtctcgcgcgataccggcgcggtgcgtgaggctgccgcccgccggcgagaccggcagcgcgccgccatagacccgctcacaaagacccgcagccgccatttcgcgcagatcccggcgcaccgtatcctcggacacgccgaattccgccgcaagctcggcggcgagcacccgcccatgcgtctgcagcttgcgtgatatcacgcttttacgctcctgcagcagaagttcgctcgtgctcatgcctgtttcagcccgctcaatctcaaatcgattgaatcatgcataaaccgatacaaacgtgcacgcaagcaggatgcaaacatgcgtcgcttcacattgtgaaacactcgacaccaaatccgtgataaatgagaaaaatattcgcagctgccgattttctttgcagtttttgacgcatcgcggcatcgagttttctgcgattttcgcgccatcgaacacatctggtgaattggatagacatatgaacctcctgaagaccctcgccaccgccgccctgatccaggccgccgccctgatgccggcgctggccggcgaaaaccttgccgccatcaagcaggcaggcgtgctgaagatcggcaccgaaggcacctacgccccgttcacctattttgacgacagcggcaagctggtcggctttgacgtcgagatcggcgaagcggtcgccgccaagctcggcgtcaagccagaattcgtccagggcaagtgggacggcctgatcgccggcatcgacgccaagcgttacgacaccgtcatcaaccaggtcggcatcaccgatgcgcgcaagcagaagtatgacttctccgagccctacatcgtctccaaggccgtcctcatcgtccgcgacggcgacgacagcatcaagagcttcgccgacctcaaaggcaagaagtcggcccagacgctgaccagcaacttcggcaagctcgccgagcagtccggcgccgaactcgtcggcaccgacggcttcgaccagtcgatccagctggttctgaccaagcgcgccgacgcgaccatcaacgacagcctgtccttcctcgacttcaagaagaagaagcccgacgcccccgtcaagatcgcggcacagcaggcagacgccgactattccggcatcatcatccgcaagggcgagccggaacttctggaagccatcaacaaggcactggtcgatatcaaggccgacggcacttaccagaagatcgccgacaagtatttcggccaggacgtctcgaagtaagttcaggccctcaggcggcccctccagccccttcccgcaacggggaggggctttttattgggcggcctccgacgaaatccggcataagtgccgcagctgaccgcattttacgcaaacggcacaacctcttcgaccttcccccttgtgggaaggggttggggaggggtattccacgtcaacgcataacccgtgaaagggaatacccgtgccgtattggctccaattgatgttggactcgctgccgacgctcctgtggggcggcatcaagttcaccgtcccgctgacgcttctttcctttgtcttcgggcttgcccttggcctgctgacggccgttacccggcttttcggcccggcgccgttgcgggcgatcgcccgcttctacgtctggatcatccgcggcacgccgctgctcgtccagctcttcgtcatcttctacggcctgccgagcatcggcatcctgctcgacgccttcccggcagccctcatcggcttcacgctcaacatcggcgcctacagctccgagatcatccgcgccgtcatttcctccgtgcccaagggccagtgggaggccgcctattcgatcggcatgagctggcgccaggcgatgagccgcaccatcctgccgcaggccgcccgcgtcgccgtgccgccgctgtccaacaccttcatctcgctggtcaaggatacgtcgctggcagccgccatcaccgtgccggaactcttccaggccgcccagcgcatcgtcgccaccacctatgaaccgctgatcctctatatcgaggcagccctgatctatctcgccctgagctcggtgctctcggtcctgcaggtcaggctcgaacgccgctttgcccgctatggcggcatgctggaggcaaacgcatgatcgagcttgataacatcgaaaagcgcttcggcgacgccgtcatcctgaaggatatcagcatccgcattcccgaaggcagcgtcaccgcgctcgtcggcccatcgggcggcggcaagagtacgctgctgcgctgcatcaaccttctggaaatcccgacggcgggcacgatccgcctcggcgaggaaaggctgaccttcaagcccggccagaagaccagctggcaggcgatccagaagatccgccggcagaccggcatggtgttccaaaacttccagcttttcccgcaccagacggcgatcgaaaacgtcatggaaagcctggtgaccgtactcagatggccgaaggaaaaggcccgcgcccgcgccatggaactgctgaccaaggtcggcatggcccacaaggccgatgcctggccctcgacgttgtcgggcggccagcagcagcgcgtggcgattgcccgggcgctcgccccctcgccccgcgtccttctctgcgacgagccgacatcggcgctcgacccggaactctccgccgaagtcgtcgacgtcctcgggcgtctggccagcgaaggcacgaccatggtcatggcgacccacgacctcaggctcgcttcgaagatcgccaacgacgttgtcttcctggaagcgggaagcgtggtcgagacgggcagcgcgcgcaatgtcttcaccgcgcccgaacgcgaacgcaccaagcgcttcatctcgacgatcaacgccgcgcacacctacgacatctgagggcagacatcccgacgaagcagacatgaaaaaggcggctccgaggccgccttttcaattttttagctggatatcagcccgcgtaggtgaccagcaaatccttggcgtcgatctggtcgccggccttgacgagaacctcggcgatcgtgccgtccttctcggcgtggatcgccgtttccatcttcatggcttcgatcgacaccagcacgtcgccggcgctgaccgtctggccggccgagacgaaggcgcgggagatgacacccggcatcggcgcaccgacatgggcggcattgcccggctccgccttgcggcgggcggcggcgccggtggcgccatgggcgcggtccggaaccttgatgcggcgcggctggccgttgagctcgaagaacaccgtgaccatgccctggctgtcggtgccgctcatcgcctggttgacgatgacgagcgtcttgcccttctcgatatcggcgaacagctcctcaccatcgccaagaccgtagaaataggcgggcgtcggcagaaccgaaacgggaccgtaggtgtcggacgccagcgcgaagtcggtgaagaccttcggatacatcagataggaggcgaattcgaagtcgctgacctcgcgctccagcttggtctcgatggactttcgctcggcatcgagatcggcatcctcgagcagcgaaccgggacgcactgtatagggggcttcgcccttcagcgccttcttctgcagcgcctccggccaacccgacggcggctgtccgagatcgcccttcagcatcgaaacgacggattcggggaaggacacgtccttggccggattgacgacatcggcgaccgtcaggtcctggctcaccatcatcagcgccatgtcgcctaccaccttggaggacggcgtcaccttgacgatgtcgccgaacatctggttggcgtcggcataggcctgcgccacctggtgccagcgggtctcgagaccgagcgaacgggcctgctccttgaggttggtgaactggccgccaggcatttcgtgcagatagacttcagaggccggtcccttgagatcgctttcgaaggccgcgtactgatggcgcaccgcttcccagtagaaggagatgcggcgaatccattccgggtcgaggcccggatcgcgctcggagccgcgcagcgcctccacgatcgagccgaggcagggctgcgaggtattgccggacaaagcgtccatggcggcatcgacggcatcgacgccggcgtcgacggccgcgagaacggtcgcggccgcgatgcccgacgtgtcgtgcgtatggaagtggatcggcaggctggtcgcctcgcgcagggccttgaacagcaccttggcggcggccggcttcaacaggccggccatgtccttcagcgcgatgatgtgcgcgccggccttttcgagctgaacggcgagatcggtgtaatacttcagatcatacttcggacgcgccgagttcaggatgtcgccggtatagcagatcgtcgcttcgcagagcttgttctcctcggccaccgcatccatcgacacgcgcatgttctcgacccagttcaggcagtcgaagacgcggaagagatcgatgccgccggccgctgcctggcgaacgaagtatttgacgacgttgtcagggtagttcttgtagccgacgccgttggcgccgcgcagcagcatctgcagaagcaggttcggcgccgcctcgcgcacatggcccagccgctcccacggatcttccgtcaggaagcgcatcgagacgtcgaaagtcgcgccgccccagcattccagcgagagcaggttcggcagcgcatgcgcgtatgtgccggcgatgcgggcgatgtcgtaggtgcgcatgcgggtcgcgagcagcgactggtgaccgtcgcgcatcgtcgtgtcggtcatcagaacgcgcttttcgttgcgcatccattcgccgaacttctttggccccagcgtgtcgagcagctgcttggtgccgtccttgatcgtcgtgccgttggtgtagggcacgaccggctcggcggcatccgccgtcggcttcggccgatccttggcctccgggtggccgttgacggtgacgtcggccagataggttagcagcttcgtcgcgcggtcctggcgcttgacctgctgaaacagctcgggcgtcgtgtcgatgaagcgggttgtgtagctgttgtccttgaacttcggatgcgtgatgatcgcttccaggaaggtcaggttggtggcgacgccgcggatacggaattcgcgcaatgcgcggtccatgcgcgagatcgcttccgacgggcccggcgcccaggccgtgaccttgaccagcagcggatcgtaatagcgggtgatgatggcgcccgaataggacgtgccgccgtcgagacgaataccgaagcccgacgccgagcgataggcggtgatgcggccgtaatccggaatgaagttgtgctccgggtcttcggtcgtgatgcggcactgcagggcatggccgttgagcttgatatcggcctgtgcgggcacgcccgattccggcgtgccgatcgcgaagccgtcgaggatgtggatctgcgccttgacgatatcgatgccggtgacgacttcggtgaccgtgtgctcgacctggatgcgcggattgacttcgatgaagtagaatttgccggtgtcggcatccatcagatattcaacggtgccggcgccgacatagcccgtggcacccgcgatcttcagcgagtaagcggccagttcctggcgctgcgcttcggaaagataaggggccggcgcgcgttcgacgaccttctggttgcggcgctggatcgagcaatcgcgctcgaacagatgcacgacattaccgtgcgtatcgcccagaatctggctttcgacgtggcgagcgcgctcgacgagcttttcgagatagacctcgtccttgccgaaggcggccatcgcctcgcgcttggcttccgtcacctcgcgggcaagatccttcggatcgcggatggcgcgcatgccgcgaccgccgccgccccaggaagccttgagcatgaccggatagccgatttcgtcggccatgcgggcgacttcagccatgtcatcgggaagcggatcggtggccggaacgacgggaacgccgaccgaaatggcgaggttgcgggccgccaccttgttgccgagctggcgcatcgtatcggccttcgggccgatgaagatgatgccggccttgttgcaggcgtcgacgaattcagggctctcggacagcaggccatagccgggatggatcgcatcggcaccggaaagcttggcgacgcggatcacttcgtcgatcgacaggtagctctcgatcgggccgaggtcgcgtgcaagatgcggaccgcgaccgacctgatagctctcgtccgccttgaagcgatgcagcgcaagtttgtcctcctcagcccatatcgcgaccgtttttatcccgagctcgttggccgcgcgaaagacgcgaatggcaatttcggaacggttggcgacaaggatcttggaaatgggcaaatgcggtctcctcactgcatctaaacgggcattgctgcacccgcgaaaggagtcttaacgcgctgtcacggaaagttcaatttcctcgatgacgacaaattgaatttctctaaactacgaaatgagcccatggcggaaagcgacggcgacggcatgctgacggttcttcgccttcagcttgtcctgcaggccgttcatgtaccaatcgaccgtgtggttcgagatttccagcattttcccgatctcgaccgacgtcattccctcggcgagatactgcaggatttccatttcgcggcgcgtcagccgcgtgtcggcgcccggtagatcgtccgacaccgaagcgtcttcgccgcgcagttcgagaagccgccagaaggcccgcttggcgatcgcatcgaacagcgtgatctcgagcggagagaggtcgacgggcttgccgccggcgctcagatagccgagcacgccgcttctcccatggatcggaaagatgtagccgtccttcaggccgtatcccgatgccgcggacatcacctgctccattcggcggtaatgcgggtccttgcggaaggccgcaagcccgtctttccagcggaatggctgctgcgcgaaggccagatagcggatcgtcggatcgctcagcatgtatttcttgccgacatagacctgcggccagccctcgggccactcgccggcgagcgcggccccggtcaaatcctcgctatgcctgggataccgaagcaggccatgaaactcgaagccgtaagactgaatgacgtgcttcagctcggcaaccaccgcttccggcttccggcactcttcaaggacgacaagtaattgaattaatgaatgaatattcactaaatgcccccatcccgtcacaggctctcaagggaagccgctgcgacaggatttgccccgatagcgaacggttatcgatgcaattaaaattaaaactcagaatatcgtttacggttgtgccagtttgacgcgacaacgcaagggttaaatgaggggcctttttatttcactaagaaattttaccacatctggcctcccgctcgcgaacgcggcatcgcgcggcggcgaaattccaacaatgaatgccttgttaatcgccagttcagataggttttcgtagcatcgcaacatccgctatttcgcagatgcaaaaaaggaagtcgccgtgtcgcttttcaaggtctatgcaagagctttgcgctatcttggcgcctataagttccgcgtatccctggtcgttatcgcgaacatcgtgctcgcagcgatcaccatcgccgagccgatccttttcggccgcattatagatgcaatttccggcaaaggcgaggtcaagccgatcttgttcatgtgggccggtttcgccgtcttcaacaccatcgccttcgtgctggtcgcccgcgaggctgaccggctggcgcatggccgccgcgccacgcttctgaccgaggctttcggccgcatcatttccatgccgctgtcctggcatcatcagcgtggcacgtccaatgccctgcatacgctgctgcgcgcctgtgagacgctgttcggcctctggctcgaattcatgcgcaatcaccttgcgaccgccgttgccatcgccatcctcatcccgacggcgatctcgatggacgtgcgcctgtccgcggtgcttgtcgtgcttggtatcgcctactggatgatcggccgtctcgtcatgagccgcaccaaggatggccaggcttcggtcgaaaaccactatcacacggtcttctcgcatgtcagcgactcgatcagcaacgtttcggtgctgcacagctacaaccgcatcgaagccgaaaccaaggcgctgaagtcctttaccgaacgcctgctgcaggcccagtacccggttctcgactggtgggcgctggccggcgcgatgaaccgcatggcttcgaccatcgccatgatgatcattctcgtcatcggtaccgtcatggtccaggccggcgagctgcgcatcggtgacgtcatcgccttcatcggctttgccaacctgctgatctcgcgcctcgaccagatgcgccagttcgcctcgcagattttcgaggcccgttccaagctcgaggacttctatacgctcgaggactcggtccgcgaccgcgaagagcccgccggcaatgccgacatcaccgacgtgaagggcgaagtcgagttccgcaacgtgtcgttccgcttcggcaacacggcacagggcctgcataacgtgtccttcaccgccaaggctggccagacggttgcgatcgtcggtccaaccggctcgggcaagaccacgatgatcaacctgctgcagcgcgtttacgaccccgacagcggccagatcctcgtcgacggccacgatacgacgaagatcacccgcaagtcgctccgtcgctatatcgccaccgtgttccaggacgccggcctgctcaaccgctcgatcagcgacaacattcgcctcggccgggagaacgcttcggatgaagacatgcgccgtgcggccgaagccgcagccgccgccgacttcatcgagacccgcgaagaccagtacgacacccatgtcggcgagcgcggcaacaggctttcgggtggcgagcgccagcgtgtggccatcgcccgcgccatcctcaaggatgcgccgatcctggtgctggacgaggcgaccagcgcgctggacgtcgagaccgaaaaccgcgtgaaggctgcgatcgacaatcttcgtcagaaccgcaccaccttcatcatcgcccaccgtctgtcgacggttcgcgaagccgacaaggttctcttcctcgacaacggccgcgtcgtcgaagaaggcagcttcgacgagctcagccagagcaacggccgcttcgccgccctcctgcgggcaagcggtatcctgacggacgaggaagtccgcaaggcacacacgaccgaagccgcctaagaaaggcacttcgcgaaaacgctagaagccggatggtccgccatccggcttttttcgcgcccggaagggcgctgcggcgggagagccttgaactgcaacgccttagactaaagtcataatcccaaagccgctctccgtaatgaaccgcttttctgtcacagtcccgtcaggcgagccgcgaccaggggtatgctttgaggagagtatggtcgcgcgccgcgttcagatcattctgtggaggacagaacatggcaaatgtcgcaagcgtcgggggcgccaaagccggaccgatgacatcggaggaaaagaaggtcatcttcgcctcctcgcttggcaccgtattcgaatggtacgacttctatctctacggttccctcgccacctatatcggcgcgacctacttcacccaatatccggaagccacccgcaacatcttcacgctgctggcctttgccgcgggcttcctggtgcgcccgttcggcgcgctcgtcttcggtcgcctcggcgacctcgtgggccgcaaatacaccttcctggtgacgatcctgatcatgggtctctcgaccttcctggtcggtatcctgccgggtgccgccaccatcggcatcgccgccccgatcatcctgatcgcgcttcgcctgctgcagggcctggcgctcggcggcgaatatggcggggccgccacctacgtggcagagcacgcgccgaacggccgtcgcggctacttcacgtcgtggattcagaccaccgcgacgctcggcctcttcctgtcgctgatcgtcatcgtcggcgtccagtacatcatgggcaaggaggccttcgccgcctggggctggcgcataccgttcctggtctcggtcatccttctcggcgtctccgtctggattcgcgtgcggatgaacgaatcgcccgccttccagaagatgaaggcggaaggcaagggttcgaaggcgccactgaccgaagccttcggccagtggagaaacgccaagatcgcgatcatcgcgctgctcggcgccaccatgggccaggcggtcgtctggtacggcggccagttctactccctgttcttcctgcagaacgtcctgaaggtcgatctgcaggcggccaacatcatggttgccgtcgccctcattctcgccacgcccttcttcgtcatcttcggcggcctgtcggacaagatcggccgcaagcctatcatcatggccggcctgctgatcgcggccgtcacctacaatccgctgttcaaggccctgacctggaccgccaacccggcgctcgccgaagcccaggcctccgtcagggcaacggtgacggccgatccggcggactgcaaattccagttcaacccgacaggcacatccaagttcaccagttcctgcgacgtggcgacagccttcctgaccaagaactcggtaccctatgacgttgtgcccggccctgccggccagccggcaacagtcaagatcggcaatgaaaccatcaccagcttcgacgccgtcgcggccggcgacaaggccaagggcctgacggcggccttcgaaaagagcatcaacatcgccctccatgacggaggctacccgctgaaccgcggcgccatcaaggtgccggacgcgaagctggacgccttcatcgccgccaatccggagcttgccctgaacgccgacgcgatccgctcgggcgccaaggaaaccatgcccgccgacaagctggtggcggccaagctgctgatggcggatgaagccaacggtgtcaccgacatggcggtctacaatgtcgccggcggcggtaccttcgccatggcggccgatccggcccgcgtcaactggatcggcaccatcgccatcctgttcgtgctggttctctatgtgaccatggtctacggcccgatcgccgccctgctggtcgaactcttcccgacccgcatccgctacaccggcatgtcgctgccctatcacatcggcaacggctggttcggcggcctgctgccggcaacggccttcgcgatgagtgccgccaccggcgacatctacttcggcctctggtatccgatcatcttcgccgcgatcacacttctgatcggcctgattttcctgccggaaaccaaggaccgcgatatccacgccatggattgaccatgccttttatgacagaccaggcccggcgctccaaaggcgccgggttttctattgacggaaacagccgcttgggctccggccagccatcgatgccagggcgaaacagcagattgtggcgtgcgtagacgatggcgatcatcgtcgagaaccacccaccaagcgccagaccggcgatcacgtcgctcggatagtgcacccccaccatcacccgcgtcatccccaaccacagcgcgaaggcgatgaaggcgaagcgatagcgcggaaacagcagtgcgaaggcggcgaagaaggcgccgatcgtcgtcgcgtgcccggatggaaagctctcgaaggaagcgccggaaaagggcgaaaagaagaaaattccctcgtcctggaaatgctccggccgcgcccgcccgatcacccgcttgaggagattggcgaccaatcccgacagcgcgatcgatgtcaggagatagcagccgatccagctgatcctcagcgcctgcaggcggtgccggatgtttgtcgccgtccgcgacgcggcccagccctggaacaacaggaaggcactaacgatgatgatccaatcggatttgccgaagtcggtcagcatcattccgatcctgcgaacggccgccggcacttgatcaccgccgacaggatcatcgaacaacagaagcgaaatgatcacggcattgaccgtgacgaaaagacaggaccgccaacgcagacgcggcctgccgtgagagcaacgaagcctgcgtttctcgagggacgagagaaaagatctcatatctgtcggctatccgggtcaggggttgtcgatcaacgaccgagacctagcagaagcagaatacagattttttacggacgtttagagcaggcggctaagcctcggtgtcggccacccgccatcgcggccgatggaaaacaccagaccgaaacgcgcaaacaggatcgatgtggcaaaggcgatccacgcacccagcgccaacccggcggcaacgtcgctcgggtaatgcacgccgatgatcacgcgcgtaaccccgagccagaggccgatgccgataaagccgagacgaaaccgcgggaaaagcagcgccagcgccacgaacagcgcgccgatattggccgcatggccggatggaaagctctggtacaggaaatccaggttgaacggcacgaaactgaagatgccttcctgatcgtagatcagcggccgcgcccgcccgatcatgaacttcagaagattcgcgacaatggcgttgaacaggacggaaagcacgacataggcggtcatctgcccgaaatagatcatcctgaaccgtccgcgcaccttccacaggcgccggcggaccaggtaggcggtcgcaaggatggtggaaaggcccgcgagaatccaggcaaacctgccgatatccgtgacatcgcccgcgatcgagatcagcggcggcgccagatccttggcggccataccgagcgggcgatcgaacacgaagaaggcgatggccaccgcattgatcgcggaaaaagcgaaacccttccagggaacccgacgatggatcgtgcggcgcgcctcatagcgctttttcagatagtcccagaaacccggcccgcgatcgatgctctcgctcattccactcccgctcttttctcaatgcagaagggagataggagctgcggcggacgccttcaatgcaaaggccctccgcatcatcagatgcgaagggcctgaaaggtgtttcacgtgaaatatcaggcggaaagcgccttgaactcggaaaggatcgcctcgcccatctcgatcgtgccgaccttcttggcgccttcggccatgatgtctgccgtgcggatgcccttgtcgagcacgttggcgatcgccttctcgaggttgtcggcttccttgaccatgccgaaggagtagcgcaggcacatcgcaaacgaagcaatcatcgcgatcgggttggcgatacccttgccggcgatgtcaggggctgagccgtgcaccggctcgtaaagcgccttgcgcttgccggtcttgccatcgggcgcaccgagcgaagccgacggcagcatgccgagcgagcccgtgagcatggcggcgacgtcggacagcatgtcgccgaacaggttgtcggtgacgatgacgtcgaactgcttcggcgcgcgcaccagctgcatgccgccggcatccgccagcatgtgctccagcttgacgtcggaatacttgtccttgtgcgtcgcggtgacgacctggttccacagaacgcccgacttcatgacgttgcgcttttccatcgagcagacgcggttctggcgcgtgcgggccatttcgaaggccacggccgagatgcgctcgatctcgtaggtgtcgtagacctgcgtgtcgatggcgcgcttctggccattgccgagatcggtaatcgtcttcggctcgccgaaatagacgccgccggtcaattcgcggatgatcaggatatcgaggccctcgaccagctccggcttcagcgaggaagcggcggcgagcgccggatagcagatggccggacgcaggttggcgaacagctcgagatccttgcgcaggcgcagcaggccggcttcggggcgcacttcatagggaacgtcgtcccacttcgggccgccgacggcgccgaagagaaccgcatccgcggccagtgccttctgcatgtcggcttcggagatcgccgcgccgtgcgcgtcataggcgctgccgccgaccagaccttcgtcggtgacgaaaccggcagacatttcctcgttcatgtaggcgatgatcttgcggacctcgcccatggcctcgggaccgatgccgtcaccagggagcaggaaaagattgcgcgtcgtcatgaaaccctccgagaaaaccaagttgcggcttattatccctcgacagaaggcatttcaagcgacgaagaggccgtttcggtacggttgacgccagagttgaacgatcggttgaccccgcgatttgcctgggcaacaagaagggcatcgtgaccatgatccggaaaacagccatgcccgccgcaccgctccatctcgacaccccgctcttcctgacatcagcggactatagcgccgcaaacagaccgctctggctgaagctcgatgcgctgcagccggcgggaagcttcaagctgcgcggtgtcggcagattgtgccagcacgaggtggaaaacggcgcgaaggagatcttctgcgcctcgggcggcaatgccggcatcgccgccgcctatgccggccgcgcgctaggcgttcccgtcaccatcgtcgtgccggaaaccacctccgaggaggtgcgccgctcgatcgcagccaccggcgccgctgtcctcgtccatggctccgtcttcgacgaggccaacgcccatgcggtcaatctcgccgcggagcgcaaggccgcctatgtacaccccttcgaccatccgctgctgtgggaaggccacggcacgctgatcgacgaagtagtggccaacggcgccgaattcgattgcgtcgtcgccagtgtcggcggtggcggcctgcttgccggcatcgtcgccggcctgaagcgcaacggcctcgataatgtgcccgtcatcgccgtcgagaccgaaggtgccgcctccttccatgccagcctggccgccggcgagcgcatcaccctgcccgccatcacctcgatcgccaattcgctcggcgcgcgccaggttgcccagcatgtcttcgaccttcccaggcatcatccgatcgagagcgtgacggtgaccgacgccgaagccgtcgccgcctgcctgaaattcgccgacgcctaccgcatcctcgtcgaacccgcctgcggcgccgcccttgccgtcgccgacgcccaccccgacctcctcgcccgcttcaagaacccgctgatcgaggtctgcggcggcatcggcgtgtcgctggacaagctcaagatgtggagagaacggctgctctgaagccaaagaaaagccggcgggacggacccaccggcttgatcatgcaatcttgtcgatgcgcttaggcggcccagggatgggcggcggcgttagccttttcgaactggtcgatttccttgcccttctccatcgtcaggccgatatcgtcgagaccgttcagcatgcagtgacgcttgaaggcatcgagatcgaacttgatcgaaccaccatcaggaccggtgatctccatgttttccaggtcgaccgtcaggatggcgttggagccgcgcgaagcgtcgtccaagagcttttccagattttccgggctgaccttgatcggcagaatgccgttcttgaaacagttgttatagaagatatcggcgaagctggtggagatcacgcagcggatgccgaaatcgagcagcgcccacggagcgtgctcgcgcgaggagccgcagccgaaattgtcgccagcgacgaggatcttggcgttctggtaggccggcttgttgaggacgaaatcctcgttcggcgtgccgtcttcattgtagcgggcttccgcgaagagacccttgccgaggccggtgcgcttgatcgtcttcaggtaatccttcgggatgatcatgtcggtgtcgatgttgacaaccggcagaggggcggcgacgcccgtcagcttggtgaatttttccatggcctggcctccagttcggcagagatagtgtgttgatcagcgtttagtccagtttcccggcaaaatgaaggggaatctgcagccccggcccgcacctgaagattcagccggccgggcgcggctgatctagccagccttggcgggctcgttcatcgcccaggagacgccgaaggggtcgcgcagctggccatagcggtcgccccagaacatgcgctcgacgggcatgaccacctcgacgccggccttgaccgcacgctcccaccagaaatcgatatcgtcgacgacgagctgcaacgagaaaccctggtgcttcaggaagggatggccgtgttcgggataggcgtcgctcaacatcagcgagctgccgttgatatagagatgcacatgcatcgtacgccccttgtcatcgggcgggacgacgaacgcctgctcggcgccgaaagcgcgtttgtagaattccgccgccttcagcgcgccatcgacggtgatgtagggcagaagcccgttcttgaccggcggcatggccatctggccggtttgcgtttcgctttccatgcagtcctccattgcgtgatgcttttgcaggcaaaagccttgctgcatctaggacgcgcgagcaaaacgccagccgacagaccgaatgaaataaatgcggctggcagaagcgatcagaccagaagcgatcagaaaaacgcgatcagagatcgatgatcgtgccgcgaccgtcgttccagatgcgcatgggctgaccatcgcgcgtcttggacttcgcccttgcgcagaccggggccgccttcatcttcagcgagagcgcgcgaccgaccatcagcaccgtcaagatggcgccgacggcgagcgtcaccgagaaggtgaagagcgccaatgctgcgaatgcggtgacgcctgcaagcaaaaggaagacggaacgaatattctgcatgggtttgaaacctttctaggaaaggaatgtggtccttcgtcttgtcttctgcaagataagcatggctttttgttgtcttgccatcggtcacaaagcttgacacacattcgtgatgaaccagtctgcccttccccgttcgatgaacctgcgccgttcggtgctcagcgttcccgcgatcaaccctcgcgccctggaaaaaacccatcagctcgattgcgacgcggtgatcttcgacctcgaggattccgtggcgccggagaaaaaagccgaagcgcgcgagaacctggccgccttcttccgaagcaaaccgctcgacggcaaggaacgcatcatccgcatcaacggtctcgacaccagctggggtcgcgccgacatggagctcgtgagcgtgctggagccggacgccgttctgctgccgaaagtcaacgaaccgcaggatatcatggcgaccggggatcttctcgccgatgccgatgcacctgatgaagtgcgcatctgggccatgatcgagacgcctcgcggcatcctcaatgctgcggcgatcgccgaggcagggcgaacggcgggctcaaggctcgattgcttcgtcgtcggcctcaacgacctcagaaaggaaaccggcgtcttgccgcaacccggccggcagtatctcgtcccctggctgatgcaggtgatcctggccgttcgggcttacggcctctgcgcgatcgatagcgtcttcaacgatttcaaaaatatcgatgcgttcgatgccgagtgcgccgaggcgcgcgccatgggctttgacggcaagatgctgatcaatcccgcgcagatcgagcccgccaaccggcatttcgggccggactcatccgccattgccgaagctgaggcgatcatcaaagccttcgccgaccccgccacggatggcctcaacgtcataaatgccgacggccgcatgatcgagcggctgcatcttgtccaggcggaaactctggttcataaagcccgcctgattgcggaacgcctgaaggcgaaaggcccgacggcaaactgaaagacgatgaaatgaagctataccgccttctgaccggccaagacgacgccgccttctgccaccgggtaaccgacgccctcaacaagggctggtcgctgaacggctccccggctatgactttcaactcgcagaccggccaggtcatgtgcgcccaggcaatcgtcaagcatgtcgaaggcaaggactaccaccccgacatgaagctctccgagcagtaagcgctcagacaaagcggccggccacttaacgctcggccgcctcttcggcgctcgcctcgatccgctccatatcgtcgtcgctgagaccgaaatggtggccgatctcgtggatcagcacatgggtgatgatatcgcccagcgtttcgtcgttctctgcccagtaatcgaggataggccgccggtaaaggcggatgcggttgggaagttcgcccgtctccagcgtgaagcgttcggaaatcccgcggccctcgaacaggccgagcagatcgaagggcgtttccagcgccatgtcctcgaacacgtcgtcgtcggggaagtcttcgatttcgatcgtcagattggtggtcagcgcacggaattcttccggcagatggctgtaagcctccatcgccagggactcgaacgtgctgattgtcggagcgtggcgatcctgccaattgtcgctctggtctatgcgagccataaaagctcctttcctttgccgcccatatagagcctttgcagctgattttcgagagcggaatcaagggcaggaataaattcacatcaaacggctgttgactcttcggtcgagctctggaatccataagaacataataggaacatccgatagatggagtgacgtcgtggcacagtcggccgtggcgcgcgagcggctttttgcgctccgcgaaaccattgcgaagcttgaaggaaaaccggttccggcattggcggcggcggagaaccaggctttggccgacaccgttctcgacaagcgtgaaaccgaagacgtcctgcgcctgccgcttggcatccccgctctggatgaagctctcgacggcggcctgccgctcgatggcctgacagagatccgtacgacgttgctgcgcaatgccggcgcaagcagcggcttcgtcctggcgctcgcggccatgctccagcacgggcaagcggaaggcgccaaaggtcagctgccgatcctctggatcgccgacacagtggcgacgatggaggcgggacggccctatgccgtcggcttgagcgatttcggcctgaagccgcggctgtttctgcacgccgccccgaaaaagctggaagacgcgctatggctggcggaaaccgccgtcgaaagcggcgtctttccggccaccattctcgaggttcgcggcaatcccaggcccttcggcctgacggaaagccgccgcctcaacttgcgggcaaaggcatcgcgccgcccgcttttcctgttgcggcaggcagcggaggaagaggccagcagcgccatcttccgcttccttgccgaacccgcgccatccacggcgcggcccttgcccgatggctcgatgctgggcggcagcatcggcaatccgatctttcgcctcaccctggagaaaagccgaaacccggctcccttctccattcttctggagtggaacccccatgaccgccggtttttccctgtccgcccatcagccgacactcactttccaggcgaacgctcagcgcattctggcgctgcatttcccgcatctgccgaccgaccgcatatccaggaagaagtggggtctcgcctggcgtttgcgcaatcgtcctgagacgtcgccgatcgtctgctccggccgtcatgccaacaccatgcggctgacggcgctggacgaggcggccgaagcgatcaacctgaaaaggaacatgggggtcgccgaagcccgcgccatccacccgacgatcgaggtgatcgaggaggacccggccgccgacctgcgctttctcgaaggcatcgccgactggtgcgaccgctatacgccgctggtggcgctcgacggcagggatgggctgtttctcgacatcaccggctgcgcccatctcttcggcggcgaaaaggcgctgctccaggatatcctgtccaggctctttcaaatgggcatcgacgtccgtggcgcgatcacctcctcccccggcctgtcctgggcggtcagccgcttcggccagggaggcgtgatcgaagaggacgagacggaacgggtcgtcgcccctcttccggtcgcagcacttcgcctctcggacgatacggtcacagccctcacgaagatggggctgaagtatattggcgacctgatggaaactccgcgcgcgccgctgacccgccgtttcggcgcaagcgtgctgttgcggcttgaccaggtgcttggaacggacgaggagccgatatcgccgcgtctgcctgtcgccagcctctcggcagagcgccgcttgatggaaccggtcgcggcggaagaagagattctcgccgtgaccgatcagatcgcccatgcgctgaaaccctcgctggaatcacgcggtgtcggcggacgcgttttcgaactcgtcctgtttcgcgtcgatggcaaggtattccgcatcgcggccggcacgacgaggccgctgcgggagcccaggcgcatcgccgtcctgttcgccgaacgcctgcaggccgtccatgacgatctcgacgccggctacgggttcgagatcctgcgcctcaatgtccttcgccacgagacattcgatacggcccagagcgatttcgagggacatcagcaaaatgatgcgtcgctggccgccttcgtcgatcgcgtctccgcgcgattgggatcggattgcctgcggaccttccagctgcgcgagagccatctgcccgaaagggccgtgacttcggttcccgccatcgacggcctgtccgcgaggatcgagcaaggaaacccactgccctcgcgcagcgaaagacccacgcgcctcctgaaaaaagcggagcctatggacgccttcgccatcgaggtacctgacggcgcgccggccaattttcactggcgccgcatgcgccaccgggttgtcaaaagcgaaggaccggagcggctggccatggaatggtgggtcgacagcgcgcaggctccgccccgcgactatttccgcgtcgaggatgaccggggccatcgcttctggatttatcgcgagggcctttatggccatgacgaaaagcagagctggtacatgcacgggatgttcgcatgacacgggctttcttcgagatcggcgccaagaccaacttttcctttctggaaggggcctccaagcctgaggaaatggtgctgcaggccgcaatccttgggctaggtggcatcggcatcgccgaccgcaattcggtcgcgggcgtggtcagggcgcatgcccaggcaaaggcccttcgaaagaagttcgagcgaaaggagcaaggtctgctggaaaagggagaaaggcctgaagacgtgcttgatcctgtccgtctgcaaccaggcgcccggctggttttctcggatggaacgccggatattctggcctaccctcaaaaccgaaagggttgggcacatctctgccgcctgctgagcgccggcaatctgcgcgcggaaaagggtaactgcgtcctcatggaagaggacctcatggaatggggcgaccagatgatgctggccgtcgtccccaatccttttgttgccgacgatccccagcgttgcgacacattcgaagcctgcgtcgggcgtctccgggttcgtttccgtcacaagctctacatgacgatgacatcagcctatgacggtcgcgacaggcgcgtattcgcggtgatcgcaatcctcgccgcccgcaaccgcgtccccctcatcgcctccaatcagccgctctatcacgatactacccgccgccctctgtcggacatcgtcacctcgatcagggaacatgtaccaatcccggaagccggctttctgctggcgccgaatgccgaacgttacttgaaggatgagcgcgagatgcggcgcctcttccgcgactttcccgacgcggtcgaaaacaccgagaaattcttcgccaggctgaatttctgcctggacgagctgaaacacaattatcctgatgagaacgacgcgggcgaaacgccttacgaaacgttggaacgcctgacatgggcgggagcggcaaggcgttttcctgagggcatcgaggagaagacccgggagcagatcgtctacgaactggacctagtgaggcagaagcaatacgcaccttatttcctgacggtgcaccggatcatcatgcatgcccgctacgagctcaagatcctttgccagggtcgcggttcggccgccaattcggtcatctgctattgccttgaggtcaccgaggtcaatcccaagaaaagcgtgcttctcttcgatcgcttcatgtcgacggaccgcgacgagccacccgatatcgacgtcgatttcgagcatgatcggcgcgaggaagtcatccagcacatctacaagcgctatggaaaggaacacgccggactgacggccgccgtcaccagttaccgcacccgctccgcaggccgcgaggtcgcaaaggcattcggcttgtcggaggatgtgcaatcggcgatcggcagcctggtctggggttggtcggatgacaagctgtccgagcgggaagccagggccgccggcctcgacaccggaaaccccgtaaccaaccacgtcctgcaatacgcttccgaactcttgagcttcccccgccacctcacccagcatgtcggtggcttcgtcatcacccgcgatcgcctcgacgaggtcgttcccatcatgaatacggccatgccggaccgctacatgatcgagtgggacaaggacgatctcgacaacctgaagattctcaaggtcgatgttctcgcgctcggcatgctgacctgcctgcgcaaggccttcgatcttcttctgctgcattacgacgtgaagaagacgctggccgatctcggtaacgacaagcatgaggacgaggcgccggtctacgacatgatgtgccgggccgacacgctgggcgtcttccagatcgaaagccgggcgcagatgagcatgctgccgcgcctgcgaccaagggtgttctacgatctcgtcatcgaggttgccatcgtccgacccgggccgatccagggtgacatggtccacccctatttgaagcgacgagagcaacgacagaaaggtatccctatcgactatccgagcccggagttggaaggcgtccttgagcggacgcttggagtaccgctctttcaggagcaggccatgcaaatcgccatcacggctgccggtttcgagcctgccgaggctgaccaactgcgccgcgccatggcaacgttcaagcggacgggcaccatcggcaatttcgaacagcgcttcatcgacggaatggtatccaagaagtaccctcgggaatttgcccagcagtgcttcaaccagatcaaggggttcggcgagtacggctttcccgaaagccacgcggcctccttcgcgctgctcgtctacgcctcctcctggatgaaggcctactatcccgatatcttctgcgcggccatactcaattcgcagcccatgggcttctacgcgccggcgcagctggttcgcgatgcacgggagcatggggtagagatccggccggtcgacatcaacagctcggattgggattgcctgctggaagaggggcgtttcgacagccgccggatcgactttcgccatcgcgagatgagcgatgtcatcaaggccaaccatgctgtgcgcctgggttttcgccaggtcaagggactgtcggagacatcgatcaaggagaagctggtggcgaaccggggaggcggctacatgtccatccgcgatctctggctgcgttcgggcctcgacaagtcggatatcgagcggctggcggatgcggatgccttcaacagcatcggcctttcccggcgcgaagcgctatgggcggtccgcgcgctggatgtgaagagtgccgtcgagcgcttgccgctattcgatcaggcatcccatttcgacctgcaggtcgagccgcaagccaaattgcctgaaatgctgccgggcgaacaggtggtagaggattacaggtatctgtcgctgtcgctcaaggcgcaccctttgtccttcctgcgcgacgaactgcgcggcatcggcatcacccgcagcgtcgacctgctcagggtgccgaacggccgctgggtgacgatcgccggccttgtcctggtgcgccagcgccctggttccgccaagggcgtgatcttcatgacgctggaagacgaaaccggcgtcgccaatgccatcgtctggccgaagaccttcgagaaataccgcgccatcgtcatgggcgcccggctcgtcaagatccgcggcaagctgcagagccagagcggggtgatccataccgtcgtcgatcacatcgaggacatgacgcacgccctggggctgctacagaaggaagcggatcgcttcggcgtctgcgaccgctcggacgaagcacgccggccaaccgccgacccccggcagaagaagctcaacgagacattggaaaaggcggtgatggaaaaaagaatgaccaggcgggataactgcagccgggatgaagcaacggcgtcggtcatgccgaagggccggaattttcattgattttcaatagacggtgctctccgatacccgcaaacaaagaggcgcccgcttcggctggatcaaaagccacccggttggcgggcaaagcggaagcggcagattatgaatctttcttgacaacaagcgtcttctttagcaaaaagacgatagtcattgtcatgtttggaatgaagacgtgcttgtctgcagttgcaactatataaccgacaccgagatccgggaggttatcaacagccttctcgatgaggactgttggcagctcattgtccctgcgaaagtctaccacgccatggagaaacgcggtcgctgttgcggttgcttccccaacgtggtcgatatcatcattcagacgaccgaggactatcacgcccgtcggcactcgacggatgccgaaatatttgatttcatgtctcgcctcagaaacttccatgaagaaaacaggagagcggacattgaaaggcgacaaaaaagtcatcgagcggcttaacgaagccctctttttggaactcggtgctgtcaaccagtattgggttcactaccggctccttgaggattggggttacaccaagctcgccaagaaggagcgggctgaatcgatcgaagagatgcagcatgccgacaagctggttgcacgcatcatcttcctcgaaggccaccccaacctgcagacgcttgcgcccttgcgcatcggccagaacgtcaaggaagttctggaagcggatctcgccggcgaatacgacgcccgcaccgcctacaagaaatcccgcgacatctgtcacgaggcaggcgactacgtctccatgaagctcttcgaagagctcctcatggacgaggaaggccacatcgacttcctcgaaacgcagcttgagctgctcggcaagatcggcgaagccaagtatggccagctgaatgccgactcggccaacgaagccgaataatcacgcaacgggagccggccgcctctggctgccggctctcatcggcagccatccaatcaggcagcgggcaatcccgcgagatgcccgaactcgccgaccacctgttcgtagacgccgcgcttgaaggacacgatcagtcccggcagctccgccatcggcttccagtcccaagcatcgaattccgccgaatgtccgccgggcggcgggtttatggcgatttcgctctcatcaccctcgaaacggaaggcgaaccagcgctgcgtctgtccgcgaaacttgcccttcagtccgataccgatcagctgcggcggcagatcgtagttgatccagttcttcgcttcggcaagcagcgtcaccgtcttcatccccgtctcttcgtagagctcgcgataggccgccgtcagcgggtcctcgcccttgtcgatgccgccctgcggcatctgccagagctgcggcgagccgtcatattccgaattctccgccggaatccggcgaccggcccagacgagcccggcacggttgaggatcatcacgccgacgcaggggcgatagggcagatcttcggctttaacggtcgattggctcatggttatctctgctagggtttcttcagatcgttggcgagcgcggcaaccccaacgatttcgatgccgcgcatcgccgcttcttcggtccattttgaaatggcgtcgatgctctcgtcaaatgccgcggcaacgccgatcgcctgtccgttgcgcttggccacgcgctcgagctcgtcgagcttgttggtgatcgcgttgaaatcgacctgcccgtcgagctgcacgtccgcgaaggcgtagggcgtttccgtacccttggcgaccgccgcggtcttcgactgcgccgaggtgccgtcgtcgagaaacagcagtccgcgcttgccgatgtcacgcatgacaggctccagcgcattcgcatccgagagaaaacggccgccctgatagttcagcacgccggtatagttggtgatctcacccatcgcccggtgcaggctctcgatattctgggccacgcttttcgacgtcagcaacgtgtccggcccaggatcgttcgccggataatcgaagggctcgaacggcacctggatcatgatctcatggccggagcggcgcgcctcctgcatccagcgctgcagactattgccgctggcggcaaacgccagcgtcacctcctcgggcagcgtctggatcgccttttgcgtcccggtctgactaaggccaagaccgctgacgacgatcgcgatccgcgtcccccgcgcgcccgaccatggccgcgcatattgatccatggggcggcgaccatcgggaccgatgatcggcagccgtccgaatggcgacgcctcgagcagcgcatcgttgggtagcgcggccattctcggatcctgccccacctgcatggcatcgaccaggacggggccgtttccgtcgcggggtttcgggctgtacttggtcaccaccgagccgtcgcccatggtcgtccgctcgacattggcgccggaccgcgggtcgctgcgcgcaattccgccgggaggcgtcgcatccggggaggagggctgctgcgcggtatcggtcggaacgacggagggctgcccgctggcgggcggcgtctcgcgctccaggccgtctccgcgaaatgcggtatagagcgaaaagccgccgatcagcacgagacatagcccggcgaccacccgccccatgcgcaagacgccggggcgcttgccgccgggcttgcggttctgtccaaggggcgcgtgcggatcggtgttcattcttcggctgcttccatcatccggacagcaaaaaggcgtcaggccggatcatcatccggcctgacgcctcgtctgattgttacttggcgctgacggccttttcaggattcggcgggaaggacgggtccgtcttcttgccgcgcagaaggtcgaacgcgtagttgagctgaacgtcatccttcgggtccggcggcacgtaggcaacggagcccgaaccttcgtctgtctcgctctggcccttgatgtggccgcgcagggcggattcaccctcggtcaccatcttccccttcagatcgtcaggcagcggctcttcgaccttgatgtcaggcgtgatgccggtgccctggatcgagcggcccgacggcgtgtagtagagtgccgtcgtcaggcgaagagccccgttctcgcccagcggaatgatcgtctgaaccgatcccttgccgaaggagcgcgtgccgagaaccgtcgcacgacgcagatcctgcagggcgccagcgacgatttcggatgccgaagccgatccgccgttgatcagaaccacgaccggctttccgtccgtcaggtcgcccgggccggcattgaaacggcgggtttcatccggattgcggccacgcgtggaaacaacttcgccacgctgcagaagcgcatccgagacctggatcgcctggtcgagcaggccgcccgggttgagacgcagatcgagcacatagcccttgagcttgtcggccggaacggccttcttgatcttctcgatcgccttttccatgtcgggataggtcttctcggtaaacgagatgatgcgcagatatccgacatcatcctcgacacgcgacttgaccgcctgaacggccacgacatcgcgaacgatcgtcagctggatcggcttgtcggcgcccttgcggatcagcgtcagcttgatcggcgtgttgatcgcgccgcgcatcttctcgacggcatcctcgagcttcaatccacgcaccgactgcccgtcgatctcggagataaagtcgccggcgagaacacccgccttggcggctggcgtatcgtcgatcggcgtgatgaccttgaccatatcctcttccatcgtgacttcgatgccgaggccgccgaactcacccttggtctgggtctgcatgtccgccgcgtccttggcgttcatgtagctcgaatgcgggtcaagcgacgacagcatgccgttgatggcattttcgatcagcttgtcttcggccggcggcgtcacgtactgggcgcgaacacgctcgaacacgtcaccgaatacggacagttccttgtaggtcgacgcccccgccgcttccgcgggcacaccggcggaatagatgacgctcatggccgtcgcacccatcaatgcgccaaccagaacaagagaagccctacgaatcattgcgtgcctttccggtgtctctagcggtccaccatggtcgggaatcgaccggttttccgtcttttcgaaattcaatgtaaagcgttggccggtttgtttccagcgccaatgctgtcgcactggccactcttttcgcacccatcaccgcaagcggttcgccagcgaaaacaaacttgccctgccgcgcgttcatggtctccattccggagagaaccaggtgatatccgtcgccggcatcgaggatgatcatctgcccgtagctgcgaaacgcgccggcatagacgatcaggccgtccgcgggcgcggtaaccaccgttcccggattggtcgcgagcgttatgcccatcgcctcgtgacctgttccatcggcatcgccgaactggcgcagcatatcgccggcgacaggcagctccagcttggccttcaattctccaaacggatatgcgggcgcaatgcggtttttatcgggcaccccgctgtcggccagagccttggcctgcgcgcgttgctcatccgtcaacagcctgcgattctcttccgcctgacgcgccgccgcggtggcttcgcgaaccgaggaaatctcgctttccatcgatgccacaaggctttccaggctggtcgccttgccggcgagttcttccgcacgctggcgctcggcgttgagctcggcggtattgctctggctcagtttttcattctcggcgagaagcaaatccattcgccgctcctcctcgagactgttcgttatcgtcgtcgtcaaaccggccttctcggcagcgcttgccgcctgcaacgaggccagattgccgagatcggcggcgagcttgtccgtctccttgcggataccaggcaccacggcgccgagcaggatggcgctgcgcaccgaggcaagcgcgtcgtcgggcgtcaccagaagcgccggcggcggattgcgccccattcgctggagcgccgcaagcacttcggcaagcaccccgcgacgctcgcgcagagactggcgcaccgcatcctccttgacgccgaggtcggcgagtttcttctcgctttccagtatcttcttttccagcgacttgcgccgggcggcggaatcgatcagcgcctgacggacactgctggtgctcttgtccagatcctcgatgctcttctgcagctccgcgaccttgctggaagataggttgatggtcttcgacaacgcatccagttcggttcgagtctggtcccgcttcttctccagctcgacagctggatcgggtgcgacagccaccgcgggcgcatccgtcgcctgcgggttcggttgcgaggcacccggctgttcttgcgccagagcggacacgcgccccgatacgccgatcaccgacgcggcaaggccggccacggcaaccgacatgatcagatagcttcgcttggatgcaggtgtcggcatgccgatcggtaaatcctcttaaaccgcgcggagattaagctgatttgaccgtctttgccagaaagattgaggcctgccgcccgatcgcgcaagacacacctgcgtgaatgatcgtgagcactcagacacgatggtagggatggccggacaggatcgtcacggcgcgataaagctgttccgcgatcagcgttcggacgagttggtgcggccaggtcatcttgcccaggcacagggttgcgtcggcacgatcgtagagcgccggatcaagcccatcggcgccgccgatcgcgatcagcagctcgcgcttgccctggtcacggtaattgccgagaagattggcgaagccttcgctgtcgagtgccttgccgcgctcgtcgagaagaatgagaataccgccatccgccagcgacttctgcagcatggccgcttcctcgcgcttgcgcgtgtcggcattggaggcgcgactttccgcgacttcgacaacacgggagaattcaaggccgattgccggaccggccttggcgaaacggtcgaagtaacgcgccgcaagatccttctccgggccggatttgagccgccccacggcaaaaagaccaacgcgcatatgtccgctcctgctatcaggcttttcgcggctcaaaggtgccgcaggccggggcgtgcgcgccgccggcccaatcacagccatctatcaggcgccggacgcagcgtccagacggcccgccagcagacctatcagtgcagagtctcgtccagatcgggagcctgccacatcttttcgatgttgtagaactcgcgaatttcgggacggaagacatgcacgatgacatcgccggtatcgatcaggatccaatcaccggcatcctgaccttcgacccgggcggagccgaagccctcatccttcagatcgctgagcaggtgatcggcgatcgccatgacatggcggctcgagcggcccgagacaacgaccatgaagtcgccgagcgccgattttccggcaatgtcgatggaaacgatatcttcagctttggagtcctcgaggctgacgaggacggtgtgcagggcgcgggcagcggcatcaacgccacgttccgggctcttcgggacaacgactttcgtgcttccctttgcgtgtactgttgtcagtgctttccctttctcggaatgacaaagcatgcacatcactgatttggaaaaccaaatcatgattaagataggcaccgaaccataaatgtttcaagacgcccgcgatcacaaagcatgaatgccggatttggcgcggcagcaacggatggctcagccttcaagtgcatcctgccgggctgtgtacagtcgcagccaccctgcgtaaagtgatgcttcgttccagatgcgaagatcgacatgaaaaacagctccgaaaacacgcttgtcccggtactccgcatcagtttcccgcatgaggaccggctgggacgcggcaagatggaactgctggagcacatcagggaaaccggctcgatctccgccggcggccgcgcgatggacatgtcctaccgccgcgcctggctgctggtcagcgaaatgaaccggatgttcaagcatccggtcgtggaatcgcaacgcggcggccagaagggcggcggcgcggcgctgacggccttcggcgaggagctgttggcacgctttcggcagatggaacggacgatcctgacaacgctggccgacgatcttgcctggctggagagcaaccgcgtgatcgacggcaccgagccgaccgcttaaggctccagcgcaaccgtcttgatgatggcgaagaccggcataccggcctgcaacgccatgcgctcggctgaaaagctggtgatccgggacaggatcgcatcaccgccgcaatcgattgtgacgtcgacggtcgcatcgcctgaaggggtcaccgccaggacggtaccatcaagcacgttgagcgcgctcaggcctcgcggcctttcggtggcaagcatcacgtcgcgagagggaatacgaacccgaaccatcttgcccggcgcaagaccggcatcgggcacacgtagccgcaccgccgccatggcgacggtcgccaggcggtgcctgttatcgacggcctcgacccgcccctgcagcacggcgcccgcctcgcgccggtccaaggacgcggcgggcaggctgagcacctcggtcgccgctcccacagccttcacccggccgtcctgcatgacgacgacctgatcggcaagccgcgccacctcggccacggagtggctgacatagacgatcggaatatccatctcgtcgcgcagacgctcgaggaacggcatcacctcggccttgcgcgcttcgtcgagcgccgcgagcggctcgtccatgagcagcaggcgcggcgacgacagcagcgcgcggccgatcgccacccgctgcttttcgccgccggacaggtgctgcgggccgcgcccgagcagcttttcgatatcgagcaggtcgacgatccgctcgaggctctcccttggcgcccccttgggcgcgaaccagcggccataggtcaggttctggcgaacggtcagatgcggaaacagccgcgcctcctgaaacacgtagccgaaccgtcggcggtgcttggcaacgaaaacgcgcttggcggtatccgtcagtgtttcgccgtcgaggctgatcttgccctcatcgggccgtgtcagcccggcgatcatccggatcatcgaggtctttcccgaacccgaacggccgaacaatgcggtgatcccgcgttccgacgtgaaccccgcatcgagagagaacccgtcaaacctgtgctttgcctggaccacgagcgtcattgcggatcgatcctccgtccgatgaggcgtgacaggaactcggatgcgagcaacgccgccatggaaatgaccacggccacaagggtcagccgcaacgcgcccgcgtccccgcccggcacctgcgtgaaggaatagatcgcggccgacagcgtctgcgtctcgcccgggatattggacacgaaagtgatcgtcgcgccgaactcgcccatggccttggcgaatgccaggatcatgccggcgatgatgccgggcaagatcaagggaagcgtcacggtcaggaacacccagatcgggcttgcgcccagcgtgcctgcggcttcctccagtttgcggtcgatggcctcgatggagaggcggatgctgcgcaccatcagaggaaacgccatcaccgcgcaggcaagcgccgctcccgtccagcggaaggagaagacgatgccgaaatactgatcgagaaagccgccgatcaccccgcgccggccaaacagcacaagcaggatgaaaccggtgacgacgggcggcaatatgagcggcatgtgcacgatgccgttgaggacggatttgccccagaagcggccgcgcgccaggatgagagcgatagcgatgccaaagggaaggctggcgagcgtcgcgacaacagacacgcgcagactgagcaagatcgccgtccattcgtcgctgctcagaccaagtgcttccaaatgccatgctcccgaaaaaacgaaggcccaccgtggtgggccttcacgctaggcagttgcgtataaaaccgcaattacttcaggatggtgaaaccctgttcggtgaaaaagcgcgccgccttttccgacttcaggaattcgagataggccgctgtatcggcgttcttgctttcggacaggatcgcgatcggataggtgatcggcgggtgcgagtcagccgggaaggtgccggcgacggcgacgccaggatcggcattgacatcggtcttgtagacgatgccgaacggagcctcgccgcgcgagaccagcgccagcgccgcgcgcacgctttcagcgcccgcgaccttgccttcgaccgaggcccagacgccgagcttttcaagcgccgccttgccgtacttgcctgccggcacggacttcacttcgcccatcgccagcttgccgtcgccgatcaggcccgcgagatcgaagccctgcttgatatcgaccggtttgaccttgtccttggcggcgacgagcacgatgctgttgccgagcaggttggagcgcgtgtcttccttgatcaaattcttcttggcgagataatccatccagtcgaggtcggccgagatgaacacatccgccggcgcgccgccttcgatctgctttgcaagcgccgaactcgccgcataagagacgacggcttccttgccgctttccttggcccattcggcattggccgcatcaagcgcattcttcatgctggcggcggcgaaaacggtgaccttgtccgcggcgaagccggccgtggcgccaagccagagcgcggagaccgcgaccgcggcaagtttcatccaatgacgacgattatgcatttcgggttccccaatacgacgagatatccggagagatataacggaatatggcggttggccagcgctatgtttcaacgaacacaacgcatcgaggaatgcagccagtcagatccatgcatgtgaaacaacggaacgatcgcatccggcccatccctgttggtacgagcccgcatttgcgccgcgagccaattgaaaaacatcagctttcggcgcgtaagcgacggagattgctaagaaaataagcagccgcgccactgcgacacttaaacacatgccgaaaacgcattgctgcgatgcaccaatttcgcttccctttctggaatactcatcatataagttacccatcggacagcgatctcctcctcccaaagctgttcgataagcgatcggcaacactcctcctcccagttgccgatcaagttttaagcccgacggatcctcccccgtcgggcttttcattttccagcctggtgaaatggattgaattaggtgccgttctgcgcgcggatcgccgtcgaactcaatcgcgatcttggcccgtggatgaatgtccaggccggtgccggcttcttccagagcgctctcgaatcgtcctcgtcgacccgggcgaaatcgaaggtctttgccatcttcgacgacaggaacgacagcgtcgcacccggtctgtcaatgacggcgatcgggaacatgcgggcgatatcctgccaccgctgccaccggtgaaacgtcttcaggctatcggcacccatgatccagatgaaatgcacatgcggattgccggccttgatccgtgccagcgtttccgcggtgaaggtggtgccgaatttcttctcgaacgcggtgaccttgatacccggatgcttggcaagcttctcgctgagccgcacccgctccgccaagggcagcagctggctcgggtccttgagaggattgccgggggtgaccatccaccacagctgatcgaggccaagccgtttgatggcgatctccgccacaagcccgtggccctggtgcggcgggttgaaggagccgccgaacagaccgaccaccatgccccgctcggcatgcggcacgcgaagatagcgtcggtccaagtcctcgttgatcacatcaggtccggacttggccggtgccatgcacgcggtatttgaacgaggtcagctgctcgacgccgacggggcctcgcgcatgcatcttgccggtcgcgatgccgatctccgcgcccatgccgaactcgccaccgtcggcaaactgcgtggaggcattgtggagaaggatggcggaatcgacctcggtgaagaaacgttcgaccacggctgcgtcttcggcgatcacggcttcggtgtggttcgacgaataggtctggatatgcttgatcgcgccatcgatgccatcgacgacagcgaccgacacgatagcgtcgagatattccgtcgaccagtcttcctcggtcgccgccttcgttcccggcgccgccttcacgacgctcgaggagccgcgaacttcgcagccggcatcagacagcacttcgagtagcggaacgagatgcgtgtcgctggctgcgctgtcgacaagaatggtctcgaccgcgccgcaaatccccgtccggcgcatcttggcgttgacgacgatctccttggccatatcgagatcggcggatgcatcgacatagatatggcagagcccttccagatgcgcgaagacgggcacccgggcttcgttctgcacccgcgcgacaaggctcttgccgccgcgcggaatgatcacgtcgatcgctccacccaagccgcgcaacatggcgccgacggcggcgcgatccgcggtcggaacgagctggatggcatgctccgggagcccggccgccttcagaccgcgcaccatgcactcatagatagcctgcgatgaacggcgcgaatccgaaccgcatcgcaggatgacggcattgcccgccttgacgcagagcgcaccggcatccgccgtcacattcgggcggctctcgaagatcacgccgatcacgccgagcggcgtgcgtacgcgctcgatcttcaggccgttcggacgatcccaggcgctgaccacctcgccgacggggtccttcagagctgcgatcgcccgaatgccatcggccatctccgcgacgcgtttgtcgctgagcgtcagccggtcgatgaaggagggcagcatgtcggagcccgccgcatcctcgagatcccgcgcgttttcagcaaggatacgctccttgtccgccaggatcgcatcggccatggcattcagggcagcgttcttggcgtcggtcgaggcgaaggccaacggtcgcgcggcagccttggctttgcggccgatgtcattcatcagcgcgtcaatgtcagggctttgcacgactgtatcaagcatgggcggcgtccttcttctgcctttccgacttcgaattgatctgcgaggtcatgaccatgtcgtcgcggtggatcatcgccgcgcgcccggcatagccgagaatggcctcgatctcgctcgacttgcggccggtgatctggcgcgcttcctcggcgtcatagccggccaatccacgcgcgatttcccggccactcgggccgacgatcgccaccgtgtcgccacggctgaacaggccgacgaccttgcgcacgccagcgggcaaaaggctcttgccgccgcccagcgccgtcaccgcgccgtcgtcgacatgaagctctccggccggctgcagctggccggcgatccaggtcttgcgggcagttacgggcgttccggagggcgcgaaccacgaggatcgcgcgccgttctcgatcgccgacagcgggctgtcggtcttgcccgatgcgatgatcatcgcgcagcccgaggtcgtcgcgatcttgccggcgtcgatcttggtgcgcatgccgccgcgcgacagctcggaagcagcaccgccggccatcgcctcgatgtcgggggtgatctcggcgatcgtctccagaaaccgcgcatccggatcgagatgcggtggagccgtgtagaggccgtcgatatcggagagcaggatcaagagatccgcgcccgccatcgtcgcgacgcgcgccgcaaggcggtcattgtcgccatagcggatttcgctggtggcaaccgtgtcgttctcgttgatgatgggaacggcgccgatcttcagcagctggttgatcgtcgcgcgcgcattgagatagcggcggcgctcttccgtgtcaccaagcgtcagcagaatctggccagcaacgatcctgtcgcgcgacaggctctcggaccagtcgcgcgcaagggcgatctgtccgacggccgccgccgcctggctttcctcgagcttcagcgcgcccgagggcagatcgagaaccgagcgcccgagcgcgatagcgcccgacgacacgacgagcacatcgacgcccttggcctttaacttcgcgatatcggcgcacatcgcatccagccagctcttcttcaggccggttttgcgatcgacgagcagcgcggagccgatcttgataacgatgcgccggtagctacccagcgccttgtgcctagtcattggcctcgtcctcgtcggcgataatatcgcgatgacgcaccttcagcgctttggccggcttttcaagaatgttcgcatcggcattggcctcgacgatgatatcgcgcagcgcacgcaacacctcggtcatgcccatgcctgttgccgccgagatctggtagggcgtgctgccgcaggccttggccagctccttggtcttcttcgtcagcgttgccttgtcgagaatgtcgatctgcgacagcgccacgatctccggcttgtcgccgatctcgtcgctataggccctgagctcgtgcttgaccgtcttgtaggccttgccgacattctcttcctgcgcggacacgagatgcagcagaacgcgcgtgcgctcgacatggccgaggaaccggtcgccgataccgacgccctcatgcgcgccttcgatcaggccgggaatgtcggcgagaatgaattcgcgctcgtcgatcgtcgcaacgccaagattaggatgcagcgtcgtgaaaggataattggcgatcttggggcgtgcacgggtaaccgccgcgagaaaagtcgacttgccggcattcggcaacccgaccagaccggcatcggcgatcagtttcagccgcagccagatggtcttttcctcgccctcgaggccaggattggcccaatccggcgcctgattgaccgaggtcttgaagtgcgcattgccgaacccgccattgccgccacgggcgaggcagtagcgctgcccctcttccgtcaggtcgcagatcagcgtttcctggtcttcctcgaagatctgggtgcccacgggcaccttcagcgtcacatgctcgccattggcgccggtgcggttgcggcccatgccgtgcgtgccgatcgtcgccttgaagtgctgctggaagcggaaatcgatcagcgtgttgagaccattgacggtctccacccacacatccccaccgcgtccgccgtcaccgccgtcaggcccgccgaactcgatgaacttctcgcgccggaacgacacggcacccgcgccgccgctgccggatttgatatagacctttgcttcgtcgagaaatttcattttacttccatcattcggtgtcagttggacgcccgtctcggcctgatcgatataggccgttcagccggaggtcaaagattatcgttaggtttgcgagctataacatacagtacggcttcggtctcgacggcacgtacgatctgaaacgaatcgccgacagtcttgccggcgccgatgtcatcgcgctccaagaagtcacccgcggcttcgcgcgaaaccgatatgccgacatggtggccgatctcggcgccctgttccccgaccatttctgggtctacggaccgggctgcgacctgcatgtcgcggagatcgacggccatccggcaccgcgcggcatgcgcatgcagttcggcaacatgatcctgtcgcgctggccgatcctgtcgacccgcacgctgcttctgccgcgcagccgaacgctctccaagctcaacctgcaacgctgcgccaccgaggccgtcatcgaccttcccagcggcgccgtgcgcgtctactccgtccatctcgatcacatctccagcgacgagcgcatccgccagctggtttatctgaacgagcgcatcaacgccttccctcatgagggcggatcgctgaccggtgcgcgtgagttcgagatcgaggagcttccgctgcccgaagactacctcgtcatgggcgacttcaacatgctgccggaatcgcccgaatactgcgctttcgccggccgaaaggatggatattacggccgcacggcgcgcatcggcacccctgtagacgccttcgaggcgctcggcgcctatcagcccgacggctacagctggatggatcccgcaaatcatggcaagcgcatgcatctcgattacgtcttcgtcggttctggccttgaaagccggctaagatccgcacggatcgacacctcggccatggggtccgaccacttccccgtctgggtcgagatcgacaattgagaaggcgccccgagatctggggcgcctccaattttcatcatgaggcgctcttgccttgctgcaacgcgccgggcttcagcatggtctcgacatgcgtcaccatcgtgttgcgggcgaagctgaagacctcgctgcaaccggtcatgcggaagccgagcttttcctgcagcctcagcgacgccggattgtcggcgaagacaccggaatgcacgacggtctcgggcatgcgccgcgagaagcgctcgagcgtggcggaaaccgcctcgctcatgtagccacgccgccagtaataacggttcagccagtagccgagatgccagcggccatggcgaagctcgatcgacaccacgccgatatgggcgtcgtcgccactggtgatcgccatctgccagtccggcagccggcccgccgtcaccggcaccagccagtcgagcgcgtcctgccggtcgtagggtgcgggcacccgtgccagcatccgcgtcaccgcgaagtcggacagcgattccgcgatcgcgtcggcatcgcttagccggtgcgcccgcagaagaagccgctcggtcgcgatatcgggctgcgaaccggcggtgacgacctggggtcttggcctttcgaggctgagcgcgctcataatacgctcccccagcttctcagcgacatccaggtcttgcggtcgagcctgtaccattcgaccggcacgttgctcccaagcgccagcgaggcggcaagccccgatccctggaactggaaaccgcacttctggatgacccgccgcgaggcgacgttcatcacccggcaacgcgcgtcgatctgatcgacatcctcgcgggtgcggaacaccatgtcgacgagcgcatggcaggcctcggtcgtgaagccctggttccagtagggctcgcccagccaatagccgatctcgacggtacgaccgtcgagatgcggctcgacaccgcagcaaccgatgaaggcgccgttttcggctttggtgatcgcatagacgcacttgccaatctcgccatttttcgtgcgtcgcacgaagtcggcggcatcattggccgtatacgggtgcggcatgcgcgacaccattgtggcgactttggcgttgttggcgagatgggcaagggcgtcgatgtcttcttcgtggggcgcgcgcatgacgagcctttccgacagtaagacagggcaatcggtccttaaccgctccggccgcagccgctcttcgggagacctttggtctctccgtaacaattcgccttgcatggttcagtcctccttgagggtaaagaaaaaggggagatgggtggtgccccatctccccttttgtcttgactgaacctggtacgctcagccgggtcgatgagacaccggctgctataaagcgctaccggcttattccgctgcttccgctttcggcatcacggatacgtatacgcggccgttggccttcgtacggtagttcacattgccggcggtgagagcaaagatcgtgtgatccttgccgaggccgacgttggaacccgggtgccactgcgtaccgcgctgacgcacgataatgttgcctgcgatgacggcttcgccgccgaacttcttcacgccaaggcgcttggattcagaatcgcgaccgttgcgcgacgaaccgccagcttttttgtgtgccattggagttctcctttaaaccttaagtcccgtgatcttacttagcagccacgatgtccgtgatacggacaacggtgtggtgctggcgatggccgcgcgagcgcttcgagttctgacgacggcgcttcttgaaggcgatgaccttcttgccgcggttgtgctcgacgacttcggccttgacggacgcgcccttgacgaagggagcaccgatcgcggcatcggcgccttcgccgattacgaggacttcggtgaattcgatcgattcgccagcggtgacttcaagcttctcgatggtcagcacgtcgtttgccgccacacggtactgcttaccgccggtcttgatgactgcgaacattttttatcctttcatgttcgttccggctcgacccgcatcaaacaggtggccgtctttttatcagtcgatgttaagcagggatttcagggcttttgcccgggaactctggctgccggtgatgccccgcgcgggcgcgggacggacaaggcgcggatttatccacacctattgggttgcgcagatacgcgagcataaaaaaactgtcaaggtaaaaggatgacaaaaggatgaaatggcttgagattacgacttgccagcccgccaaactctcgctatgagacagcccgcgccgaacaagcgccgaccaacgaagcggagaggtggctgagtggtcgaaagcaccgcactcgaaatgcggcatacgggcaaccgtatcgtgggttcgaatcccaccctctccgccatattccccgatgtccgacccgggcacatcggcaacaatccgcacctgacatagatgacaccctcgtgcagaacgcggttgtccgttgtttgcaacgtccaatgtccggggtcgatatatccgaaatcttggcgcaggaagccggcgaaagccgacgtcgtcgcccccgcgtgcttcaccggcacatcgaggtcgtcgtcaaactcgcaggttggcctgcatggcgctcgtcaccgagcaacaagttgaatgcccaacggggcagcgccgccgatgatatcgagcaagcggtcgatattgggatgggcgccggggcgggttttcgcgtcggcggtgtgctcggcgaaaaggtccagcgcgtaggtcgcggcctgtttgtcgaggatgccgaaacattgccgcaaatattgatagaccgcgagcgagccctgtttgcccggctgattttcgatcgtcgcgacaacgacgccggccgggtcggtaaggtctatgcgagcaaggccttcgactgacggcaacagtttcagattgtccttgaacgaagccgttggctggatcatcgccggttccttttcgcgtggcgggtttgccttgcctctagcagcttcggctccatatcgccacgccgcacaacaaaactcacactctcccgctcaccgcttcagcgcgcggccgctgcggctttgcgaaatcgcccgcgactgcgagcgcagcacgagggcctgctgcacctcggcctggaaaaccatcacctggtggcgaacttccgcctctggcaggccgagcgattccagttcgctcgccaggcgccggcactcggtcttccagtattgaacggcatcggcaccgtgcaggcgctcgagttcggcggcgctgcggtcgatgtcgccagcgcgcgaggccacagggaaaaggacgatttcacttgtggtcatggccttcaaactcttgcttgtgtttaccgacatcgattcgttccgttgtgttcgacatcattcctaccgaagcatggttaacgctttgctccaccatctcgtgccctttcccgggatggacgcggccgccggaggtcgagcaaaagccgagggcttttgatccgcatgaaacaaggctacacatcttgaatgtgtcgggtggacgggggatcgctttggtacggacgatgatcgcgaggccggtggcgacggccatcgttctgtttgcgcgcgccataacggccgtgcgcgccatttggtcgggcgacggccccacggccgacacctgcgtctatttcgccaatcattcgagccacggcgatttcattctggtttgggccgttctgccgccccgtctgcgtcggttgacacgccccgtggcgggcgccgaatactggctgaaatccgcgatcacccgttttatcggccgcgacgtcttcgacgcggtgttgatcgaacgcgagcgcgacaagcggaccagcgatccgatcgaggtgatggccaatgcgctggatgccggctcctcgctcattctctttccggagggaacccgcaatctgacggatgcttcgctcctgccgttcaagagcgggctcttccatctcgcgtcagtgcgtccggatatccgcctcatccccgtctggatcaacaatctcaaccgcgtcatgccgaagggcgagatcgttccgatccctctgatctgcaccgtcaccttcggggagccgatgcacatgcatcctggcgaagacaagcaggcctttctcgatcgggcgcggacggcccttctcgccctctctccaaagcagccaggcggtggcgaatgaatacggcgaattccgacctcttcacgctcgttctcggcatcctcgcggtgctcgtcgtggcgtccgcgatcggctatgtcctgcagcggcgcctctcgccggacggcggcaacgcctccatcgagaacctcaacgcacgcatcaaggcgtggtgggtgatggcgatcctgatcggcatcgccttcatgatcggccgcgtcggcatcctggtcctgttcgccttctgctccttcgcggcgctgcgcgaattcatcaccttgacgcagacgaagcgcgccgatcactgggcgctggcgaccgcgttcttcatcgtgctgccgttgcagtattttctgctctggacgaaacagtacggcatcttctcgatcttcattcccgtctatgccttcctgctgatgccgatcatctcggtgctgcgcggcgacaccgagcgctttctggaccggatcgcggaggtacaatgggcgctgatgatctgcgtcttctgcgcttcccacgttcccgcgctgctgacgctgacgatcgccggctatgagggccgcaatgtgctgctcatcgccttcctcgtcatcatcgtgcaactgagcgatgtgctccaatatgtctggggcaagctcttcggccgcaccaagatcgccccgaagctctcgccctccaagaccgtcgagggctttgtcggcggcgttgccagcgccacgctgatcggcgccggcctctggtggatcacgccgttcacgccgctccaggccgggctgctcgctttcgtcatcaccctgatgggctttttcggcggattggtgatgtcggcgatcaagcgcgaccgcggcgtcaaggattggggcaacctgatcgagggccatggcgggctgatcgaccggctcgattccgtcgtcttttccgccccgatcttcttccatatcgtccgttactggtggtcggtcacatgacgacccgactgcggcgtatcgcgggcaacggcatcacccatgtgaccttcgccttctgcgcgatgggcggctgggcgatgttcgcgaaccggggctacccacccggccgctttctgctcgccggcctcgtccagggcacgttgtccgcccttttgacgctgtttctgaaaaccgcggtcgagcagctgtcgcgccggacttctggaacgcacgccctctgggcgccgccactgattgcctgcctggcatcgagcgccattctggcgacgatccacgcgctgagcggcacccctgaaattttgaaaacgatcgcgctgccgctggcggtctcgaccagctatgcggcgatctacaattattcactgtaccggaaggggaagcgggcatgagcgaaacaggtgaccgcaggccgctggcgagccgcgacacgcactgggcgcgttcgacggcgcaatggctggcgtcgaaatccgtcacgccaaaccggatctcgcaggcaagcatgatcgcggccgcgcttgctggcggcgcgttcttcttgtcgggacatcaaacgggctgggcgcaggcgcccttcttcgtcgcggccgcgtttttttgccagctgcggctgctttgcaatctcttcgacggaat

SEQ ID NO: 31 - DNA, 52201 bp, Rhizobium matallidurans
  source 1..52201: mol_type = genomic DNA
caccgtggccaagcccgtggtgcgcgacgtcgtcgacaacgacgagttcatcggccgcttccaggcggtcgacgaggtcgcggtgcgctctcgcatcggcggctatctgaatgaggtcgatttcaccgacggcgcgctggtgaagaagggcgaaaagctcttcgtcatcgaccagcgccccttcgtcaccgcgctcaacgaagccaatgccgcgcttgaagtcgccaagtccacgcagacctacgccgaggcacagttcaaccgcgcgcagagcctcgccaccagcggcagccagtcggtctcgacgctcgacgaccgccggcgcgaatggctcaccgcccaggccaatgttcgcggcgcccaggcaacggcggaacgcgccgcgctcgacatggaatacaccacgatatcggcgccgctcagcggccgcatcgaccgccgcctgatctcccccggcaatctggtgcaggccgaccagaccatcctgacgaccatcgtttcgctcgatccgatcgatttctacttcgacgtcgacgaacgccgcctgctgaacttcgccgatacggcgcgcaagctcggcaaggatctgcagcagggtggcggcggcgtgcccgtcatcgtgacgatttccgacccgaccgccaagcccttcaccggcaagctcgacttcgccgaaaaccgcatcgacaatgagagcggcacaatccgcatccgcgcccgcctcgccaatcccgacctgatcctgcagcccggcctcttcggccgcgtgcaggtggaggcgtccaacacctacaaggcgatcctcgtgccggacgaagcgatcggctccgaccagaacgaacgcgtggtcttcgtcgtcggccccgacggcaaggtatcgaccaagcccgtgcgccccggcccgcgcctctatggctaccgcgtcatccgcgaggggctcgatggcaccgagacgatcatcgtcaacggcctgatgcgcgcccgccccggcgccaccatcacgccgcagatgaccgaactgccgcaggagcggcgcgacaccccgccggataatgccgcgacggagacgccacaatgaggttcgctcatttcttcgtcgatcgcccgatcttcgcggcggtcatctcgatcgtgctcctcgtcgtcggcagcatcgcctatacgcagctgccggtatcgcaatatcccgagatcgcgccgccgaccatcgtcgtgcgcacctcctatccgggcgccgacccgcagaccatcgccgacacggtgtcgacgccgctcgaacagcagatcaacggcgtcgaggacatgctctacatgtcctcctactccagcgccgatggcgccatgtcgctgaccatcaccttcaagctcggcaccgatctcgacaaggtgcaggtgctcgtccagaaccgcgtatcgatcgccctgccccgccttcccgaggaagtgcagcgcctcggcgtcaccaccgacaagagctcccccgacctgatgatggtggtgcacctgctgtcgccctcgcatcgctacgaccagctctacgtctccaactatgcccgcaaccgcatccgcgacgttctcgtgcgcctcgatggcgtcggcgacgtgcaggtattcggcgagcgccaatattcgatgcgcatctggctcgatccgcagaagctctcggcctacggcatgacctccgatgacgtggtctcggcgctgcgcgaccagaacgtccaggtctccggcggcaagatcggcgcaccgccggtcaccggccagaacgccttcgaatatacggtcagaaccgacggccgcttctccgacgtgcgcgaattccgctacgtcatcgtcaaatcgacgggcgccggccggctcgtgcaattgcaggacgtcgcccgcatcgagctcggggcgcaggactacgtcaccaacagctatctcaacaacgaccccgccgtggcgctcggcatcttcgcccgccccggaaccaacgcgctcgacaccgcgcgtcaggtccaggcgatcatgaaggatgtcgccgagaccttcccgccaggtctggaataccgcatcgtctacgacaccaccgaattcatctccgactcgatctccgaggtctacaggacgatcgccgaggccgcgatcctggtggcgatcgtcgtcctcgtcttcctgcaatcctggcgaacggcgatcattccgatcatcgccatcccggtctccctgatcggcaccttcgccgtgctgctcgccttcggcttctcgctgaacatgctgacgctgtttggcctggtgctcgcgatcggcatcgtcgtcgacgacgccatcgtcgtggtcgagaacgtcgagcgcaatctcgcccgcggcatgtcgccgaaggaagccgcccatgtgacgatggacgaggtcggcaccgccgtcatcgccatctcgctggtgctgatcgccgtcttcgttccaaccgccttcattccagggatctcaggccagttctacaagcagttcgccgtgacgatctcggtcaccaccgcgatctcggcgctgaactcgctgacgctctcgccggcactcgccggcattctgctcagacgccacgatcaccagcacacgcgcaacaacatcgcgctgcgtttcggacgcggccttgccaacggcttcaaccacggcttcgagcggctgagctacggctactcgtggatcatcaggcatctggtcagaagctggatcggcatcacctgctcgctgctcgttttcgccgcgctgctcggcgccacctggttcatgagcaccaaggttccgtccggcttcatcccgaccatggaccagggctacgccatcgtcgtcgtccagctgcccgatggcgcatcgctggcgcgcaccgatgcggtggtcaagcaggtcggcgatatcgcccgcacggtacccggcgtcggcaatgccgtgcagttcgccggcttcagcggcgccaccttcaccaacgcctccaactccggcgtcgtcttcgtgccgttcaagtcgttcgccgagcgcgaggaaggcggcgagaccgccaacaagatcatcggcgagctgttcggcaagctgcagagcatccaggaagccttcatcatcgccgtgccgccgccatccgtgcgtggcgtcggcaattccggcggcttcaagatgcagatcctcgaccttgaaaatcccgacatgacgcgcgtgctcggccttgcccggcagatgatgggcgcggccgcgacgacggagggactgaccggcgtcttcaccaccttctcggatgccagcccgcaatattatctcgccatcgaccgagacaaggcccgtttcctcaacgtgccgatccccaacatcttcaacgcgctgtcgatcaatctcggcgtcgcctatgtcaacgacttcaacgccttcggccgcgtctaccaggtccgcgcccaggccgaccggcaataccgcatggaccgcgaggacatcttaggcctcaaggtgcgctcggccaccggcgcgctggtgccgctcggcacactgatggatatccaggattccagcggccccgcccttgtccagcgctacaacatgtatgtgtccgtgccgttgcagggcaacccgacgcccggcacctcgaccggcgacgctctgaaaaagatggaggcgctggccgccaagatcctgccgccgggcacgaccttcgaatggaccgaactcgcctaccaggaaaccaataccggcaacacggcggtctacatcttcgcgctctcggtcatcttcgtcttcctggcgctcgcggcgcaatatgaaagctggatattgccgctggcgatcattctgatcgttccgctggccgtgcttgccgcactgatcggggtgtggctgagaggcatggacaacaacgtgctgacgcagatcggcctgatcgtcttgatcggccttgcggccaagaacgccatcctgatcgtcgaattcgcccgtcaggcggaagacgaaggcaagtcgccggtggaagccgccgtcgaggccagccatctgcgccttcgcccgatcctgatgacggcgtttgccttcatcttcggcgtgctgccgctcgccatcgccaccggccccggcgccgaaatgcgccagtcgctcggcacggccgtcttctcgggcatgctcggcgtcacggtattcgggctgttcctgacgccggtcttttatgtcgcgctgcgctcggtgcggagaaagcccgcccggccggccgaagccggcaccccggatacacaagcgccaccggctgaagcctcgtcatgaggctcggcgggcaagtgttccctctttcgaacgccagcccgtgaacagctttcgcagcggcttttcgatcagctcgtaagcgatggttccccctgccacgccggcaacgacgccgaccggcacgatgagcaccgatgagaagcccatcatctggcccgccttggcgaccacggagatcgcaagcgtgtgccagagatagatcgaataggaagcgtcgccgagataggtgagcaacggcacgcggccgaggcctccgtcggcctcgagcgagaccatcccgtagaccagcatcaacgccagcggaccgcagatcccggcattgaattcggcgcccatcaggtagatcgcggcgaagccggaaagcgaggctcccacgcaggcgagcccgaggctgatgccggcgatccaccggcgcagccacaattcggcgagaaacacgccgccgagaaactccacgatgatcggccgggtgtaggtgtagagggccggtgtcgccggctgcaggatctggccggccaggaagaacccgccgaacacgccaaacaggaagagcagccgccatttgcgcggcaggaacagcgcgccggcgaagagaacataaaagaagatctcgaaattcagtgtccacccctgcaccagcaccggccagatgtcgccggtgctgggcgactgcgccggaatgaagaacagcgacgcaaggatgtgcgatgtcgtcagttgcaggttcggaaacagcccggccatggcgccgacgatcatgattgccgtcaccagccagtaggacggggcgatgcggcacaggcgatcgatgagaaagctctgcggcgtcatcggccgtcgctcgctgatcacccacatgatgaagccgctgatgacgaagaacacatcgacaccggcagccccgatggcgaagtgctcgcccgacttctcggccgcgtgaaaaacgacgacagcaagcgccgcgaaggcgcgcagatattggatgccgtaaagggtcttcatccggtttcctcaaatggccggtcaatgtcggccgacaatgctggtgctgctagctaatgcgctaaaggttcgggctgcgcctggcgtgcccatgccgagaagtcaggctggcggcgggcgctcatcagttttccggcgcagaaatagaacaggaacgtcccgacggtataaggcgtcagaatgtcgatctcgacgaaggagcgggtcgtcagaagcacggcgatggtaaacagcagataggattcgtcgtttctgacatcttcgatcagccggcggagatggccccagaggatcgtcagcagcgtcagcaccacgatgagcagcccgaccagaccaagctccacggccgcttcgatataggtgttgtggaagtggaagccgctgcgggagccgatgaagaactcctcccagaggcgctccggctcggaaaagccctgaacccaataggcctggtagccgacgccgaaatagggattttcagccgcggccgcgatcccctgctgccacagataggtgcgccccgtgagcgtcgaatccttgccgaatatgccgagcacggcatcgaccgcgccgagatagacccccgccaccgccagcacgaccagagcggtaccgcccccgatcacgagaagctttcgctggtcgggtgtgagcgtcagcacgacacgcaagccaaccatcagcgcaagcacgaccacggtggtcaggaccgaggttgccgactggcatatcgcaagaatataggccgagagcagcccgacgataccggcggcagccatccacagacgacgctcgccgaagatgaagacggtggcgacgcatgcgatcaccccgagcgaggcataaaagccgagctggttcttcgacgcgaatgcaccgacgaagctgtaggtgttgtcgatcacgtcgagttcgtagcgaccgaacagcagcgaatagacgaggacgaaggcgatgccgacgacgataccgagcgttagcgtcttgacgtccatgaccctgaccgcgatcagcgcgcacagcacctgcgtcagatactggatcgcggcgcgcagcgacacgctgggcgccgccgaccagaagacggacaggaaggcgaacgcggcgaaggcgtagatccagatgtagcggttgtagttgccgagcaccttgcggtaatcgaccgcgatcagcggcagccagagcgcatagtaaagcaggatcgccacttgcccgaacctgagcgagtaggcgaaggcaaaaagcgaaatcgccacggcggaaacggcataagccacattcccgccgggctggatgagcgccgactttgcgatacgcatgctgcctcgttacctcatggccagtccggcggtgaccttgatcagatcgccgggctgcagcgcggtgctttcctgcaccggaatttccttcggcttgccatccacgtcgcggatgaccgaataagcgatgctggcggcccctgtcgacgtgtcgaagcgagccgcgtccgtcgattgggtgagcgcctcggccatcaacgaattgctggtcgtgagcttcaggttgagctggtcgatctgcgcatcagcgctttgcttttcctgcgccaactgggcgtcccagtcgttgcgaagcgtgatctcgtcctgattggccttgctgatatcctgcttggccttcagcgagttcgtgtcgatgtcgagcagcatcgcctcgaggtcggccgcgcgttgctcggccgtcatcctgcgggcgctgagcaccagccccttctcggcgagatcgccgaccttgtcgcgatcgaccgttgccagctccagctggcgggtctgcgtctggctcttcttggccagcgtctcgacttcgctctgcaacagggccctgaggtcgttgagcgcctgaagctgcagggtcagccgcttcttgcgcgaggccatgagcgcggtctcgctgtcgacaagcgccctcgcctccggcttgtccttcaactcggccggaatctcgaacgtgtccttgttgtcgatttcggcctgcaggcgggcctgcttgaccagaagccgcgcccggtccgccatgtagacgaccgcatcgcccttggcgttgatgaaatcgcgcgcgaaccgctggccggaatcggcgcgccgaaggccgccggcaaggctgacggccttggcgacggtcaggttcggcgcgaacggaaactcacccggcttctccacgtctccggagagatagaccgggcgaaactccgacagttcgacggatgcggacggccggtccttcagggcgaactgcttctgcagcgccacgccgatctgcttggcgatggcgtcggtcgtctgcccggaagcgggaagatcgccgaggaatggcagcgaaatactgccggacggaccaaccgtgtagtcgccgctgacgacggaccagtcacggatcgtcccatccgcggtctgccattcggccactcgaatcttcactttatccatggttccaaggcggtaatcttccgcgctggcaatgaatgaggacagcaggaatgcactcaacccggcagcgactgcgacaccggatcgaagggcacgggattgcccagccttgctgccaaatagacgttcgttcatatttttccccgtgtttcgtcccgacggcgcagccacaagacggctcgtcgggcctcaaggatgccgttagtagcttccgcgctgagcgcagacggcgggaatggtctttgcgatgatcgcaacgtcccgagccatcgaccagttttcgacgtagtgggtgtcgaaagcgacgcgagcggcataggaaacatcgttgcgtccgctgacctgccacagaccggtaaggcccgggcgggactgcagatagaagacggcggcgtgctcgtacatttcaagttcgtcttgaacgacgggacgcgggccgacgacactcatctcgccgcgaatgatgttgaagagctggggaagctcatcaaggctcagcttgcgcagcacggcgccaacggcagtgacccgggggtcgttctgcagtttgcgcgtggcgcgccactcttccatggctgcagggttgttgcgcaggtagtcctgcagaaccttgtcgccattggtcaccattgtccggaacttcaggcaacggaattcctggccgttatggccgatacggcgatggccatagaaggccggacccttgtccgtgagcttcacaagcagcatcaccatcaaaaagattgggctcaagaacaagagcccgaggcaggcggcggacacatcgaatgcccgttttgcgaagccgcctgtgggcggaaacgcgttttcgtgaactgcgccataaaatggcgaactgtccgatctcgtcgcagacttcatagaggtaactccacttatgtttgccgtttggtcggttaaggctcaggacgctaagctagcgctgacgagttgggagtgtatgagcggattttgtttttttaagccacgtttttaaaaccgctcgttatcgaacgtttttggaaacatttgttcaactttttgtatttcagggatcgctgaaacatatttagattccaccaaagcgatcaaaactatatttggagatcgaaataaaatgtcccacgacttcttatcaatacagcgacaccgaagtttacaggggtaaccgatctcggtccaaagttcttgggtgcggccatcacttctcgaacagacctgtttttagacttgcgggacgacgttttattgcatcgcaacatcaattttgcgccgcactcacaaatcgtttgaaattaaaactttgtaataaaagttgaatgcgaaacgcgtccactacacccctgcgggtatcgattgtggcataaacaagaacgtgcattgccaaattcgatgcaaccctcacatcgaaacccaactttaacgatctttttcgatcgccggggccgccgggccgataagtggcatttttaccaatacccggaacaaacctttaagatgacgcttgtagttactgaatacaggcgcaaaagacgtcttcaccgctttagttatatgacgaagtcctgtaaaaagaatctacaaaagggtcctggtggggccgcgtattcaatggctgttcattgaagggcaccatctggggaggcaacaaatgtatgcacctcgcgtttttgtcagcatgttgggcgcactcgtcgtgttcgccgtcgcgacctattggctgagcggctctttatccggcgccctcatcaagaccgcgatctgtgcgatcctgctgcaggcaggctatttcggcggcgtgctttatcttgtctggaaggaaggcaaggagcgcagcggcgccaagcgcacgaccggccgcgcggaagaggccgaaaagcggcacgtaccgcccttcaacagctccgagccgttcaatcgctaagcgctgagggcagctaagactgcccgttcgtcgctcacgaacccacccttcgtaacatcatgtgaagcgttctccgttgtctgctgcgctgcaacgtcctaggtcttgggcgaaacaacggaggtagagcgtggctgaaacagctagcatatgcgtcatcatcgccgccaagaacgcggccgataccattgaaatcgccgtcagatcagcacttctcgaagccgaggtctccgaggtcgtggtcgtcgacgacggctcgagcgattccaccgccgaggccgccgaacgcggcaacgacgccaccggtcggctgaaaatcgtcaggttcgagaagaacagaggcccgtccgccgcgcgcaatcatgccatcgacatctccacagcgccgctgatcgccattctggacgccgacgatttcttcttcgccggtcgcttttcccgcatgctctcggacgacgggtgggagttcgtggccgacaacatcgccttcgtcgatgccggcacggtcgcccaggcgccgcagaagctcgatcgcttcgccgaaaaccctgtctatctcgacctgaccaccttcgtggacggcaacatatccaagcgtggcgtgcgccgcggcgagatcggcttcctcaagcccgtcatgcggcgaagctttctcgacaagcatcggctccgctaccgcgaagacatgcgcctcggcgaggattacgatctctatatccgcgcgctcgcgctcggcgcccgctacaaggtgatccacagctgcggctacggcgccgtcgtgcgcggcaattcgctgagcggcagccaccgcacggaagacctgcgccgcctttacgaggcggaccgcgctctgttgaaggatttcaagttgaagccgatggcggccgaagccgtgcgccggcacgaacagcacattcgcgccaaatacgaactgcgccacttcctcgacatcaagaaccagtcgggcgccggcgcggccctcgcctatgtcgcgacgcatcccttagccttcccggcgatcgccggcggcatcctcgccgacaagaccgagcgctggcgcaacccggatggggtggcggtcacctcaagcggcgaccgccttcgctatctgctcgacgcaccggccgaataaggcctgccggtaccgcaacaccacgcagcggctttgcggcgccgacaggcgatagggtccggaccggctacttcaccagtttgcccgcggccagctggaatgcactctggatcagccgcgggtcctgcaccagccagcgggcgagcaggccgaaatcgggccggcggcggcgcttgagttgccccacctgcccccaaagcgcctgcttgcgcgcccggctcttgtacgacttgatggtcgcgatctcgcgcggccgcgacgcgaagcggctctccagcctgtcgagcgccatccaggtgatgaactgctgcttgagatattccggcgacgtgttgtcgacgccgtggaagatgttgatcccctcgccgcgcagcgcccccgcatcggcgcacagcagaacctgcctggccgcgagcatgcagtcgcagaagaacaggacgtcctcggccgccagccgcaatgccgcatcgaaacgcacgctctcgatcaagggacggccgatcaccatgcacgacatgtgcaggaaggcccagtcactgatcatcacgcccgcgatatcggggacgtcgaggacgacgggcgcctccatcagccgccgcgcgccgtcgatcttttcgagcgccgcgatcccgaagtgatagtcgaactccgccccaccctcgatcgacgcccagtagcagtcgccaccgagcgtatccatggccgtgaacgcgtttttcagatgatccggcgtccagatgtcgtccgaatcgagaaacgcgacatagcgcgtgtcggcgggaacatgatcgagcccggtattgcgcgcgccacccggcccggcgttcggctggctgacgacggtgattcgcgcccgctcctcggcagtcagcggcgccagctcgctggccggcgcatagggcgactgatcgtcgacgacgatgatatcgaagtcctgaaagctctgcgcgaaagccgacgcgagcgcccgtctgaggatgccgtcatcccgctggtagaacgggataatgatcgtgaaagtcgccatactctctccctgagaggttcgaattggtgcttcggccggtgcctgtagccgtgccatctaggccagctgctgcaccgcacaagcatcaggggcatttcggccgaaatttgtcaaaggccgcacgaccgcccaccgccgcacctcgatcctgaaacgctccattccggagcagagcgccccattccgaccataaatggtgaaccagttgcggacggctactgtaacatttgctcccattcgataaaaactttcgtgcgccgcaccacgcattttgcacctaagccggtgaatataatcattttcttgaatgcactgctcacaatggcttctcggcgacgggacaacacttcagccgcgcatttttcgcgcgccgttacggcaagtagtacctgtcacgaaacgccatccgtgatcacttttgctgcagtgccatattttcttccgtgaattcgccctaacttccctcgctgcgggctgaagtctgctctgattgaaacggttgcaaaggggagctgcgacccaaaaggggtgactgacaacgtgaatgttgataccaacgtgtcctcacggatcaacctgatgcggattgtgctcatttcgggcatcgtcttcgtacacataccatttagcgaccaaagcagtcccttcatcggggcctacggcgccttcgactggctgagagtattcctggcggaagcgctgtttcgggttggcgtgccggccctgagtgcgatttccggctatctcctgtttcgcggcggcatggagaatttcagctacctgaaaacggtacgcacgaaatccaagaccgtgctgctgccattcctcttgtggaacggcctgttcttcctggcgatcctgctggcgctcggcgtcggcctcggtgaaggatacgtgccgagcccgtggcaggcctccgtgcgcgagctgatgacccagcttttcgccgccgaggattttccggtcaacgtgccgctctatttcctgcgcgacctcttcatctgcatcctgctgtcgccattgctggcatggctgatcatccgtgcgccgctcgtgacgctggcgacgttgctgatcatcgccgtcatcccggatggctcggtctacatcgtcctcaagcggtcgatcctgttctctttcagcctgggcatctacatcggtctcaacaagatcgacctgagggcgctggaccggttcgcctcgctgggcacgacattgctgctactcagctgcgcggcgctggccaccatcatctacatgaccggcccgagcctgccgggctgggttcagttcctgcgcaacacgctcgccatcttcggcgcgctcggcttctggctgctgtcggcgcggctgatcgagacccagatcggccagcggctgtcgaagaccggtagcctgagcttctggatcttctgcgcccactatccgctgctgatcttcatgtggatcgtctggggcaaggcgggcatcagcttctatcccgtcttcttcgttctttcgctcgtggtcctcttcccgttcctgattttctcgaacgacctgtgccgcaagatcgccccccgtctatacggcgtcatgaccggtgcgcggaccaagaaaccctatgaaaaggcggcgtcggcgggcacggctcattccaaactcatcacacagcaaaggtgacacatgacgaccaagatcgcccatgcgcgaaaaccttgcgccatctccggcccgacgctcgccgtcatcggcacgctgctgctcggcgcctctccggcgctcgcccagcaggccgcccagcaaccgggcgccgcatccttcatcgagaatttcgacaagctcgaccgtagcatctggtacatttccgacggctggaacaacggcccgcaccagaactgcacctggtcgaaaaaccaggtgaaggtcgaaggcggcgcgttgcagctctcgttcgccgagggccagtcgaaggaccgcagctacctctgcggcgaaatccagaccaagaagcgcttcggctacggcacctacgaggcccgcatgaaggcggccaccggctccggcctgaactccgccttcttcacctacatcggcccgaccgacaagcagccgcacgacgagatcgacttcgaggttctcggcaagaattccggcgaggtgcaggtcaatcagtacatcaaggccaagggcggtaacgagaagctggtgccgatcggctccaaggccgatgaaggcttcaacgactacgccttcgtctgggaacccggccggctgcgctactacctgaacggcaagctggttcaggatgtcaccgatcccgcgaagatcccgaccagccagcagaagattttcttcagcctctggggcaccgacacgctgaaggactggatgggcaagttcgcctacaccaagccgacatcgctggaggtcgagcgcttcgcctacaccgcccccggcgaccagtgccagttccctgaatcgatcgcatgcacgctcaactgacgagcgccgaaggcgcgcaaacgacaaggagtgccatgctcaaagtcctgtatctcgtgcatgatctggcggatcccgccgtccggcggcgggtgctgatgctgcgcgagggtggcgcgcaggtgacgctcgccggctttcggcgcggcgaaaaccgtctcgccgaagtgcacggcatcacgccgatcgagctcggccgcaccgccgacgccaagttcgcgcagcgcatcggcgcggtcgcaaaggcgatgagcggactgaaggggctgctgaagacggtcgaaaagcctgacgtcatcatcggccgcaacctcgaggcgctcgccgtcgccgatcgcgccaatgcgatgttcggcggcgatgtgccggtcgtctacgaatgcctcgacattcaccggctgctgtcgcgcgacgacatcgtcggaaagatcatgcgcggcgccgaggcccgcttcggccgccacgcgcggctgatcatgaccagctcgcccgccttcatcgaacatcacttcgcgccgcgctccggcatcaaggccgaaacgctgctgatcgaaaacaaggtcatatcgatcgaccagacggtccagccgaccatcgcccgcccgctgaaacagcccggccagccctggaagatcggctggttcggcgcgctgcgttgccgcaagtccctggcgatgctcgcggagttctcgcgcctgatggaaggccgtgtcgagatcgtgctgcgtggccgccccgcctattccgaattcgaggatttcgacggcttcgtcgcgggcgagccctatctccgcttcgaaggcccgtatcgcaaccccgaggatttgagggcgatctacgacgatgtccacttctcctgggcgatcgacttcttcgaggaaggcctcaattccagctggctgctgccgaaccggctctacgaaggatgcctctacggcaccgttccgatcacgctcgaaggcacccagacggcgcgtttcctgcaagacaaggcgatcggccttgctcttcccgacgcgagcccggcagcactgcgcacgctgttcgaaaccatgaccggcgaacgctaccatgcgctcggcgacgcggtcgccttgaccgatcaaaaaacctggctcgccgaccgcagcgactgcgaagcgctcgtcgccagcctttcccgccttgtgcctgctgccgtcgagaggggcgacagcagtgcatccgcaccgaaaaccgtatctcaagaagggtggacaaccatgaagcctgatgccagtgccagcgtctccagtctcataatcatcccctgtttgaacgaagagaagcacatcgagccgctgctcgccaagctgagccgcgagatcgatcacatgaacgccaagatcgtcgtcgccgacggcggcagcaaggatgcgacgcgcgagatcgtcgcccgcatcagcatggccgatccgcgcatcgtgctgctcgacaatccgcgccgcctgcagagcgccgccaccaatctggcggtcgccaccttcgggcgcgactacgactatctcatccgcatcgacgcccatggcgattatccggacgattattgccgccgcctcgtcgaggaagcggtcgagacccaggccgattccgtcgtcgtgtcgatggagaccgtcggcttcgggatgttccagaaggccaccgccttcgcccagaactctaagcttggaaatggcggctcgaagcatcgcgagggtgcgaagggccattggaccaatcacggccaccacgccctgatgcgcatcgccgccttcgaggctgtcggcggctacgacgagaccttcagccacaacgaggacgccgagctcgactaccgcctgaagaagtcgggctacggcatctggatgaccgataagacccgcatggtctattacccgcgctccagcgtcgccacgctgttcaggcagtatctcggctacggtcgcggccgcgccaagaacatcctcaagcatggcagcatgccgaatgttcgccagatgctgccgcttctggtcgttcccgtcttcatcggcgcgtttctggccgtggtgaactgggccgccgtcattccgttcagcctctgggcggtcgcctgcgtcggctacgggttctggatggcgatcggccagcgcaacccctacggcccgctggccgccgtatcggccatggtgatgcatttcgcctggtcggccggtttctggatggaactcctgagcttccgcggcagaagggtggcgtcgtcgtgaaccaaccgaaacagacgagacaattgcagatcgacatcggcatctgcacctatcgtcgcgcgtcgctcgacgaggcgctgctgtcgctcgccgttctggaggttcctcccggcgcgcggctgcgcatcatcgtcgccgacaatgacaagaccccgagcgccagggagcgcgtcgacgcgcttcgtccgcgcatcgcccacgaaatcgcctacgtgcattgcccggcatcgaacatctcgatcgcccgcaacgcctgcctggataacgccaccggcgatttcctggccttcatcgacgacgacgaggatgcgagcgaggattggctggtcgagctgctctcgaccgcccgcgccaccaaggccgacgccgttctcggacccgtccgcagcgtctacgccgacagcgcgccgcgctggatgcgggtcggcgactttcactcgacgctgcccgtctgggtcgatggcgagatccgcaccggctacacctgcaacgtcctgctgcgcctttcttcgcccagcctcgccggccgccgcttcaatctcgcgctcggccatacgggtggagaagacacggaattcttcagccacatgcatgaggccggcggcaagatcgcctttgccgagaaggcctatgtctatgaacccgtgaccgaaaaccgcgccgatctgtcctggctcgccaagcgccgcttccgtttcggccagacccatgggcggctgctgcaggagacgagttccggcctcaaccggccgaagcagatcgcgctggccacggccaaggccggcttctgctacgccgccgccttggcctgcatcttctcggccgtgccgcgctaccgctatgcccttcgcggcatcatgcattccggcgtcgtcagcggcctgctcggcgtgcgcgaaatccgccagtacggaacggcggaggccgcatgaagcaagagatacccgacgtcagctttatcatcgccgcgtataatgcggcggcgacgctcggaaaggcgatcgacagcgcgcttgcccagcgcggcgtcacggtggaggtcatcgtcgccgacgattgttctgccgacgaaacgaaggcgattgccgaaagctatgccgatcgcaacgtccggctgatcgcgcttgcccgcaatggtgggccatccgcggcgcgcaacgccgcgatctcggccgccaccggccgctggctggcggtgctcgattccgacgacacggtcgatccggaccggctgcgcaggatgatatcacgcgccgagaaggcggacgccgaaatcgccgtcgacaatctccgcgtgatcagggccgacggcacgccggctgaaaccatgttcgccgaggacgcgctggcgcagatgccgacgctcaccctcgccgccttcatccgttccaacgcgctttttcagaccacccataatttcggctatctgaagccgatcttccagcgcgccttcatcgaacgccacgcgcttcgcttcgacgaaagcctgaagatcggcgaggactatctctatctcgccagcgccatggcgctcggcggccgctgcgttttcgaaccgctggccggttacgactacaatattcgcgaagggtcgatctcgcgtgttctttcgcttcaccacatcgacgccatgatcgaaggggataaggccttccttcgcaatcacacgctggatgtggaagcagcagcggcccaggagttccgggcaaagagcctgcttcggggaagagccttcctcgttctcgtccagaatatcaaagaccggtcgatccttggaacgatcagaacagcctggggcaccccttccgctgtcgggcatctcagcatgcccatcgcagcacgggccaatcgcgtcatcgcgtcgctccgcaaactgattggcccgcaggccgaccttacagccatcgatggcacgacccgttcccgcaaaggatagagccatgaaccaacggaacctcaccttgcacagctctctgccaaaagcgcccgaagactccgattccttcatcgatatcgatcgcctgatcgcgatcctgatgcgccgtatcggctcgatcgcgctctgcgtcggagtgacggtgacgctggcggtgatctaccttctgttctccacatcgcaatatacgtcgatgacgcagatcctgctggatgacagcatgaccaagtacgcgcaggacgccaccccggtggcgaactcgcagcaggtggacatgcagatcgccagcgccgtcgagatcctgaagtccaaccagctggcgctgcgcgtcgtcgatgccgagaacctgcaggacaacagcaccatcctcgatccgcccgcctcccctgttggcctgatcaagtcgggcatcaagctgcttgccagcgccgtgcttcccggcagtcccccggtctccgaagacgatgcccgcgccggtcgccgccagaaggccgcggcgctcattcagcaggcgctcacggtgtctcgcgtcaaccgaagcgcggttctcgccgtctcgttccgctcgacggacaagctgctcgccgcgcgcatcaccaaggcctatgccaccgcctatctcagcgaccagctgaacgccaatttcgacgcgaccgaaagcgcctccgtctggctgcagcagcgcctgaccgacctgcgggaacgttcgcagcaggcagcgctcgaagccgcgaatttcaaggcgaagaatggcctgacctccgccaatggcgagctcatgtccgagcagcagctggccgatctcaccaagcagctgatcgtcgcccagtcggacgcggccagcacctcggcacgctacaaccagttcaagcagatcatcgacctcggccccgagggagcggtcaacaacgccgccatctcctccggccaggccaacaattccgtcatccaggacacgcgcacgcgctacatcaatgtcagcaagcgcgagcaggaagtcacgacgaatttcggcgccgatcatccgcaggccgtggcgctgcgcgcggaaaaggaagatctgacccgccagatctttcaggagctgcagcagctggcttcgaatgcccgcaacgaatacgaggtcgcccgctcgcgcgaggcatcgctgcgcaagaacatcgacaacctgaccggcaagaactcggaagccgacaagtccattgttcagctgaacgacctggaacagcgcgccaccgcgctgaagacgctctacgaatcctacctcggcaagtatgaggaggcggcgcagcagcagtccttcccgatcgccaaggcacgcgtcatctccgaagccggcatcccggtatcgccctccagcccgaagcgaacgatgacgctcggcctcgcgatcgttctcggtctgatggccggcggcggccttgtcgtgttccaggaattccgcgaacgcttcttccgcgtcgaaagcgatgtccgcaccatcctcggcctgaaattcctgggctacctgccgctggtcggcaagccgccgcgcgaaaggaagatcttccgaaacccgagccagctcgcgcccgagcccggcgatccggtcaacgacgacggcgcgaccttcgagcgcatcatgcgtgtcgttctggaagcgccgcgctcggtcttcgccgagacgctgcgcaatgccaagcttgccagcgacgtcatgttccagggccgctccgaccgcgtcatcggcgtcgtctcggcgatgccgggcgaaggcaagtcgacgacagccgccaatttcgcggcgctcctggcttcaagcggcaagcgcacactcctcatcgacgccgaccttcgcaatccgggcctcacccgcatgctgaagacgccgccgcagcacggcctcgtcgaagccgttctcggcgagatcccgtgggccggcgccgtgaaggtcgatccgaccacgaagctcgcgatcctgcccgtcatctccaacgacaacctgatgcacaccagcgaattgctggcatcgcagggcatgttcaatctgatggaaaacgcccgcaagatgttcgactacatcgtcgtcgaccttgcgccgctcggccccgtcatcgacgccaaggccttcgcgccgcaggtcgacggcttcctgttcgtcaccgaatggggtgagacgcccaccaacctggtgcgcgatgtcctcaacgccgagccgcagatcaagtcgaagatccttggtgtgatcctcaacaagaccgacatggccgaactcggcaagttcaccaacttcggcggcaccgagcgttaccgccacaagtatacgagctactacaccgaagagacgccgaagatgcgcgaaaccgccgaagcggacgcctgatcaggttgagaacaggcgcacctctccctgccacaaccgcgcgacagtcaacctgtcgctgcggaaggcgccggtgtcgaggttgagccgcatctcctgcacgtcgggctgatcgaccggcgtgtgcccgtgaacgaccagcttcggcagcggcagatcgctttcgaagaagcggtgccggatgaagacgagatcgtcgtcctgctgattgtcgatcgaccgcgccggatcgatgccggcatgcacgaaaagcaccgccggcgtgtcgagcaggatcggcagcgagcgcaggaactcgatatgcgccttcggcagcgaatcgcggatgaacgcatcgcgcttcgaagccgtgcgaaacagccccggcatctggttgggatcgatgccgtaggagtgcaagagagcgtccgcgccggtcatcatccagctgtcgtaggacatcttgccgtcgatatagtcgagcatcatcatttcatgattgcccgtcaggctgatgcgatcgaaaccatcgggcaccggctgcatcaggtgcgagatcacctgcgccgacgccggcccgcgatcgatatagtcaccgagcgtgatgatcagcttgcgtcccggcaggcgcgacgcatcctcgaagatcgcctgctcggcctgtcgcagaagatcgagcctgccgtgaatgtccccaatcgcgtagatcggcatatcgccgggatcgagctggagccgtgtgcgagggttcgacggcatatgtaacctcatgctgcataatatcatgggtcgcgggggtcgcgcctttcgtcaggcagcggcgaacacgacccaagacagcgcccacgcgggcaatggactgtcagtaacactcttatttcttaaaaaacacgcgctatcttcgcgcggctcccccgccaggggcctccgatcaccatatagtgagcatcctatgaatcgacaggccggtcatgggacaggtctgacggccgcgatcatcggaattcgcgccgtccgtcaggcgagcgacatcggcgccgtctcgtcgctctcggtccacttggcgccggaggcaacgaactgctcgagcgtcatgttgtcgaggatatcggcgatcgcatcgcgcacgttggtcatcgaccgacgcacctgacaggtctccggatcggagcagtcgtcgcaggcttcgaacgcggtgcggctggcgcaacggatgggcgcgagcggaccgtcgagcgtgcggatcacatggccaatcctgatttccgatgccgcgcgcgacagcgaatagccaccgcccggccccttcttcgatcgcaggataccgacattgcgcagttcgaggaggatcgtgtcgaggaacttcttcggaatattgttgcgggccgccacatcgttgatgaatgcggtttcgcccggtgcgagccgtgcgagatcgaccaacgccttcaggccgtattttccttttttcgttagcatttccggctaccttcagctcccacgtgatcccctatccggcaggcaatagcgctgaatccgtgaagagacaacaaatgacatcgtttatagagtttatatggcgaggtgttgccctacggcccctcggaagacggccgatccaccgccggaggcgaggtcgctgcatctggatttgggccatcgcttttgaaaacggcaaaagtgagggcaatcatcgcgaccacgaaggctgcggctccgatcagcgcccagacggagagcctgcggccctcgctcagcatccgctcttccgtatcatccaaacgaccgggccgttcggcggcctgatccgtcaacggttgattggtcggacgatcgtcgtgatctcgcatatcgcacctcccggcaggcgccgcgccggtgttcagatcagagggtcgcgtccctgcgcgacactccggttgagttcgtcggcgatatcgcgcgcgtcctcccgggaaagcccgaccagatcgcgaccatccgtcgccgccggcagcgaggtcatcgaatccacgaccgtccaccgccccgaggcctcgcggcggatctcgtaacgcaacggttcgtcaggaccatcacactccacgagcacatacctccgtaagctatgctctcttatctgtgccaccggcacgcttaagcaaggatgccgcgatcaactccgtcagtccgcgacatcaggaacgttggccttcaactccttgatccagatccgcgcattgccgtccgacggcgcgcgccagtccccgcgcggcgaaagcgagccgcccgacgtgaccttcggcccgttcggcgatgccgagcgcttgaactggctgatcgtgaagaaacggaagagaaacacttccatccatttcttgatcacgggaagatcgaaggcgcggcgcttgtcctgcgggaaatgcggcggccagacaccggcctcggcatccctccatgcgcagtaggcgaggaaagccaccttcgacgggcgcagcccgaaacgggtggtgtagaacagcgcgaagtcgtgcaggtcgtagggaccgatcttgtcttcggtactctgcatcacgccgttctcgtcggcgggaacgagctcgggcgagatcagcgtacccaggatgcgttccagcgtcgccttggcatcggcgtcgaagtcgcccgtgcggatcacccagcggatgaggtgctggatcagcgtcttcggaacggaagcgttgacattataatggctcatctggtcgccgaccccgtaggtcgaccaccccagtccgatttccgagaggtcgcccgtgccgagcaccagcgcgttgcgctggttggcggcgcggaacaggaagtcggtgcgcaggcccgcctgcacgttttcgaaggtcacgtcgtagaccggctgcccgccggagaacggatgcttgaggtcgcggagcaattgcagcgccagcggcttgatgtcgatctcttccgccgtcaccccgatgctgcgcatcagcgcccaggcattcgacttggtctcgtcgccggtggcaaagcccggcatggtgaagcacaatatgtcggagcgcggccagccgagcctgtcataggcgcgcgccgccaccagcagcgcatgcgtcgaatcgagcccgcccgagatccccaggcaaagcctcttgatgcccgtcgagcgcaggcgcttcatcaggccctgcacctggatgttgaaggtctcgtagcaatcctggtccaaccggctctcgtcggccgggacaaacggaaaccgcgccacatcccgctcgagcccgatatcgccccgcggcgcctggaactggaagccgatcctccggaacgcgcggtccggcgtgaggttgagtgtcgcggcatcgttgaaggtgccggtgcgcaggcgctccagccgcagccgctcgacatcgatatcggcgacgcacatctgcgacgtcatcgggaagcgctcggtctccgacagtatcgagccaagctcgtatatgcaggcctgtccgtcccaggccagatcggtcgtcgattcccccggcccggcggcggaatagatgtaggcggaaaagctgcgcgacgattgcgcggcgcagagcagcttgcgggtctcggcctttccaacggtgatgttgctggccgacaggttggtgaggatgagcgcgccggctagcgcgccgaaatcgctcggcgcggcgggcgcccagaggtcctcgcagatctcgatatggaaggtgaaatccgcccgatcctcggccgcgaaaatcatgtcgatgccgaacggcacggtctcgccggcaacccggatcgtctgatcacgcacggttcgtccggaggcaaaccagcgcttctcgtagaattcgcgataattcggcagatgcaccttcggcacgacgccgaggatgcggccggcgtgaatggcgacggcgcagttataaagtcgcccctcatgctgcagcggcgccccgatcagcagaaccggggtgagcgcggcgctcgccgccacgatttcggcgatcgatgcatccaccgccttcagaagcgcgtcctgtccgagaaggtcgtcgatcgcgtaacccgatatcccaagctccggaaacaccatcaggccgacgccgcgcgcgtggccctgccgcgccatgtcgagcgtcgccttcgaattgaaatcgggatcgccgatctcgcagatcggcgtgcaagccgcgacgcggacaaatccctgatcatagaccgaatagaaattcacgaatgcctccagcagccaagcgcttcacgaagaccaatacatccaaatgcggcggcgcaaaaccgcatctctttgcaatgctgacccctgttggcgtcatttttgcaaacctgcggcgtatgtctcaacaggaatttcaccgagggttgcatggcccgcgaatatatcgcttacataggcgaaaaattacaaaactgtcataaaactatgggggtccgcccctatatcggcccccgcgcgcccttcagtttctcaccatcagagttccgaatgccaaacctcgcccccgtccacgctggactgctccgggaaaccatccccggtgagcggcgcgtggcgttgacgcccgaggatgtcggcaatctctccacgcgcattgcgatcagcttcgagcccggctgcggcaccgcggccggttacgaggacgaagcctatgtcgcctcgggcgcgcgcccggccagccgcgagatgatcgcgcgcgattgcaatctcttcgtcggcatccgcaagccgctcgacgcgcacgtcttcgccggatctccgaccctgatcttcctcggctcaccactcgacgccggcgaaccggcagcccgcggcctcatgctcgacctcgcgcgccttgaaggcatcgcggatgccggctgcatggacgtggcgaccaggcaggcgaccatctgcggccatgccgccgttctggaaggcgcccgccaacttggcgtcggccatccgatgctggtgatggatggcgcccgcgcacgcccgatcaagatggcgacgctcggcgccggcgcggccgccctccaggcgatcgccaccgccagacgccttggcgccctcacctatgtcttcggcttcggcgacgacgaccgcggccgggctgaagcgctgggcgcgaagttcgtgatgatggatcccgcgctcgagcagccaggcgccatgacgcccgacgcgctcctcggggccagccgcaagcagcttgccggccagctgcgcgaaatgcagctgatcatttccagcgtcggcggatcgaccggacgcgcacccgttctgatcgacgacgcctcgctcccgctcctggcatccggcacggtcatcgttgatctcgaggcccccgccggtggcaattgcgcgatgacgaggacagacgagatcgtccgccttgccgacatcatcattatcggaaaaactactttagcgagcatcgatgcacaccagtccagccgcgtgttcagcgaaggactgcgcaagctgctggagcgcctgacgacactagacggacgcctgctgctggaccgcgaagacccggcaacccatcgcctgatcggcgagcgaatcgccggtgcgagcgccgaatcatgaccgaaggacaaccgtaactcggccggattattgcatcgcagcacgaaagacgtgcataagcatctacccatatatacttgagatagcttgattttcgcgatcggctagctgatagtcccgttgtcgccgtcacaaaagttgccattctgcaacaccatctttttgcatcgcaaatgtgacggattatgactgtatctggaattgatacatttaaaccaaaatgtaatttgcggccacggagacatcacgtccccgtgagggcttgtttgaaattggggtaggtagggccgttatcggcagcagtgacctgtgcccaatcctaaatagattggactcaactatgactattcgtatgatgctcatcagctcggcagcggctctcgcagccgtatcgggcgctcaggctgccgacgctatcgtcgctgctgaaccggaagccgtagaatacgttcgcgtttgcgacgcttacggcaccggctacttctacatcccgggcacggaaacctgcctcaaggttagcggctacatccgtacgcagctcaacgtaagcccgaacgcaagcgcgacgaccggcaacggctcgactgtcgccaaccgttcggactgggacatgtacacccgcggtcaggttcagttcaccgccaagagcgacactgaatacggcccgctcaccggcgtaatcgttctgcagacgaatgctgacaacgcttcctcgcaggctgctatcctcgactccgcttacatcgacatcgccggcatccgcgctggtctgttctacagctggtgggacgatggtctctcgggcgaaaccgatgacatcggctcgccggttaccctgcacaactcgctgcgttaccagtacgaagctgacggcttctacgctggcatcagcgtcgacgaactggaagacagcccgtactacaacggcgaaaccgcaaacaacttcggcgttgctgttggcatcggcggcaaggctggcgccttcacctaccaggtaacggctggctacgacaccgacaacgaagctggcgcagttcgcgccatgggtaccgttgccatcggtccgggcacgctcggcctcgcaggtatctactcctccgacccgaatgcctattacaacaaggctgagtgggtcgtggccgtcgagtacgccatcaaggcaaccgacaagctgaagatcacccccggcttccagtactacggcaactacggcatcgtcgctggtcagttcgacaacaacaacgacgcttggaaggccggcgtaacggtcgattaccagatcgtagacaacctctacgccaaggcgaccgtcaactacctcgaaagcgacaagacggacggcgtaacctcgggcttcttccgcctgcagcgcgcgttctaataaatcttcgggcgccactcttcgatcacgctggatcatccgatccggtgtgagcgggggatggcgcccgaaccagacgtttctgatcagattgacctccgatcagtttacggaaggtggcgcggtttccctgccgagccaccttttgctattggatatagaggctactccgcggcggcacgccgctctgtctcgtctgccacgagcttttgtcgctccacgtcgagacgacgcagctccgccacgctatcctccacggtcaccgaccccagcatatcgacaaccgcctgctccgcccggtcgcagagatattcggaaagatcgccgatattctcgcccaccagaccggcatgcgggatttcgtggcgcgtcgcccagagcttcttgcttcccgtcacggctgcgtagatctcgctgagcaggatctccttgctcgcgcgtgccagccgtatgccgcccttcccgcccggcaccgaaacgagaatgccgttttccgtgagcggcgccagcagcttgcgcacgaagctcgcattcgtgtccagccccaccgcaagcgattggctcgtcgagcgcacgccggcttcgtcgttgacggcaacgctgacgacgatctgcatcgccgtggaaaaacgcgtatcgatcatgcggatcttcagccttgggttaaggcaacaggtggcgaggacatggatgcactgggccacacgctgcagcggtaggagaagtgatatttcccctcaaattgcattgtcaatgaacagcacccggaatcacacttgtttgatattagcgatcgcgtgattatgcgatcacgctagagccagccgatccgtcggagcgcccagagcgtcgcgatcgacgtgacggtcacgaagccgacgatgacgatgaacgcccaggtatcgttgaccccgggtatcccgccgacattcatgccgaacagcccggccacgacgctcggcggcagaagcagcgccgcaagcgccgcgagccggttcgaattgcgggcgatgcgctcgctgatcacggtcgacaggtcgtcgtgcagaatgccggtgcggtcgcggatcgcgtcgagatattcgatgaagcgcatcagcttgtcgatcacctcgcgcagtctcagcttgtcgcgctcgatgagccagggcgcgtcgtcatgctcgatccggttcagcgcatcgcgctgcggcgccagatagcggcgcagctgcacggaacggcggcgcagaagcttcagcctttcgcgcacctcgctcgcctcgccgtgaaagatcatctcgtcgagttcgtcgacctcctcgtccatcccgtcgagaaccggctcgaggtcgcgcaccagcttttcgccgatcagcgccaggagatcgccgctgcgctgcggccccttgcccttctccagcgccgcccggatatcgcgaagcgcggtgatatagtggccgctatctcgaagtgagacgacgcggtcgccatccacccacagatgcagcggcacgagatcgagcccggaatgcggctcctcggcctcatcgggggcggtggcgcagacgccgcgcaggatgatcagaagcccgtcgtcgacaggctcgacgcgcggccgcgtctcctcctccagcagcgcttcggccacgaacgtatcgaaaccgcctttgcggttcacccattcggcggcggcgggatggtcgcgttccagatgcagccagatcacgccatcgccgggcttccaggcgcagacaccgtccatgtcgatctgcctgcagccgccgcgcccatcaaggagcaacgcgaagcgtatccctggttcgacaccatagcttgccatcggcgcactcgcagtcttcattgccggtccttgcccgccgggggtgacggaaatagagccaactctctgaatattagcgggattctaccatgtcgcggaaaggacgcaacatcgcccccgcccgatcgaacgggccatgtccaaaacgctgcgaaagcgccagccaccctcgccttccatccacagcccacatggctctggtcgtgcagtttgataattatgtcgtagacaggctctacacgtcgcgtttctatccctaaaatccgatctcaatattcaatcagggtcgcactcaatggcagagtttcctaagcaggctaaggtcgtcatcatcggtctcggcggcatcgtcggcgcatccatcgcccatcacctgatcgagcgcggatgggacgacatcgtcggcatcgacaaatcagggattcccacggacatcggctcgaccgcccacgcctcggacttctgttacaccacgtcacacgattatctctcggtctggaccacccagtattcgatcgatttctacgagaagatgggccactactcccgcatcggcggccttgaagtcgcccgcaccggcgacgacgcctggatggaagagatcaagcgcaagctgagctccgccaaggcctttggcacccgggcgcattacgtctcgcccgccgaaatcaaggaaatgttcccgctgatcgaggaagatcaggtccagggcggcatgttcgatcccgacgccggcctcgtcatcccgcgctcgcagaccgttgcgggcaagctggtcgatgccgccgagaaatccggcaagcttaggatgttcggcaacacgccggctcagtcgctgatcgtcgagggcggccgcatcaagggcgtcgtcactcatcgcggcaccatcatggccgaccacgtcatcgtctgcgccggcctctggggccgcctgatcgccgaaatggtcggcgaggacctgccggtcatgccggtcgatcaccccctcaccttcttcggcccctataacgaattcgaaggcacgggcaaggaaatcggctatccgctgctgcgcgaccagggcaactccgcctatatgcgcgacaccggcgacccgaagaccaccgaaggcggccagatcgagtggggctattacgagaccaccaatccgcgcatgtgccacccacgcgagcttctcgaaaagcacgaggcgcgcctctcgccctcgcagcgcgacctggaaatggagcagatcctcgagccgctcgagcgtgccatggaactgacgccgatcctcggcgaactcggctataatgaaggccattccttcaacggcctgctgcaggtctccgccgccggcggcccctcctgcggcgagagccagaaggtgcgcggcctctggtactgcgtcgccatctgggtcaaggacggtccgggctacggcaagctcatcgccgactggatgacctacggccgcaccgagatcgaccacaactcgatcgactactcgcgcttctacccgcaccagctgaccgaggacttcatcgccggccgctgctacgaggccgcgcagaagatctacttccccgccgttcacacccgcgagccctacgcctctggccgcaatgccaagcgctcgcccttctacgagcgcgaaaaggaactcggcggctacttcatggagctcggcggctgggaacgcgcccatggctacaaggccaacgagcacctgctggagaaatacggctcccaagttccggtgcgcgaaaacgagtgggacaaccgccacttctggcgcgtctccaacgccgagcatctggcgatgagcgaggattgcggcatcgtcaacctcagccacttccacatggtcgacctcgaaggccccgatcatgtcgagctgctcgaatggctctgcgccgccaagatcggcggcgacgccaatatcggcaagggcatctacacccacttcctcgacgacgagggcatggtgcgcgccgacttcaccgtcatccgcatggccgaccgctgccgcctcatcaacggcgccgatgccggaccgcgcgacttccactacatgaagcgcgtggccgaggatcgcggtctcgacgtgacgatatcagacgtctcggaaaagttcatcacgatcggcatctggggtccgaacgcccgcgacacgctgaaaaaggtggtcgccgatccggcggcactcgatcccgaaaacttcgccttcgcggccatcaagccgatcgagatatcaggcaagacggtcaccgccttccgcatctcctatgtcggcgagcagggctgggaactgcacatgaagtacgaggacggcctcgccgtctgggacgcgctgcgcgccaccggcgtcatgcccttcggcgtcgagacctacgccaactcgcgccgcatggaaaagtcgctgcgcctgcagaacggcgacctgctcacccagtacaatctgctggaagccgatctcgcccgcccgaaagtcaaggaagccgatttccgtggcaaggccaagcacctggaatacaaggcccgcgaacaccagccggcgatgctctgcaccctcgtcatgaccgaaaacaccgacagcaagggcgtcaagcgctaccccgtcggctccatgccggtcatggatccggagacgggcaagtcgctggtcgacagcctcggccgcatctcctacacgacctcggtcgcctacggcccgaccgtcggcaagaacatcgcgctcgcctatctgccgcaggaatactgccaggtcggccgcaagctgaatgtcgaatatttcgccgagacctatccggtcgaagtggtcagcgtcggctacaagccgatctacgaccccgagaacctgaagccgcgcacctgatcgcgcccggcttttcaaggcgtaagcaaaacagcccgcgggatctctcccgcgggctgtttcattttcagtctcatggaaagaaccggccgcgcaacactacgcagccggcctcctgtcttagtgcttctcgccgcgaacggccgaaacgtcggcggcggaaacggcggcagccttgttgttccagccttcgcgcaggaaggtggcgagcgtcgccacttcgtcatccgagaggcggttttcgtagccctgcatgcgcagcttcatcgggcgatccggcgtcgagggcaattcggcgccttgcaggatcacgctgatcaggcccttgggcgacggtgccgtgaccagcgagttgccgtccagctccgggaaggtctcgccggcgcccttgccgctcaccatgtggcaggcagcgcagttgtcgaggtagaggcgcgggccgagcggcatgtcgggctttgcctccgacagcagcgtttcggtcgccgtcatctccgccttctccggctgtgtggccggagcggaggaaccatcgccgccgatcttcttcagataggtggcgatcgcgaggttgtcgtccttcgtcatgtactgaagcgagtcgcgaacgacgagcatcatttcgccggtggcgctcgagtgagcgttgcgggcggtcgacagataggctgcaagctcctcggtgctccacgactgcacggcacttgccggaccgcgaaggtcgggcgccgtgaagccgtcgatctcgccaccggaaaggaaggccttgtccttcgcgctcgtgccggacgacatcatcagcgggttgcgctgcgtgtggcaggtcgagcagtgtcccggcccctcgaccagataggccccgcggttgaacacggcatcctcgccctgggtcggctggaaaccggccttgccgagggcgagccagttccaggcgcgcaggccgaagcgcaggttgaacgggaaagcgaggttggtttccggcaccgtgctggagaccggctgcacatcgttcatgaagtagtcgtagagcgccacgacgtcttcttcggagagcttgcgatagctgtcgtagggcatcgccggatagaggtgcgtgccgttgggcgtcacgccgtcgtaaagggcggcgcggaaatcggcgagcgtccagttgccgatgccggtgtccttgtcgggcgtgatgttggtggtccatatcgtgcccatcgggctctggatggcgcggccgccggcgaaaggcttgccgccctcggaggtgtggcaggccatgcagtccgatgcacgcatgacatattcaccctgccccttggccggcttgaagtcggcggcgagctcggtgaccgggccggtgcgctgcaccggcacgacgatgaaggcgacaagggcggcaacgcccagaacgacgagcacgccgagaacgcgaatgagtttcttcatctctgttctccttatgccagcggccgcgggttgggcaggtaatccttgcggatgtggtatgccgcccagtaggccagaccgccgaccatgccggtcgggttgtactgcgtgttctgcgggaaggtgctggcgcccatgacgaagacgttatgcgcatcccaggactgcaggtaccggttgagaaccgatgtcttgggatcgtcgccggtgacggtgccgccggtattgtgggtcgtctggtaaggacggacgtcgaacatggcgccttccttcttgaaaccttcctgcatcgtggtcgggttcatggacttggcgatcggttccatcttctgcttcatgaactgcgtctggcgaatctcgttgtcgtgccagttgtaggtcatgcgcagcatcggacggccgtggcggtccttgtaggtcgggtcgaggtcgaggtagtggccgcgataggacatgacggagccgtgggcgccgatgttcatcgcatggccgtaccactcgccgatgcccttcttccagcctgcgccccagctcggggtgccagccggcagcggcatggtgtggccgggctgaccattggtctggccggcacgccaataggcgccgccgacgaagccttccttggcgaagtcgatattgtcgatgccgaaatcgtcgatgcagaagccgttggcgcccgtgccgatgaacgggttgaattcctcgtccttgaagaaaagcgtgtagccgccggtgatctggtaggcatagttgcggccgacgacaccttcattggtgttgggatcgtaaggctggccgatccccgacaccagcatcaggtgaacgttgttcagcgagaaggcggtgaggatcacgaggtcggccggctggaagacctcttcgcccgtcttgtggtcgaaataggtgacacccgtcgccgtcttgcggtcggcggccatttccacgcgcagcacttcggcctgcacgcggtattcgaagttcgtcttgcgcttcaaggcgtcgatgatcgccgtctgtggtgaggacttcgaatagttgtagcagccgtagcgctcgcagaaaccgcaatggttacacgggcccatctgcatgttgtattcgttgacatagtccttcgaggcgatgccgccggggctcgggaacggatgatagcccgccgccttcgccgcatcgcgaaacttcacgccatcccaggtcgacggcatggccggcatcggatagtcgttcgaccgcggcgcctcgaacggattgccgccctcgacgatcttgccgttgacgttgccggcctggccggaaatgccggcgaccttctcgaagcggtcgaaatgcggttcgagctcttcgtaggtcatcggatagtcctggatcgtcatgtcctcggtcatgacgccagcgccgaatttctcggtcacgtaggacttcaggcgatattccgactgcatcggacgccagttcaggccgttccagtgcgtaccggcgccgccgacgccggtgccgagcaggaaggtgccgaggctgcggtaaggcagcgcggtttcatccagcgaacggcggatggtgaccgtcgtgttcgccggcttttccatcatgccgtagcggatgccgtatttcagctcgtcgatcatgttcgggtactggaaatcgggaacggtcgcttggtcgtgaccacgctccagcgccagcacttccaggccttcattggccagttccatgcccatgatcgcgccggtccagccgaaaccgaccagaacaacgtctttcttcttttctgtacgtgccatgacggttagcccctttcgccggagatcgagacggggccaagcggatacttgacgttatgctttccaacccattccttgtagctgccgcgggcgcccgggaagccgatatacttccaggcagccatgccgtggttgccgccatacatcgggtcggagaagtagccttccttggtgttggcaagcaggatgccgaagaaatcgcgcagctcgggattgaccttcatctcgtccttctggagcgaggtcagcgccttgtcctgcgtttccgcgtcgagctcggcgaagatcttgccgtgggtggtcttgcaccactcgtcgaagaacgggatggcctgctggtagatctgaagcgggttgagcggggtctgccagccgcgcagcgggctcgccgccggctcgtatggtccgaccatgtaccagtcggacgccttgccgtaatcgccggcgagctgcttgtcgatgaagacgggcacgcgggtctcgatcgcgccggggccatcgccctccgacgggatcagtctcgcgaccgctgccatgacgaaggcccactcggtgggcgtcagacagtccggcctgtattcggtgagggcgacaggttcgggtttggcttcggcttttgccgcgccggcaatgccggcaatggctgcggtcgccgcggaagctttcaggaagcttctgcgggacggccggcccgggaggtctctcatgattggctccttcgtggctgtgggagtcagccactttggttttgctgagcgtcacttcagcgcgggggcaaattgacgctagcggcctacgcccgcttgtcccgggtgacaagcgccgacgcgcttaatcgtgttctattttaggcaaaaatgagaacttttttgcacatgtacaaacacttggaacacaaagacgcgagaatttatccatttgtggaattttctactcatgaattgtcaagcgaccggcaacggcaaacgaccgctcggtgccgggcgggcgtttcccatgcgatgtggatgacgatcagttcgagccggaggtcccgaccagcaccggcttttcgctgtagtccggcgcgaacagccgcttcagggcggcgaccttcggcaggtcgttgatgacgatgtagggataatcgggattgttcgtcaggaagtcctgatggtacccctccgcgacatagaaggtcttgcccggctcgatcttcgtcacgatcgccgcatcgaaaaccttggcgcggtcgagctggtcgatataggccttcgccacctttgcctgctcgtcactggcgggaaagatggccgaacggtattgcgtgcccgtgtccgggccctggcggttcagctgcgtcggatcgtgggcgaccgagaagtagatctgcagcagccggccgtagctcaccgtcttcggatcgaacaccacctggacggattccgcatggcccgtgtcgccgccgctcaccgtctcgtaccgtgccgtgcccttcgccccgccggcgtagcccgacgtggcgctgacgacgcccttgacgtgctggaaaacaccctgcacgccccagaagcatccgccggcgaacgtcgccgtttcgcgaccgcctgccgccggctcgtcgagagcgggcggcgggatcacatgcacttccttggcgaccgacggcgtcaactgcagcgccagcccgcccgccagcgcgattgccgcgccgaggacgagcgtgcggatcggacgccgcgttctggatatgtcgtgactgttcatgatgctttcctctcagccggatggaaggtcagggcaacgccgttgaggcaatagcgcagaccggtgggcttcggtccgtcgtcgaacacatggccgagatggccgccgcagcggccgcaatgcaccgcctcgcgcaccattccgaaactcgtgtcgcgcgtcgtgccgacgacctgccggtcgagcggcgcccagaagcttggccagcccgtgccgctgtcgaatttcgtcgccgaggagaacgcgtcctgcccacagcccgcgcaggcgaaattgcccttgcgctcctcgtgcagcaaggcgctggagaacggccgctcggtgccctggccgcgcaacacctcgtactggtcggatgtcagcatggcacgccattcggcatcgctgcgattgacggcgaaggcctcggcggccgcgttcctcgagcgcccgagcaagagtggaagaccgatcgcggcaatccccgcgctcagcatcagtcggcgtctgttcagcatctcgcggtctccccggatgacgtttcccaaatgacggtcccaaatgacggtcgtcgtatcttggagtatctacgctcgggacggcgcatttgttacacaccggacgcgcgggaaacgaaaaaggcgccggctccatggccgacgcctcgatggcattcaggcatatggcgatgcgcgatcagaccggacgatgcaggaaggccggcatgtcggcgccatcggcgagcttcgagagatagagccgcgccgtatcgagcgcctcgcggatcgtcacgtccatgtcgagataacgataggtgccgaggcgaccgacgaaggtgaccccccgctccttttccgcccgcgtgacatattgcgccagctgctctttttcctcgaccatccggatcggatagtagggaatatcatcaggcccgcaggcgcgcgagaattcgcggtagcagaccgaaccctgatgctcctcccagggggagaaatgcttgtgctcggtgatgcgggtaaacggcaccgaggcgtcgccgtagttcatcaccgcgcagccctggtaatcgccgtcatagctgaaacgctcgaaatcgagcgtccggtagccgagccgccctgcctcataatcgaaatagccgtcgagctggcccgaatagaagacatggctcgcatccgcatgctgggcgcgctcgaaccgcttgctcagcgtcacgcggatattgggatggtcgagaatgcggccgatcatgtcggtatagccattctccggcatgccctggaatttgtggaagaaatagttgtcgtcgtagttgaagcgcaccggcagtcgcttcaggatcgaggccggcagctcggtcggcgagcagccccactgcttctcggtgtagcccttgaagaaggcctcgtagagatccttgccgacgaagcgcatggcctgctcctcgaaggtctgcgggtctgcgatcgtcttgtcggcctgctcctcgatgaacgccttcgcctcgtccgggcgcagggtcttgccgaagaactggttgatcgtgtgcagattgaccggcagcgaatagacgcggtccttgctcgtcgtcttcacccggttcttgtagggcatgaaggtctggaaaccgttgacgtagtcccagacctcggcgtcatccgtgtggaagatgtgcggcccgtagacatgcaccatcacgccggtatcggcgtcacgctcggtgtggcaattgccggcgatatggtcgcgggcatcgaggatctcgacctcgtgacccgccagcgccagttctcgcccgatcacggcgcccgacaatccggcgccgacgatcacgatctttccattcccctgcatgttcaggaataccccttttcccacggtcttgcggcaaacccgccgcgcaagaccggcatcgacacacgttgagcggcggtagctttacgccgccggctccgtccacaggcgcgtatcgatggcaagcggcgcgtagtcgttccactgggccagcttctcgcgatagcggcgacggtagctcgcatcgtcctcgaactcgtcgagcgtctgcaccagctcggcgccgatctcgtaataggcgtcgaggttgttgagatccggcgtcggtgtctcgccgcgctcggcctcgccctgcatctgccagaacagctcttcgagacgacgggccagacccggaatgtcgcgcagcgcactgccctcgcgcttgtccttcagcgactggcggatcgccgctaggctcgcgcgatccttggcgaaactgatggcgcgcttgacgtagtcgtcaggcccgctgcaggcaagctccggcacgccggcggcggcaacgatgctgttgcagaaacgcgaggcgaagctcttgcccggaaccgtgagcaccggcagacccatggtgatggcatcgcccgcggtcgagtgcgcgccataggggaaggtgtcgaggaacagatcggcaagcccgatgcgcgccagatgatgcgcattcgcggccttcggcgcgaagatgatccgctcggcggcgatacccgccttgacggcggtctgaaccagacggttgttcacggcgtcgtcggcagccagcagccagagcacgctgcccggcgtcgcctggagaatggtcatccagcgcgcgaagcacgcctcgctggtcttctgcatgccgttgaagcaggcatagacgaaggcatcctcgggcagaccggcctgcgcgcgcgtcggctgcgcggcgatctgccgcttgcggtcgatcggctggttgcaggcgatgcgcagcactttctcggagtaatagatttcgttttcgacaggcacgatcgtctcgtcggcgatcatgtactggtgaaccgggctgcccatcgaaccggggtagccgcagaaattgacgatgacaggggccggacgataggcgaacagcttcgtgcgggcatgcttggtgtagccgttgacgtcgatcaggatatcgatctcgtcgttgcggatcaggttggcggcatcggtgtcgctgagcgcgctgatatcgcgccagccgtcgacggcagccttgatacgctcctgcgtcgcgtcattggtgcgcggctcgccgcaataatagccgaagatctcgaccgtcgtcttgtcgtgcagctccagcacttcgctgagcgcgaaaccgacggcgtgatcgcgcagatccgaggacacatagccgacgcgcagacgctggccggtgccggtcttcacccgcgcgggcttgcgcggaaacgcggcaaggttcgggcgaccgacgagggtcttgttgtagcgataggccttggccagctggtagaacgggtcgtcggcgtagcaggaaagcgtcagcgtcgacatggcgtcgagcagctggcgcgcgctgacgtggatcgacggcgtcaggatcggccacttgcactgccgctggcgcagcgacgtccagtgctgaccagcttccgggcggttcggctgcagctcgatcgcctgccacagcgtggtctcggcggcctccagcagcccgccgccctcgagcacgcggccgatatgctgcagcgtcatcagccgatgctcgatacgctcgctggtgatgtcggcggtcgcatcggcgtagccgcgccattgttcgacggcctgatggccgaggccgcaatcctcgagcgccctcccgaggttgatatgcgccgggccgaagcgcgggtcgatcttcaggcaggcacgcagcgcgctgatcgccccggcgatgtcgccggcctgccgcgacaccacggaatagttgaagtaggcaagatgcagcagcggattgttgtcgttgaacgcgatccacgtcttgtagagctcggccgcctgctgccgctggtccgcgttcgcgagaccctcggcgatggagatcagatcgccaagcgacaggcgttgatgacgtgcctgctccaaaatgtttgcgattggagagacttggctcgatgcaattgcggtgttcgcgttcatggacgtcctacggcaaggcggccggatggccggtgtgtgaacagacgcatgaaagcgtcgtgccccttgctatcggatagagcttgcgtcgggctggctgatcggcgcccgcggcagcgtggaacgcctgatatcagggcggtccggcgagaacggccggaaagaaaaacgccgcccgatgtgatcgggcggcgtcctgttccggtttgtatcaggcttagacgttcagcgccgcgtaggctgcgagaaccgcgtcgacctgggccgagttcagagccggcacctgggtcgaggtgaaggcgccgagctggtcgctgttcatggccgcgatgtcctcggtctgcagtccggccagagccttggtgctgatcgccgcgatttcgtcggtcgtgaaggtcgcgatgtcctcgctggacattgcgctgatttccgccgcgctcattgccgcgatctgcgtgctgtcgaaggcctggatctggtcggaggtcattgcctcgatctgggccgatgtcagcgacgtgacctggctggtcttgaggccagcgatctggacagtggtcaggaccgcgacgtcgtcggtggtcagcgccgcgatctgcttcgagttcaggacgccgatctgatcggtgctcagggcgacaaccttgtcggtggacagggaggcgatctggtcggtggtcagaagcgcgacctggctcgtcgtcagcgccttgaactgatcggtgctcattgcatcaatgctggccgaggagagctcggtgatagccttggtgctgatggcagcgatctcgtcgttggtgaaggagacgatatcgtccgtcgacatggcgccgatctgggctgcggtgagaaccgcgacctgaccgctcgtcaatgccttgacctgatcggaggacatggcggtgatctggtccgtggtcagtgccgcgacctgggccgtcttgaggatggcgacgttgtcggtggtcagcgcacccacttcgtcggcggtcagagccttgatctggcccgacgtcagcgccccgacctgatccgaagacaggatggcgatgttgtcggtcgtgatcgcgccgatctggctgctcgtcagcagagcgacctggctggtcttcagagcggcgatctgctcgctgctgagtaccttgatgtcgtccgtggtcaggccggtcagggccttggtgctgatggcggcgatctcgtcggtcgagaaggccgagacaccgtcggtcgacatggcgccgagctgtgccgaggtcaggacaccgatctggtcgctggtcagagccttgagctgatcggaagtcatcgccgtgatctgcgcggtgctgagggcggcgacctggccggtcttcagcagtgccacgttgtcggtggacagaaccgcgaggtcagccgtgctgagggccgcgatctgcttcgagttcagggcaccgatctggtcgctgctcagggcaaccgccttctcggtcgagagagacgcgatctgcgcggtgctcatcagggccacctggccggtggtgagcgcagcgaactgaaccgtgtcgagtgcctcgatcgtgtcggacgacagagccgcgatgatcttggtgctgatcgcagcgatttcgtcggtcgagaaggtcgcgatgtcgtcggtggacattgcggcgaactcgtcggcggtcaggacaccgatctgggcgctggtcagagccttgatctggtcggaggacatggcgccgatctgcgtgttgttcagagcggaaacctgagccgacgacagcagcgcgacgttgtcggtcgtgagagccgcgacttcgtccgtggacagggccgcgatctggttcgacttcagggcgccgacctgatcgctggtcagaaccgcgatgttgtcggtcgtcagcgcggcgatctggccggtgctgaggagcgcgatctggccggacgtcagggccttcacctgctcgctgctgagagcgttgacatcgtcggtggtcagaccggcaagcgccttggtgctgatcgccgcgatctcatcggtcgagaaggacgagatgtcgtcggtcgacaggaccgaaagctgggccgagttcatcgaaccgatctgagtggcggtgagcgcggtaacctggtcgtccgtcagggcgacgagctggtccgtggtcagggccgcgatctggccggtcttcagaagagcgacgttgtccgtggtgaggacagcgaggtccgccgtggtcagggccgcgatctgcttggagttcagggcgccgagctggtcgctgccgagagcggccatcttgtcggtggagagagacgcgacctggctggtggtcagaagcgcgacctggctcgacttcagagcggcgaactgggccgtgtcgagagcgccgaggctttcggtcgagagctgagcgatcgccttcgtgctgatcgcgccgacttcgtcggtcgtgaacgtcacgatgtcttcgctcgacatggcgccgatctggctggccgtcaggaccgcgacctgatcgctgttcagggcgccgatctggtcggtggacatcgcgtcgatctgcgccgtcgtcagggcggcgacctgagtgctcttcaggatgccgacattcgcggtggagatcgcggcgacttcatcggtcgacagcgaggcaagctggctggtgctcagcgccaggatctggtcgctcagcagcttgctgatgttgtcggtcgacagcgcgttcagctggatcgtgccgagtgccgcgatctggctcgacttcagggcaacgacctggttgctgtcaagagcgccgaccgcttccgtggacagacccgacagcgacttcgtgctgatcgcggcgatttcgtccgtggtgaaggtcgagatgtcttcgctggacagagcgcccagctggccggaggacagtgcgccgatctgggtgctggtcagagccttgatctgatcggacgtcattgcgtcgacctgggcgctgctcagggcggcgatctgcgtcgtcttcaggattgcgacgttgtccgtggtcagtgccgcgaggtctgccgtggtcagggccgcgatctgcttggagttcagggcgccgacctggtcgctgccgagagcggccatcttgtcggtcgaaagcgatgcgacctggctggtggtcagaagcgcgatctggctcgacttcagggcagcgaactgcgtcgtgtcgagagccgcgaggctttcggtcgagagctgtgcgatggccttcgtgctgatcgcgccgacttcgtcggtcgtgaacgtcacgatgtcttcgctggacatggcgccgatctgggtggccgtcagggcggcaacctggacgctcgtgaaggcgccaacctgttcggtggacatcccgtcgatctgtgcggtcgtcagggcggcgatctgcgcggtcttcagcagcgcgacattggcgctcgaaagagcggcgacggcgtcggtggagagaccggagatctgcttggaggtcagcgcgccgacctggtcgctggtcaggagagcgacgttctcggtggagatggcgccgagctgatcgctgctgaggagagcgatctggctcgacttcagcgcgacgatctgatcgctgccgagggcggcgatgtcgttggtggtcagacccgtgagagccttggtgctgatggccgcgatttcatccgtggtgaaggcgaagacgccgtccgtcgacatcgcgccgagctgtgccgagctcagcacgccgatctgggtgctggtcagcgccttgatctggtcggaagacatcgaaccgatctgcgtcgagctgagggccgcgatctgcgcggtcttcagaagagcgacgttgtcggtcgaaatcgcgccgatctcgtcggcgccgaacgccgcgatctgcttggagttcagggcgccgatctggtcgctgttcaggagagcgacgctgtcggtggtgagcgcgccgatctgggcggtgctgagaagagcgacctggctcgacttcagggcgccgatctgcaggctgtcgagagcgccgatgacgtcggtcgaaaggccggagagagcctttgtgctgatggaggcgatttcgtcggtcgtgaaggttgcgatgtcttcggtcgagagggcggcgagttccgaggaggtcatcgcgccgatctgcgcgccggtcagcgcggaaatctgctcggaagacatggcggcgacctggctgttgctcagagccgcgatctgcgcggtcttcatgattgcgacgttgtcggtgctgagcgcggcgacatcatcggtggtcagggccgcgagctgcttcgaggtcagggcgacgacctggtcgctcttcagcgcgccgatcttctcagagcccagcgatgcgatctgcgacgtggtcaggagcgcgatctggctggacttcagggcgccgaactgggcggtgtcgagggcggccagcgtcgtggtcgagaggccaaccagggccttcgtgctgatggccgcgatttcgtcggtggtgaaggttgcgatgtcttcggtggtcagggcgccgaactgcgcggaagagagcgcagcggtctgggccgagttgaatgcgccgacctgcgtggcgtcaagcgctgcgagctggtcggtggtgagagccgcgacctgcgtcgacttcagcgcgacgatctggtcggtggaaagcgatgcgatcacttcggtggagagcgaagcaagctgcttggagccgagagcgccgatctgcgagccggtcagaacgccgatctggtcggagctcagggcgccgaactgggcgctgctgagcaaagcgatctggctggtcttgagcgcgacgatctggttgctggtgagacctgccatgctgtcggtcgtcagaccgccgagcgccttggtgctgagggctgcgatctcgtcggtcgagaacagcgcgatgccttccgaggagatggcgccgagctgagccgaggtgagaaccgcggtctgcgtggaggtgagagcggcgatctggccggtggagagaacggagatctgcgagctgctcagcgcgccgacctgcgtgctcttcagaacggcgatctggtcggtcgtgaaggcggcgacgtcttccgtacccatggaagcgatctgcttcgacgtaagggcggcgacctggccggtcgagagagcgccgatcagttcggagctgaggtttgcgacctcattggtggagagagcggcaacctgggcggtggagaagccgccgagctgtgccgtggaaagaaccgccagctgctcgagcttgaggccgaccagcgcggtcgccgatacggcgctcatctgctgggaggaaagagcaacgaagtcctgggtttcgattgcgccgagctgcgtcgagctcagggccttgatctgtgtcgtcgtgagcgacgccacgtcgttggaagacagatttgcgatcgcggtcgtcgacagcgcccggatctgattgacggtcagagaagaaacaatggaagtcatggacgagcgcccctcgcgttagctgatcaaaagacatcattcccgccccgtcggtcggacgcgcatagccgcactgaggccggccacacggcgtcgtcggcatcgacgatccgggtttcctgtcggaacaaaattgggtcaaactaaacatggctcggacgagccagcgcaaaaggagggcatcatgcgcccagagccaaagcgactctgatccctacgccaatgaacgcgaatttcttaacccccggcaccatttaccagcgtccatcatggacccaccggccaaccgcgcccctcggcagagctatcgcgagcagtagaactcttattcggcagtctttaatttcgagttaacgtcggctgtagctgagctgtgctcctgttacagattcggtcgcgggaagtctaaatcggcatctttttagatgcaattggcacactacccatttttttaagccgaaaccggacattcgactcgtggcaccagcaactatcgcgggcaccagcgtaaattcgacacccctaactaagaccattgaactgtaagcagaaaaaacggcaaaaaggcacgatttgctacattaagcgcaagactatttattggaagcactatgacgatagcggcgaatcatcatgaggaaacaagttatgcgccccctcgaagggcaaaatagcaaatagcggcggcacgctccggcaacatctcgcgtctcgcgtgcaataatttgcgaccaattttggggcaatcttcgcagaccccgcccggcgagcactccctgatgctgcggcgcacactgattcacccccttggcaagcccggcacaagtaaaatggcgttcatggagctattgggtgatagggacgaacagaatgcgactgtctatattgattagaggccacaactttcttgaaaaggatcgtttcggcctgccgatggacgggcgggacaatgccgcctccctgcttgagaacgtgatagcaccgattcgcgcgaagaatccggatgccaccgtctatctggcgacatacgaaagcccggcgctggccgagttgcaggaaaaattcgcgccatgcgaactgatcctgctcgaccccaacggaagctcgcaggcggaaacctacaaggaagcgttgaagcacgtcttccagaagaccgacttcgacgcactcgtggtcgtccgcttcgatctggcgttcaagaagcccttcgacgcctgggacctgaagatcgacatcaacagcatccacttcacctggaaggaataccgcgactactggcgcgatcaccgccgcgtcggcgatgccatccacgttatcggcaaggccgccattcccgccttccacaatgcgctgatcatgaaccagctggccggtcgcggtcatctgcacatgatgtactattatctgcgcacgatgcacgacaatctgaagttcatcgaggacggctacttcgacaccaacacgctgttcgccaacccggaatgcgacaatccgctctacacggtcttcaaccgtccgcgcctgaccagcatggcaggcagcaccggcatggtgttgcaggaaatccgcgcggaatagcaaacaagccaggtaacaagaacgcccgcatcgagatcatcgatgcgggcgttctgctttatagcactgtcttgaaagtatagcgcccgcgaaaccatccgcgaatacgctccttgagataaatcagacgagatacttgtcgttcttggcgctcgggatcttgacgacggtcaccgtcgcatcggtcagcgcctcgaactggttcaccctgcccggctcgatatcgatgatgctgcccgcttcccacacctgatcgatcatccggacggtgccggagacgacgagcgtgatctcgcgcgcgattttgtggtaatgcgccgcgtccttgtcgccggccacgtaatgcttcacgccgacctcgaacgcatccgtcttcacgacggtggggtcgaagtcgccgacgaaccagccgccgatcatgtcgttcagggtcagtggcttgtcgctcatttgtcgccttccgtgacggacagctcgatcagctggcggtccgacttgatcggatggaagtccttggcgttgatcgggaagatgccgatcttcttcccctcgagcaccatctcgttgtagacggggcagacgtagaacatgttgttgtgccgcgcgtccttgcggatcgcgttcttcgccgcgcgcacgaaatcgcgtccctgccggaaatagtagaagccggccgtcgcgttatcgctgatcggatgcttctcggccgcctcgaccaccatgttctggtcgtcgagccggacgaaggagtagcgcggatgcaccgacttgaaggtcatcgtgccgccatccagttcgcgctccacgaagttctggatcacgccgtcgaagggcaccgtcaggaattcgtcaccgttgaggatcaggagcggctggtcgttgtcgatatagccggcggcaagcagcgccgtgcaggcggccccttccgtcttgtcctcgaccgagaccaccgcggcctccggtgacagcaggcgcacgacctcgtcgagatggtagcgcgccaggtccttcttctgcatcgccacgatgatgcggtggccggggatcttggcgcattcggccagctgccgctgcaccaggggtacgccgttgatttcaaccagcgcggtcggataggcctccatcgcctggatgcgaggctcgccggctatcaggatcagaatattcatcgcaagctcatcaaccgtggatttttcgaatggtctcggtgatcccgggatagttcacatccgagatatcgttcaccaccatgacatgcgcgccggaacccttggccgccttgataccgttctcgttgtcctcgacgatcaggcattcctcgggcgtcaggcccagcatggtgatcgccttcacatagatctccgggctcggcttgccgtgcttgacgtcttcgttgctcagctggaactcgaggtaaccgtcgagtgccgccctcgacatcatcagcgacaccgtgctccggatcgagttcgacgccacagcgagccggtaaccgtcttctcggagccgcgccagcgcgtattcctgcttgaaggtcggcttgcacttggtgtggatcatctcggtcgtatagagctgcttcatctcgttgatgaagccgtgcagcgcctcgggaagcccgcgcgtcgtcgtcaggatctcgagcttgcgccgtgtcggcaggccgtcgaagatcgtcaggtgctcgtgcagtgggatcgtgtatccgaagagctccagcgcccggttgagcgcctcgtagtgccattcgcgtgcatcgatcagcacgccgtccatgtcgaagataatcgccttaagcgtggtcatgctgcgtcccggccagtcaatatcagttgcgcgcgctccggaaagtcggtgcagacggaaagcccgtcccgctcgttgagccccgaagacaccagccactggagaaatggttcatattcgtcgtggcgcccgtgaagatccggcgccaccagcgtggccgacttgccgtcggcaagaatccgctcgatcagcgccgcgtcataccagcgccccggcaggaagttgtcgatccagacaccggtcacgccgggatcgtcatagagcgaggcctcgcgctcatattcgctgagacgcgtgaacgagaccatcttgcgcttcacgccctggatgagatcgggaaccgatgcatcgaacaggaaatagttgctgtagcattcgctggagagcacttcggccagcatgtcgtgcagaccatcggccttgatgttcagcgccagcaacggcgagccgtgctgcttggcgatccggagcaactcggcgaacgagatctctcccccgcgcggaatgtcgtgcgagatgacgatcgaaggcgcgccgtccgcctggctgtcgcgcacgtcggtctccgtgccgaagccgagcgaaaacgagcgaacgaaggcctcgaccgtgttcttctccgcgggcgtcttccaatagccgcgatggctcagaacctcgatcataccgaagcacccagcgaccgcgtcacgtcgaccgacagaggcaggctctggaaatggctgagatcctcgggcacgccgagaccgtacatccccgcatccaccgagccgatcgaataggccccgatcttcgaaccgtcctcgatcatgaaattatagaccggcgccacgtagaactcgccgttgacgcggaagtcgcgttcgatcatccggtccgcatgggagacgaagtcggagcccttgcggaaattgtagatcccgacggtcgcgtgatcggaaatcacctgcttctcgacgacgttgtcgatatagccatcggcgccgaaggagacgaagctccacttcggatcattcgccgtcatcgtcatgatcatcccgtcgagatcgcccatggcctcgaggtagtcgtcgatatcgacgtcgatatactggtcgcagttggcgatcatcatcggcagatcgttatcgatctcatcgcgcgcgagaagtaccgtgcaggccgcaccttcggtcacctgctcgacgagaaagatctcacagcccggcgcccaggcgcgcagcttctcgcccagcccgtgctccctgatgtgggcggcctggcagatgaagatgaagcgatgctcgacggacgggcgaagattttcgatcaccagccggatcatcggcacgccgtgcacaggcagaaggggtttgggaagagtatagccggccttggcgaagcggcttccatgccctgccattggtacgacgatgttcaacattgcgcatatcccgaattgtatcagcttacaccgtgaggcgaccaataacggccgaagctggcgtcacgctgtctgcgcggatgggcgtccgtgaagtttggaagaaggccggcgcgtcgcgcgcgaacgaagagcgctttggcccaatttgaacccggcggccttccgcgaacgccacgaacccgcgagaaacgggctttgtttgtcttgtctgatgtgatttctgtctttggagagattggttgcgggggcaggatttgaacctgcggccttcaggttatgagcctgacgagctaccgggctgctccaccccgcgtccagcgcattcggctttgccgaatggcgcggcggcgtaaccgctgtgcggttatgccttctaccggagcaaaacccttgggttttgttcctgtgagggacgcaccattatagatcaggtgcgtcgaagtttcattctgtatgttcagaccagcaaaagcaaaaggccgcttgcgcggcccgatgttttcggctgggccgaagtttcgatcagagaagatttgttgttgcgtttt
